United States Patent Application Publication US 2019/0348154 A1 - sequence listing, part 103

SEQ ID NO: 383952 - DNA, 2097 bp, Salmonella enterica
atgaaaaaaacacatctgctcagtgtgctggcgctgggtattagcgcggcctgccatgccgaaacatatccagctcctgttgggccttcccagtctgactttggcggcgtgggcctgctgcaaacgccgacagcgcgtatggcgcgtgagggggagatgagtctgaactatcgcgataacgatcagtaccgctactactcggcttcggttcagcttttcccgtggctggaaaccacgttgcgctataccgatgtgcgtacgaaaaagtacagcagcgtggaatcattctccggcgaccagacttacaaagataaagcgtttgatgtgaaactgcggttgtgggaagagagttactggatgccgcaggtggcggttggcgcacgcgatatcggcgggacggggctgttcgatgcggaatatattgttgcgagtaaggcctgggggccgtttgatttttcattaggtctcggctggggctatcttggcaccagcggcaatgtatctaatcctttctgttcatatagtgataaattctgttcacgtgataacagctacaaagaggctggttccgtcgacggtagcgatatgtttcacggcccggcttcgctgtttggcggcgtggaataccagaccccgtggcaaccgttacgcctgaaactggagtatgaaggcaataactatcagcaggattttgcgggtaaactggcgcagaagagcaagtttaacgtcggcgccatttaccgcgtcaccgattgggccgacgttaacctcagctatgagcgcggcaacaccttcatgtttggcgtcacgttgcgcaccaatttcaacgatttacgccccgcgtatcatgacaattcacgcccgcaataccgaccacagccgcaagatgccatcctgcaacattcggtagtggctaatcaattaacgttattgaaatataatgctggtctggcggacccgaaaatccaggttaaaggcgatacgctgtacgtgacgggcgaacaggtgaagtatcgcgactcccgtgaagggatcgtgcgcgctaaccggatcgtcatgaacgatctgccggaggggatccgcacgatccgcgtgacggaaaatcgccttaatctgccgcaggtcaccactgaaaccgatgtcgccagcctgaaacgccatctggaaggcgaaccgctgggacatgaaaccccgctggcgcaaaaacgcgtggagccgatcgtgccagaaagtactgaacagggttggtatatcgacaagtcgcgcgttgattttcatctcgatcccgtactgaatcagtcggtaggcggtccggaaaacttctatatgtatcagttgggcgtaatgggaactgcggatctgtgggtcacggatcatctgctcaccacgggcagcgtgtttgccaatatcgctaacaactacgacaaatttaactacaccaatccgccgaaggattcgcatctgccgcgggtacgtacacatgtccgtgagtatgtgcagaatgatgtctatgtgaataacctacaggctaactacttccagtattttggcaatggtttctatgggcaggtctacggcggttatctggagactatgtttggcggcgccggggcggaagtactgtatcgcccggtagacagcaattgggcgtttggtctggatgccaactacgtgaaacagcgtgactggcgtagcgcgcaggatatgatgaagtttaccgattacagcgtgaagaccggacatttgaccgcatactggacgccgtcgttcgcccaggatgtgctggtgaaagccagtgttggtcagtatctggcgggcgataaaggcggtacgctggaaatcgccaaacgcttcgatagcggcgtcgttgtcggcggttacgcgacgattaccgatgcgtcgccggatgaatatggggaaggggattttaccaaaggcgtatatgtttccgtgccgctggatctcttctcgtccggcccaacccgaagtcgtgcggcaattggctggacgccgctgacgcgtgatggtggtcaacagcttggccgtaagtttggcctgtatgatatgaccagcgacaggagcgtaaatttccgttaa

SEQ ID NO: 383953 - DNA, 1575 bp, Salmonella enterica
atgaaaaaagaaatcattcatttttttcagatgttatctcgcgtctttattacacctattgcgcttttatcctttgcttctctattgttaggggttgcatcactctttctctggcatgaaaaactgcgtgaactgctcccttttttaaactctgcattatgccagtacattgctaatttgatgaataccgtaggcgcagtaataatggataacctcccattattatttgcggttacgcttgcgtttactctggcaaaagcagaaaaggagtacgctgctttgggggcattgtgtggttatatgggattattgatgggcatgcatgtgctggtttccgctaatcctgtcattaacagtatgttcactaaaagtatgctgacaacgacgttgggtattgaaacggtaaacactggcgtcgttgggggaattattactggtttgctctcaacggtaatccataaccgggtacatcagataaaatttcccattgcgttggccttttttggcggcgtccgttttgtaccgctggctaatattatgttcttcgttatttttggccagtgttttccatttctgtggttaatgctgtcaaaggttattaaccaggcggcgatgggcgtatccagtgctgggtttttcgcgccgtttatctatggcgttggggaacgtttacttttaccgacaggactgcatcagatctggaatacggttatcagggacacgatggtctccggcgtggccgtatttcctgatggtcacacggttgaaggcgcgcgggcgatttttgccgaatatctgaaaacaaatatcctgccaaccaatatggcgctcaccgatattgtaaagtttttacgcggcggacaaatcccgataaccatgttcactctgccaatgatggcgctggcgatgtatcagaccgcgaaaccggaacagcgtaagaagatcaagccattactgctgactggcgcttttacttctattatcgccggtgttacggagcctctggagtttacatttttgtttgtttcaccactgtggtatctcatctattccatcattaatggtttaagttggatgttatgctatgtattccacagcgcgctgggaggaacagaagctaatattatcggcctggtgctgtatggtttcctgcgccctgagtcaaaattctggataaatatcgttattggcattgtttttggcctcggaggttacctcttattccgtttctggattgtgcgttttgatctgaaaacgccgggacggggaagcgattatgaacaaactatcgatattttaggaattaatcaggagcagaatacagtttcaaatgatccgttaaagcttaaagcactggcgattattcgtggtttaggcggggaaaacaatatcaccaacgttgactgttgctatagtcgactgcgggtaagcgttcacgatatctctcttgtcgatgagaaaataatccaggcgacaggatcattaggctatgttcctgtggacgataaaaatgtgcaaatcgtttatggcgcaaccgtagacacaatacgtaatgctgtcagaaaattactttaa

SEQ ID NO: 383954 - DNA, 753 bp, Salmonella enterica
atgcagattcatctggttaaagattatgatgcaatgtcacaacgtgcctttgatattatcgctaacactattcgtgaaaacgccgaaccggtaatctctttaacaaccggcgcatcacccgcaggcctgtttgaattgctggttaaagcaataaatgatggcgatatcgatatcgcgaatacggtttttttgaatatagacgagtatgtcggtaatcaacatgatgtctacactgtacacacctttatgtttgaacgtctatataatctgttgaaattcaagccaaaatattttgatatgtttaatgctggagtaaaaaataaagaatttgaaattctgcgttataaacacattatggaaatgtatccgcgcgatattcaattaatggggcttggtacgaacggacatattggcgcatgtgaacccggtacgccatttgagacgagcgccttttgcgccgaacataaggaatcgaccattgagagtacgatgaagctctataacattacccgtgagcaagcgccgacgcatatgtttactctgggtttcaaagaaattatggcggcaaaaatgccgctgttaattgcaagcggaacgagtaaagcggaagcggtgcgccgcttgctggaagagccagtcaatgagtcctgtccggcatcttatttgcgcaatcatccaaattttaccttcattattgatgaagaggcggcgtctttattgcgtaaggaaacgcgcgaatgggcaacacattaa

SEQ ID NO: 383955 - DNA, 936 bp, Salmonella enterica
atgggcaacacattaatcgcgacatggcgtatggcgttggatggcctacttgcggcggcggaaattgtcgatgttaaagaagccgtattacatgcggtaagaaacgttgaaaataatccttgttttcattctgttggctatggcggtttaccggcggaaaatggcgaagtagaactggatgccgcgtttatggacggcgacaccctggattatggtgcggtggcggcagtgagagatctcaaaaatccggtgatgctggcgcgctatcttagccaacagcaacgcaataatgttctctgtggggcgggggcgtttcatctggcggtacagcaaagcatggagacgcgggataatcgttaccatctggcgcaagagaaatggcgtaccgctctgcaggcctcgcctggtccgcaaccgctggaagcctatgacgggcatgatacggtttgcattttgggccgcgcgccatcgggatcggtatgtgctggcgtttcaacttccggactgtttatgaaaaagccagggcggataggcgactcgccggttatcggttcaggctgttacgccgatagcgaaatgggcgccgctgccgctaccggcgtcggagaggacattatgaaaggctgtctgtcctgggaaattgtccgcttaatggaacgccattcaccgcaagaggcctgcgatatcgctgttaagcgtcataccgcaaaactgctggcccggcgcggcgaatgcggcagtatttcggtgattgcgttaaaccgacaagggaaatggggcgcagcgacgaataaagatgaattttcatttgttgttgctgaaccggggaaaactgcgcaggtttggctggcgcataaccagcgcccgctggagcgcgcctctgcggtctggttaaacgcgtggttaagcaacttaacgtcaggttcaggaggttaa

SEQ ID NO: 383956 - DNA, 1017 bp, Salmonella enterica
atggcaaggaaaaaaccgacaatttcggatgtcgcaaaacgggcggaagtctctgcagccgcagtctcgatggcgctttccgggaaaggccgcatttcaaagtggacggccgaacgcatcaataaagctattgatgaattgggctacgtcagaaacaataatgccgcgacgctaagaagcggtaaaacgggactgattgccgtactggtacacggcctgaaacaaagctttaacctggaagcgctgcagggtatcaatagctgtattgatgaacacaaaaaagtctctttcattatgattttcgaaacccaggctgaactggagaatcgaataaatatcgcgttgaattacaatgtggatggttttttaattgttagcgatcgggatagcaatgaaaacattattacgcgcctgaatgccctgaacattccctgtatgttcgtctcatcctcagccagatcgaatcagcgccagcaaataggactcaatgccctccactccggcagcatcgctacccattatttaattaaggggggacatatgcatatcgcctttatcggcggtgatcaaaaatctttagaccgggcagaaaagctggctggttactttactgccttaaaagaacatgatcttaaagaagatacgtcgcttatcattgcagacagtcaacaacctcccctggcggaaaaaatagcttcgctcctttcccgttccccatgggttacggcaatgatttgctacgacacggcaacaacacgctccgtcatcccggcgataacgtgctgcggacgaactatcggcaaagacagctatatcaaccgcgacattgcgattatctgcctcgagaaaatgaatgactcggattttatctcgccgtcaatcacctgtatcgatacctccggcacacaaatgggatggaatgccgccaggcaactgattttgcatatggacaatgaaaatcatcctctctatagcgaagcattccacccagcattaattatcggcgagtcggcttaa

SEQ ID NO: 383957 - DNA, 1476 bp, Salmonella enterica
atgaatacccaatataattcccgctatattttttcgattaccttagtcgcaacattaggagggttattattcggctatgataccgctgttatttccggtaccgtcgagtcattaaacactgtttttgtcgcgccgcagcagttaagcgaatccgccgccaactcgctgctaggcttttgcgttgccagcgcgctgattggctgcatcatcggcggcgcgattggcggctactgtagtaaccgttttggtcgtcgagattctttaaaaatcgccgccctgttattttttatttccggcgtaggttccgcctggccggagttaggatttaccaccattaaccctgataacgccgtaccggtttatttggctggatacgtccccgaatttgtcatttatcgcattataggcgggattggcgtcggcttagcctcaatgctgtcacccatgtatattgccgaactggcgcctgcccacattcgtggaaaactggtctcattcaaccagttcgccattatttttggacaactactggtttactgtgtgaactattttattgccaaatccggcgacgccatctggctgaattcaaacggctggcgatatatgtttgcctcggaatgtattccggcgctgctctttttgctgttgctgtacaccgtaccggaaagcccgcgctggttgatggcgcgcggcagaaatgaacaagcggaaggtattctgcgcaaaattatgggggcttcactggcaagccaggcgatgcaggaaatctcccattcgctggagaatggtcgcaaaacgggcggacgcctgctgatgtttggcgcaggtgtgattgcgattggcatcatgctctccgtcttccagcaatttgttggcatcaacgtggtgctgtattacgcgccggaggtctttaaaacgctgggcgccagtaccgatgtcgcgctgctacagacgatcattgtcggcgttattaacctgagctttaccgttctggccatcatgacggtagataaatttggccgcaagccgctgcaaattatcggcgcgttgggtatggctttaggaatgtttagcctcggcaccgccttttacacgcaggcgccgggcatcgtggcgctattatcaatgctgttctacgtcgccgcattcgcgatgtcctggggaccggtctgctgggtattgctggcggaaatcttccccaacgctattcgcggcaaagcgcttgccattgctgtcgccgcgcagtggctggcaaactactttgtctcctggaccttcccaatgatggataaaaactcgtggctggtcgcccatttccacaacggtttctcctactggatctacggtgtgatgggcgttctggcggcgctattcatgtggaagtttgtaccggaaaccaaaggcaaaacgctggaagaacttgaagcgttatggacgccgacagaagagaaaacgccggaaactgcggcacaataa

SEQ ID NO: 383958 - DNA, 444 bp, Salmonella enterica
atgacgttacgctacgcaaacacgctattgctgtgcctgcttttatccgcctgtacgctgtctgaccgctttagtaccgtagcttttcaacagctaacgttattacaggcgcgttcaacccgcttcctgcaggatgcggcgcaaacgccgtgggagaaagagaccttgctcagggacgacggcgcgattcgccagacgttttttcaggctgaacgggtcgcccggcaacgtggggataaacgccgactcgataatctggcgctgctgaaaaatcactatttgcgtctctatgtgcgggttatgcaacataagcaaccacttacttacatccaggaagagagataccaacggcaaaataatcagctctggaaattagccatacagggtgagtgtctgcgttggggcgctcgctgcactcagggagatgaaaatggcgtctattaa

SEQ ID NO: 383959 - DNA, 1320 bp, Salmonella enterica
atgaagattaagatgttttttctgactactgcttttattacacaaagcgtacacgctagcgagtttccggtaatctctctaagagatttagttaatgccgcactaatgcaccagccttctgttgctgtttcatattatgagactgaaaagaaaaacagtgatttagatgtttcacgagcagcgctttatcctaccctggatctaacatctggccttaataataatagaaaagagtcatcgggtaccgagagaaacgttgagaataaggtgtctttatcatatcgaataacggattttggagtgaggagtgctaatatcaggaaatctgaatatgaaagagataatagcaagactgactatgaaaaaacaaagaatatagtgtctcaggaagttgcgacaacctattataacattagtaaatatcgtgaaatgattgatggcgtaaatctggagaaagagttttataaaaagatgctggaaactttttcgcttctggtatcttccggggtagctatgcaatctgatatgcgtaaagtacaggtatctatcgatgcattaaataccagaagcattatgtatcagtcgatgttggatgatgaaatgtataaaatgaagaatatgactggtctgaatttattaccaggtcagattcaaagcgatgaaaaattcaacctcttcaaaaaatatatcttcgtagaaagccctgaaaaacttatggacatggtgatgaaatataacgatgactataagatgcttgttaatacccgaaaagctgcgaccgaagatattaatgccgcaaaatcatcctattttccgactgtagatctcgtttccagctatgtacagaataatccgagcggtagcgccaaaaaaagtgattatgaagatgaatttaaaacgggtatcaatgtcagtttcaacatttttaatgggttcagaaatacagcccaggaaagaaaaatggtggcaagttactcgcaggcaaagctgcaaatagacgattttttgattaaaactcgttataacattgattcacaactttcaaaatataccgcggcaaaagaaacttactcagtggcggaacgttcacatacaaacgcgttacagcttactgaattatatgagcaggagtttcagttagggcaaaaaagtttgcttgatttaatttcaagccgtaatgaagcattccaggcatatgtgagcatggtcgacagcaaatatagcctgtatatgttaaaactacagcaactctcattgatttttcatttaatggattatttaaaaggaagtactgaaagtgagttaaatggaatgaaatga

SEQ ID NO: 383960 - DNA, 1311 bp, Salmonella enterica
atgaaaaatttgaaagtcagcctggcctggcaaattttgctggctatggtgttgggcattctgctgggcagctatctacattatcacagtgacagccgcgaatggctgattgccaatctgttgtcgcctgccggcgatatctttatccatctgattaaaatgatcgtcgtgccgatcgtgatctcgactctggttgtcggcatcgccggcgttggcgatgcgaaacagctaggccgtatcggcgcaaaaaccattctctattttgaactgatcaccacggtggcgattatcctcggcattacgctggcgaatgtctttcagccaggctcaggcattgatatgtcgcaactggcgaccgtcgatatttcgaaataccagaacaccacggcggaagtacaaagtcatgcgcatgggctgatggggacgatactgtcgctggtaccgaccaacatcatcgcatcgatggccaaaggggacatgctgccaattatctttttctcggtcctgtttgggctggggttgtcgtccctgccggcaacgcaccgcgaaccgctggtgacagtatttcgttccatctctgaaaccatgtttaaagtcacccatatggtgatgcgctatgcgccagtgggcgtttttgcgctgatcgccgtcacggtggcgaattttggtttcgcgtcgctgtggccgctggcgaaactggtgctgctggtacactttgccattatcttctttgcgctggtggtgctgggcatcgtggcgcgcctgtgcgggttaagtatctggattctgattcgcattctgaaagatgaattgattctggcgtattcgaccgccagctctgagagtgtgctgccgcgcattattgagaagatggaagcttacggcgcgccagcctctatcaccagcttcgtggtgccgaccggttactcgtttaacctcgacggttccacgttatatcagagtatcgccgccatttttatcgcgcagctatacggtatcgacctgtcgctgtggcaggaaattgtactggtgttgacactgatggtaacgtcgaaagggattgccggcgtgcctggcgtttccttcgtggtgttactggcgacgctgggcagcgtgggcattccgctggaagggctggcgtttatcgccggtgttgatcgaatcctcgacatggcgcgtactgcgctaaatgtggtggggaatgcgctggctgtgctggtgattgccaagtgggaacacaagtttgaccgcaaaaaagcgctggcctacgagcgcgatgtactggggaaatttgataagaccgcccagtaa

SEQ ID NO: 383961 - DNA, 267 bp, Salmonella enterica
atggacaatacgtatattggtgagcagatacacgtctccacacgctatactaataacttaaaaaaaaggcgtgacaatgatcacataagtcacattctgttcgatttatcccgtgatttatatgatggcgagacccaaagatcaaataataagcgactgtttttaaaacagataaatcataatctactgctctcgcttactccacctgcccatcgccagagggtgcccctctctgaacatcaccatcgcaagaaaataattacttaa

SEQ ID NO: 383962 - DNA, 447 bp, Salmonella enterica
atgagcgcagaagaaaatagtggtgatgaagaattggcgccaatggtagatgggttaagtggtgcgttatgtatactgatacttgtttctactgtatttatgctgtcaggtacggactcaattgtcgcagctgatggcggggcattaaaatttagagactcatttaccgatcttagtaagaacactatttactatagcggtgctgtctcgctttcgtcttctgatctgtaccagacgcgtaatcaactgattagttctggtgaaaagaaaatcacattctatggcgcgatatctaaaaatattgaaaattataaagcgaaaaacacgtttaatttgttgaaaatttatacagacttaaaattgccttctgatatagaggtacagttcaaggaaggggatgtgtctgcatgtgaaaaaagtctatcttgtatttactggagttactaa

SEQ ID NO: 383963 - DNA, 621 bp, Salmonella enterica
atgaaaagtagccttttaaaccgatgccaaaaattaaatgtaaagcaagttattgttttaagaccagatattaagttgtttgaaacaaggattaataatgagaaaatattaaaaaatacattgttgtatccagcgacagcattaagctataaaaatcatatgattattcttaaaagcttaattttgctaaaaaaacaatatggtataaaggatattaagtttcaggttacttttagtagagggcagtataaattatttgatcgttatgtttgtgagaatgaactatctactaatatagaatatttaggagtgatatcttatctcgaattgcaaaaaaaatacctcagtgcatcactggttgtatttcctagttatatagaatcatatggattaccgttaatagaagccgccatcttaggtaaatggattgtatgtagtgatttgccatatgcacgggatgtacttaacaaatacgaagggggagtttttgctaaatacaatgatgaaaatgattgggctaacgcaatctatgatgtactaaaaaacaaatcttattcacaaattaggccttatgagaataagaatttttcttcctggccgcgtttttttgatctaatttaa

SEQ ID NO: 383964 - DNA, 1032 bp, Salmonella enterica
atgtttaagaattctacattattaataactggtggaactggttctttcggtaatgctattttaaatcggtttttggaaactgatatcaaggaaattcgtattttttctcgtgatgaaaaaaaacaagatgatatgaggaaaaaatacgctagtagtaagcttaaattttacattggcgatgttcgcgattataacagcatattagctgcaacaagaggagttgattttatctatcatgcagcagcattgaagcaagtaccgtcatgtgaattttacccgatggaggctgttaaaacaaatataattgggactgataatgttttagaagcagcaattgctaataaagtttcacgtatagtttgcttaagtactgataaggctgtttatcccattaatgctatgggcacatcaaaagcgatgatggagaaagttattgttgctaaatccagaaatgctcctgatggaatggtgatatgtgctacgcgctatggaaatgtcatggcctcacgtggctcggtaataccgctttttataaaccaaattttaagtggcaaaccaattaccattaccgatcctaatatgacgcgttttatgatgagtttagatgatgctgttgatcttgttctgcatgctttcactcatggtagcaatggtgacatttttgttcaaaaatcaccggcagcaacgattgaagtcttaacgcaagcaattcttgaggttatacaatcacctaagcatccaataaatattattggtacaagacatggggaaaaattgtatgaggtgctctgtagtcgtgaggagatgttagttgcacaagaccaaggtaattattacaggattccttgtgataatcgtgatcttaattatgaaaaatattttgagaaaggtaataaggacgtagaaaaggtcgaggattataactctcataatacttatcgtttaagtaaagatgagatgattgtattattacgtaagcttacgtatatcaataaaattgaatcgggtaataaggctgattcagatgtctaa

SEQ ID NO: 383965 - DNA, 876 bp, Salmonella enterica
atgtctaagaaaattctaattattggtgccaatgggatgttgggcagttctttattgcgcttttattcgaaactttctgaatatgatgtcttaggcacggtaagaaatgatgaggcaaagttaaaaatttccaaacaaggattcacaaatataattagtaatgttgagttttataatttagacgtaattaataaaattatagctgaatttcatccggattatgtttttaattgcgtagggattataaaacagcttaatgctgctaaagattatttggtatcaatctctgttaattcgctattacctcatcagttggcacaaatttgttctaggcataatgcaaagctaattcatttttcgaccgattgtgtgttcagtggaagacaaggttcctattgtgaaacggatatacctgatgcttctgatttatatggtaaaagtaaacaacttggtgaaattgactatgatggtcatttgacattgcgtacttctattataggacatgaaatttcaagtaatcatagtttagttgattggtttttgtcccaaaatcatacggttcatggctattcaaaagcaattttttctgggttacctactgtgtatgtagccgaggttattcataaatatatattacctaatgaaagctgtatcgggttaagacacttaagtgttgcgccgattaataaatatgagttgttaggcttaattaaaaaacaatattgccataatattaagattatagaatctactgaactggttattgatcgtagccttgattcatccttatttcgtagagaaacgaactttgtacctttgtgttggtcagaattaattgagaaaatgaataatgaatacaatgaatatttcagataa

SEQ ID NO: 383966 - DNA, 1155 bp, Salmonella enterica
atgaatacaatgaatatttcagataaaaaaataaaagtagttactgtagttggaactcggccagagattattagattatctcgagtgatgtctgtattagaccaatatacagatcatacaattgtacatactggtcaaaactatgactatgaattaaatgagatattttttcgcgagcttaagattagaaaacccgattattttcttaacgcggcaggttgtactgcagctgaaacaattggtaatgtaatcattgaggctgataagatctttgaaaagattactccagaagcacttctgattcttggtgatacaaatagtgctcttgttgctattgcagctaaacgacggaaaattccaattttccatatggaggcagggaatcgatgctttgactatcgagttccggaggaaataaatagaaaaattgtagatcacatttctgatattaatcttacttacagtgaaatagctcgtgaatatttattacatgaaggtgttcccgcagatcagattataaaaactggtagtcccatgcgcgaggtattaaattattattataatgatattaaaaaatcttctgcactcgaaaaactcaatttagtagctgatggttattttctggtaagtgctcacagggaagaaaacgttgattctttagacaaattagctagtctgatagacatattaaattcgatatctgaaaaatattctttacctgttattgtttcaacacatcctagaactcataatagaatgaaaaatcttaacgttactatcaatagtaatataagatttatgaaaccttttggtttctttgattatatttttttacaggaaaatgctcatgtagtgctctctgatagtggtacaattactgaagaatcatctattttaaactttcctgcgcttaatcttcgagaggttcatgaaaggcctgaaggctttgaagaggcggctgtaatgtttgtaggcttgaatggcgagcgcatatttcaggcaatagaaattcttcgtgaacaaaaacgtggacaatgtgagcgtgatttatatctagtttctgattattctgttgacaatgtctcacttaaggttctacgaattatcatgagttatacaaattttgttaatcataaagtttggaagaagtcataa

SEQ ID NO: 383967 - DNA, 1197 bp, Salmonella enterica
atgcggatagtgttaatttgcgatgattatctacctaatagtacacgcgtaagtgctaaaatgatgcatgagcttgcttgcgaatttctaagacaagggcatgaatcaatagttatatgcccaaataatggagttgatgtaaaaaaaatcactcatataaagcttgatggcgttgatatttttaactttcccaatggaaaagttaaagatacattaaaatttaaacgtgcgattaacgaaagtttactttccataaatgcttggcgtcacttatcaactgtaattaaaaataaaaaaattgatggggtggtttattattcaccttcaattttttttggcccgctagtcaggaaaataaaaaattattggcattgtaaatcgtacttgattttaagggattcatttccacaatggcttattgatcagggaataattcggagtggtgggtttacggaaaaatatttcaggttctttgaaaaattaaattataaatctgctgattatatcggagttatgtcacaaaaaaacaaagaattatttttgaaactttatcccgagttttctaatgtttgtgtactatacaattgggctaatctgaaaaactgcgatttaattcggccaagtgaaatactcaaacagcattcattatctaaaaaaattatatttttttatggtggtaatattggccatgcccaagatatgggtaatttaatgcgacttgcattgagaatgaagatatttgataatgttcattttctttttatagggcagggtgatgaggttgaattggttaagaattttattaaaacccactctctgaaaaattgtacgtacttaccagcaatcagccagcatgaatattcatccttattgagaatcgtccatgttgggttatttagtttagcaaaaaatcattcggtacataactttccgggaaaacttcttggatatatggccaataaattgccaatcttaggcagcgttaatgatggaaatgacttaaagcaaattatcgaaaaatctcactcaggttatgtacatatcaatggggatgaccagagtttattggattcggcagttatattagctaatgatgccctcctccgaaaaaaaatgggggaaaatggttgttcacttttacacgaactattttctgtagagtttgcagttgaacatattgtattacggctaaagtaa

SEQ ID NO: 383968 - DNA, 498 bp, Salmonella enterica
atgcaagttagtttgttttcagcaaaacaaatgcaagagttgattgacgttgcaaaaaaatctgaacgacttagagcgcatttaagcttacatgcaagtcaccaagataaagttcaaatgcttctaattgccttaatcaaaggtacatatatccctcctcattttcataaaaacatatggcaatgggagtattttcaagtcattaatggtgaggttgagttatatgtatttgatgaaaatggcaaggtgaaaaatatatttcaattaggcggccagcatggtgcattattcgctaaaatagaacctaatactattcatacacttgtctgtcgttcattacatgctgttgtattagaggttaaagaaggaccatttctcgagttagatgcaaaggtggtacctttctggtcatgttttgaaagttataaagaaatctctcgagaaaaaattatttacaaattagagaatttaagtgtcgggcaagtatataaagtttaa

SEQ ID NO: 383969 - DNA, 393 bp, Salmonella enterica
gtgatatggaaagtggctgaatggagctttagcgggaggcgattctgcatcccgcagtggttttatgtttccctggtggcaggaatggtccagattttgtttctgaaattaatctcgctccagcggcagggcgggataatgattttttatcggcggcgcggtgcccccttccagatgcagcgccggattattttcagtcagtccctgctgaacgacgtaacgcatgatgttgcagagttgctgccgggtacgggacgcgacttcgagaaagcttttcttctcaataacctgcgacaaggccgtgaaatcctgcgttttcagcgtggtgacgggcagatgaccatcgccgggaagatacggttttctatgctggcgagaatatgcgcggcataa

SEQ ID NO: 383970 - DNA, 312 bp, Salmonella enterica
atgaactttagacgtttgaaatattttgtgaaaattgttgatacaggcagcctgacgcaggcagcggaagtgttacacatcgcgcagccagcactcagtcagcaggtggctacgctggaaggagagcttaaccagcagttattaattcgaaccaaacgcggcgtgacgccaacagaggccggaaaaattctctatgttcatgctcgggatattttacagcagtgcgagcaggcgaaattggcggtcaacagtagtgagaagagaggtaatgacgcgctctttgtttctggcccgccttcatttcttagatag

SEQ ID NO: 383971 - DNA, 291 bp, Salmonella enterica
atgacagtgaaatataccgataatgcaaaattatttattagcttcattaatattgggattgtaggttgtgcttttatacttttttttattttgtatgagcctgatagtgaaatagtaacctactctcttccagcagagttttcctctcctacatgtgatgcgcgtaattttattggctatgtcgatgcaaatgattttgcagagtatataaaaacagtagaacggacgcactacagtatgtattgtctgaaaaaaacagagacgggtcagtggagtatttatgcaaattaa

SEQ ID NO: 383972 - DNA, 3078 bp, Salmonella enterica
atgtttcttgctgataatattatcaaactgccgcaaaaaataggacagaaagtttattctgttgtctctgagatgtcgatagaggcatggataacaaaagaaccgcagccattcagttatcgctgtagtgggtcttatcagaaacttgccattggttcatcctggggtcaattgtttgactgtgcctggatgcggatttacggcacacgcccaacggcaacataccggcataaactggtcgcgcttgttgatatcggcggtgaaggacttatcgtagctaaagatggttcacctgtctgcggcataaccaataaggcatcatcctacggtgtcccacccgataaaccaggcaaatgggtgatagatctttctcttatcagcgaaggcaatgaggtcgagttttgggtagatgcagcctgtaacgatttatttggttatgtcaccaatggcggggtgatttctgatgttcacatcgctacctgtaaccaactactgaagtctctttattatgatgtcgaagttcttttcgactggattaatgacggtcagacgttcgaaaccatacatcctaaaggcattaactcagagcaagttacagcccaaagaggatgcgatgcaaacgaaattatcaaaattctcgaatatattgatgatactttagtaacctttagcaacgaagaattattaaagtgtaaagatgctgcccagcgaattatcaatatgggcaatcagtcgtcagacattaaaatcatggcgactggtcatgcgcatttagatattgcatggatgtggcctttaagagagggacgccgaaaagctataagaacgtttgctacggcactggccaatattgataaataccctgattatatttttggagcaagccaatatcaactttttcattggataaaaaaagattatccctatttttttgagaaattgaaaaaacaggttgctgcagatcgctttgaattacagggttgtttctgggtcgagtgcgatttgaatctggtcagtggtgagtcgcttatccggcaaattatgcatggaacacaatttactcaacaaaatttcgctaaaaagattaactacgtatggcagccagacgtttttggcttccctgcatcactcccgcaaatactgaaaaaatcgggcattgaatatatcgcctcgcaaaaactttcacaaaacaagattaataaattcgccaattatctttttcgctggcaaggtttagatggttcagaaattataatgcataatttccccgaagatacttatgatagccgtgcccgcgcccgttctttagaatacattgaacagaattataaggaaaaggagatctgtccctatgcactgatggtatacggcgtaggtgatggtggagctggccctggcgaagagcatatagaacgtttaacgcgcatacgtaatattgatacgcttcctcatgttgactttagtcgcgttgataaattcttctcatatgtagagccctatcgcgaatcgttacccattatttcgggagaactttattttgaagctcaccaggggtgttttacctcagagtccacaacgaaagcgcataatcgaaatatggaaaataaacttcatgatgcggagttttttacttcgatcgctaataatatgaccaccgttcttcgcagtgagtttgatgcattatggaaagaaacacttacccttcaatttcatgacattcttcctggctcatgtatctccagagtttatcaggaagccgaaaaggaatatcaaaaattagcaggtaaagtggatgaggtaattcacgatgcgcgctatttgcttatcaataatattgatacatccaccttcaaaaatccacatgcgatatttaacaccacttcctttgaccgcaatgaatgggtaaatatagacaataactggatgaaagcacggctgaattcatatggttatgctgtgattgagccacaaaatgagacggtaaatggcctgaaagctgagtgccgtagtattgaaaatgatctgattagactccttttttctgacgatggcgatttaatttcacttttcgataagcggaatgggaaagaattcatcaccgaaaacatgcatagtgaaatacgagcctatcatgaagatgctggtttcttcgccgcatgggactttgcgccaaattatcggaatggtcaatcgaatgttttacgcgctgaaaaattaactgcagtgatcagcggaccgaaaacgaccatgactgtgcattatcattacaacgcctcttacctgcgtctggtctttaccctcacacaggaaagtccacgtattgatatacagacctttatagactggcacgaacccaatgtttctttgaaaatcaaatttccagtatcagtgcaaacacctgtagcacagtgtcaaattcagtttggtgtgattgaaagaccgacacatagcaatgattcttatgcttttgctaaagatgaaatacccgcacaccattgggtagatctctctgacagggagactggcatagcgttaatgtccaaaaataaatatggctatcgtgtcaaagatcaggcgattgaattaacattactccgttcacagcacaaacccggagagatcgtaaaaactgaagattacgataatttcttgcgaaataactttggtgatattggcaaacagaaatttactttctcgttatttcctcattatggcgattaccgtgaaggtggcgtcattaatcaggcatacataatgaatcaccctttgcaaatcgtcccagtgactccgcatcccggcgattttcccccttccctctcattttttaacatcgataattctgcagtcattattgaaaccattaaattagcggaggatggcaatggcatcatcgtgcggctatatgaaagccatgggcgtgccgcctctgcgattctttcctgggtgggtcattatcattatgtgcaatatgtcgatctgctggaaaatcagcgcaatgccagcctgtattgcaaacatcactgtacgcttacattcgaaccgtttgaaatcattacgctacgattaactgaatcatga

SEQ ID NO: 383973 - DNA, 1869 bp, Salmonella enterica
atgattttttttggcgatataaaacctgtcggttggttaaaaaaaagaatggaaaattacatgcaaggtcatatcggtgagctggataaaataattcctcatctaattaccgcgcacaacatttatgggaaagaccgtattagtcttaatacgacctcgacggggctcggaggaataaaagatgaaggcaccaaggatgatttttccatgcagtattattggtggaatagtgaaacacagtcaaactggaaggacggattctgccgtagtgcctggttattagataatgcagaatggcatgaaaaggctaaagttttatgcagtgacctcattgagacccaggatgatgatggttatattggaatatatgatccatcgctacggtttgactgtaaaggtgagaatggagaattgtgggcacaagctactgccttacgttttttactgggatgctacgaatctacccaaagtgaaaatttatttaacgcaattattcgcgccgcgcaacgcataatggagggatatccgaagggatcatcataccctttcattgtgaaagatggatttgccggtcatagccacgggctagcaataaccgatgtgttctatcgtctttatgagttaacagatgacattgattatcttcaatattgcctgtggctgtatgaagattattctgcaggaatggtgtcagaacaagatttacaatacaaaaatgtcattgatgaaaattatattctcaaaggtcatggagtacatacttacgagcatataagagcgttagctattgctgcgagccaacgtccacaataccgtgcggcgttaaatacatttttagcccagcttaaatattatattaccccttccggagcccccataggagatgaatggatcgataaacgaacagctaatgccactcatacaggctacgaatattgttctgtccatgagctctttagcacttatatgttgttgataaagttgaccaataacattcacctggcagatgatgctgagtggttattctataatgcgagttttggtatgcagcatccgacgcatcattccacgatgtactgtaagaccgataattgctatgaagctaatgaacgtagacatcctgatagcagccagttcaacacccgatataagtactcgcctactcacgaagatgcagccgtctgttgtgttcctaatactgcaagaacaatgccgatatttgtcgaaaatatgtttcatgaaaatagtaatggctttgttgcgctattatatgggccgtgcgaattttatagtaaatacagcgatgttcctgtaaaaattacacaggtcacaaactatccacataacttaagtattcatttcctcattgaatctacttcatccgtccagttttctctcagtttccgttttcctctctgggcaaaaatgatgattattgatggtgtcagttatactcaacgtgatgctcaggattctctcatcacgttgacaaaaatctggcaaaaacatgacacggtagatatagaattcgttgttgatattcagtttaatactgatttctgtggtgatatttatatctctcgcgggcctgtattgtatgcccttgagattgaaggaaatgcgattacaaagcaatcattgctaaacggacggtattcagaaatcggatatactccctgccaccgcgagcatgaatctcttagattttcttatgaagattctacttcctttacttattctaccacacccgatggctttggatatataggaggttatttttattcagataaggttaaaacattcagaaaactggttccttttgggcaaaccatccttcgtaaagtgacattcgccaatacagataactaa

SEQ ID NO: 383974 - DNA, 441 bp, Salmonella enterica
atgctctcctcagcagagcaggaagtttatctcaatacggattttgacttgcaatttttgaaaacagagatttgtcaggcgctcgatcgtaatgttcgggtgattgtgttttcatttaataaacttgttactcctgatcctcgtgttgaactctattaccggtttaatcgcgatgaggaatattacccttcgcaccgttttatgcttgtcgttgacatgaagacagttatggttttttcgcaacgtgccgaatctcttggtttattttccaataacaggctgcttatcaaaataattgcagaacacattcatagcgatatctatctcactaagtatcaacaaatttaccctgatgcaaaagcattaattaatactttacacgaatcaggaaatgatatggttcaggatgaaaaacatttgagtgatgataaaaaacaataa

SEQ ID NO: 383975 - DNA, 519 bp, Salmonella enterica
atgccaattccgtgttgcatctcaataactggccagaccctgggaaatatcactgcgggtgctttcaccgccgattctgccggtaacatctacgtgcagggccacgaagacaagatgctggtgcaggaatttttgcacaacgtgactgtcccgaccgatccgcagtccggccagccttcaggccagcgcgttcacaagctattcatcttcactgtggcgctgaacaaggccgttccgctgctgtataacgcgctggcttccggtgaactgctgccgaaagttgaactgcactggtggcgtacctctgtgaaagacaagaaggagcactatttcaccacccggctgacgaattccactattgtggacatcaatctgcatatgccgcactgccaggacacggctcagcgtgaatttacgcaactgctcgccgtttcactggcatatcgcaagatcgaatgggaacacatcaagtccggcacctctggtgctgacgactggcgtgtgccgctggaagcataa

SEQ ID NO: 383976 - DNA, 510 bp, Salmonella enterica
atgtcttctgatgaaaaatcaaaaagaaagaaaatactgtcaggtaatgatatgcattatcctggccagacaaaccatgatgcctgctatgtacctgaatgcgttcggcagtacagccgcgagcctctttatattcttgttgcacactggtgcctgcaacagcagaactgggttcagcgtaaccagatatcagaggcgtttcacatcacagccagacgggccagctacctgattgcctatctgagaagtaaaacatcacgggtgatcagggtctgccgtcatcagaccctgcccaataaagcacgacgctatgaaatttatgttatccgggttcttgacagtcccaccccatccacgcgccgtaaaaaggccggaccacagccggcatcaaaatgccggagcggtaatggcgacaggtcgatggcaaatgagctgtggaaccgactgtgcagtaacagaaatgcgggaaaaatcctgaaaaagaaggaggatgaggatgacggaacataa

SEQ ID NO: 383977 - DNA, 1062 bp, Salmonella enterica
atgacagaacaattattcaatatgaaaacacgggtgttgtcaggtgtgtttctgttttttgctatctgtggtgctgcgcaggcaaacatcgactggtcatattgtgacgcgaatggacatgtcagcattcagaatattaatttaattggtggaaaattcgtcgatggtcaggaactacaaagggttaccgttcccattagttatacctgttatacaaaatggaaaagttacggtccttcttactacccaacgcttaacctttatgacctggcgcaaacagtaacagcactacaaaatagtggtcttggaatggatatcattgctcaggaagggagtatggcgccagtcacatttacatggaaggagatacaggcaggttttgctggctggtccagttcaaaggtatttggacaaaggatggaaccggagaaaacatacaatttgagcgggacgcttacttttcgtatttttgtttatcaggcgtttacaaaaacatttttgaatataaatattccggcaagcacgataaatattcttccttatgatccatctggcgcaggtgcgccaagtgttccattcaagcctttaaccatttctgcctttaacatcagatttatccctgacaactcaggcagggttattatctcgccttctgtgctcagaatggggcgtttttatacggaatataaggaaaccatgctggccagggaaataccttttaccgttacagcacagcagaatatcggaacgcaggccccgttcgtcgccccgctggctatagagttcaggaccaacggtctgacactggctgatgctgacagcgccgtcattcttaaaaatacaaaaggggagggtaatggtttcaggttgtcggtaatggatgaagctggagttccggttaaattcaatacgaaaatggatatggggcgtattaatctggataacgcttccggcggcaggattgtaaaacagtatagagcgaaagttgaacctataccgggagtggaaattaaaactggtgatttttcggcagcgatgactgtaattgttacgtacgtttaa

SEQ ID NO: 383978 - DNA, 582 bp, Salmonella enterica
atgcgtaataaaataatacttgccatggcggctgccggtatgatgtatggcgcttctgtatatgcagtcgatccaccagcaacaggcccgttcggctcaggtaaaattaccttcaccggtaccatcaccaactctccctgcgatatcgcgccgggtgatgacgctatcaccgttccgtttggacagatttcttatcgtaaactgaatgccgccgacgcaactacggactcaaaaccgttcaccattcacctgcagaactgtgctttcgatccgaataatccggatgtagttggctccgccgggcaaatgtccaaagtgaccgtctctttcagtggcaccgctgataccggaaataaggcttacatcagcacgggcagcgcccagcatgttggtgtccagcttctgaaaagcgacaattcctcactgattatacccaataccccgatgccggatgccgacgctcagcaattgcaggccgggaataacgaactcaacttctttgcccgcctgatagccctgactgctaatgtcacgcccggcgatgttaacgcatccgtcacctataccctgaaatacctgtga

SEQ ID NO: 383979 - DNA, 891 bp, Salmonella enterica
atgagtcatatttttaaagtcgcatttatttttattgtcaatattatgtttttaataaatgcttcagctacaacgatagataaagataaatttgtggcagcgaatggtatcaaaattcattaccttgaggagggcgaggggccgccgctgttattgattcatggcggaggactgacggcgaaaagctggcagggattagctaaagaggcatctcgatattttcgtgtcatcatgccggacagccgtggacacggattaaccaataaccctcaaggaacgtttagctatgatctgatggcggaagatatggcggcttttattaaagccttgaaactcgaaaaaccgctggtgatagggtatagcgatggcggcatggtcgttctgaaattaaccagccaatacccggatttagcgcgcgcaggtattgtcggcggcgcaatgcatcgttttgccaatgcccattatatgcaggggatggaacgtttttatggtaaagggatgccccagggacaattgatggagagcgatctggataacatagcctcaacatcccctggaatggtaaaattctttcagaatatgcatcacccagagcaaaaagattactggcgtaccttcctgaaaggtgtctggccaatgtggaccacacctacgtcactgactgaaaaagaggtgaaacaaatccgcattcctgtgctattactggacggcgaccgcgatgaatttttcaccgttgaagaggtcacggagctgtaccggctgctgcctcaggcggagatggccttcattccaggtagcggacatgccatttttcagacgccaggaaaagcgccgcttttttacgcaatagtacttgagtttttacagcgacaactccccagcgcttcttga

SEQ ID NO: 383980 - DNA, 1233 bp, Salmonella enterica
atgtatacaaatcgcaggtattttatcctgatactgctttttatcgcctcaatgattaactacattgaccgagcggctttatctattcttgccccctacattactaccgatcttaacgttaacaaggcagagttaggcttaattttcagtagcttcgctattggttatgccgtattttgcttcgtcggaggctggctggctgataaatatggccctcgccggatcttcgccggctcgatggggctgtggtcgctgtttgcgggacttacttgcgcggcgttcaactttgtctccctgtttgtcatccgcgtaatttttggcgcagccgaaggtccgatgggctcggtgacgaacaaaaccatcgttaagtggttcccggtgaaagaacgtgcgcgcgctgtgggggtttcgttctccggcaacccgttaggcggtgcggtatcggccccgattgtcgccgccgccgcgcttgcgtttggatggcgactgacgtttattgggatgatggtagttggccttgtatgggttgttgtatggcttgctgcaacgaaagggtctgaaagcaaggaaagcgaactgccagcgtctgccactattgcttcctccgttacagaagaaacgacagaaccggataaaaaactctcctggtatttgaagcagcctgttattctttttaccgcgttagctttctttgcctatagctatattctctttttctttatgacctggttcccgagttatctgctggatgccaggggacttaatatgcgcgatatgagtattgccaacgtattaccctggctgctcggttttgtcgggcttgtgtccggtggttttatttctgaccacatctataaaattacgcataatctgctgttctcgcgtaaggttgttatcgttaccggccttattatcgccgccatatgtatcacggcttcagcgcttgtcgccagcctttatagcgccattgcgctgatgtcggttggtatgttcgccatgtatgtgacgacatcctgctattgggccatcgttcaggatacggtaaagggcaataacgttggcgccgtcagcggttttattcactttctcgcgaatctggcgggcgtggttgcgccgatgatcactggctttatcgtccagggtacaggacaatattattctgcattttacctggttggcgctctggcgatcgtatccgcagttttattaatgttaggaggccgaaaaaaatga

SEQ ID NO: 383981 - DNA, 1089 bp, Salmonella enterica
atgaagacgcagattaagcacgttgaaacaacgcttttcaaagtccctctcgccgaggtcttagttgacgcgaaacatggcgatcatagccatttcgaactggtaaccacgacaattacgctggaagacggttcaactggcaccggatacacctataccggcggaaagggagggtatgcaattaaagcgatgatcgaccacgatctcgccccggtgctgacggggaaagatggcgcggcgattgacgacatctatgactttatggaatggcatattcactacgtgggtcgcggaggcatcgcgtcatttgcgatgtctgcggtagatatcgccctttgggatttgaaaggcaaacgtgaaaaactgccgctgtggaaaatggctggcggtaaaaacaacacctgtaaagcttactgcggcggtattgatctggcgtttccgctggaaaaactattgcgcaatattcagggatatctggacagcgggtttaatggggtaaaaattaagattggccgtaaagatccgcaagaagatatcgagcgtatcaaagccgtgcgcgaccttatcgggccagatgtcacctttatgatcgatgccaactattccctttccgtcgctcaggccatcgctctgtcaaaagccgtcgagtcctgtaatattacctggtttgaagagccgaccattccggatgactacgatggctatgcaaagatagcggaacaaacgacgatcccgctggcaatgggcgaaaacctccataccatccatgaattcggttatgcgctggaccgggccaaattgagctatattcagcccgacgcgtcaaactgcggcggcattaccggctggctgaaggcggcgcatctgtcgacgaatggcggtctttcggtatgctcacacggtatgcaggaattacacgtcagcctggtttccgcattcgatactggttggctggaggttcacagcttcccgatcgatcaatataccaaacgtccgctggtggtcgacaatcatcgcgccgtagcgccggacacctacggcattggcgtagagtttgactgggataagctgagcgtttacgaagcctga

SEQ ID NO: 383982 - DNA, 507 bp, Salmonella enterica
atggcactgaacgacagtaaaatccgcgctgcaaagcccctcacgaaatcttacaagctcactgactcacaaggtctgtacctgaccgtatccaccagcggcgcgaagctatggtatttccgctatcgctttaatggcaaagaaaaccgtctggcctttggcccttatcccctcgttacgctggcggaagcccgcgagaagcgcgatgcggcgcgtaagctgctggtatccggtgtttgcccttccctgccccgtaaggcggagaaagccgccgttgacggcacgcgcacctttcagtatatcgctaccgcgtggcataccagttgccttaagctgtggtcagaagaccacgcggacaagatcctcacctgcctgaaacgctacgtcttccctgatattggcgcaatggacattgcagaggttgaaacccgccatctggcgcagcttgttaaatccatcgacgataagggcgtgcatacgtcgccgggcgggtgcgccagcatctga

SEQ ID NO: 383983 - DNA, 234 bp, Salmonella enterica
atgagcaaaccgcgaaaaaaagactggcatcccgccgatatcattgctgctttcagaaagaaaaacacctctcttgccgcacaatcccgccaggccggactgtcatccagtacactggcaaatgcgctgacccgctcgtggccgcgtggtgaaaaaatcattgctgctgcgctgggtatcgcgcctgagaaaatctggcctcacagtattttgataaagaaggcaaccggatag

SEQ ID NO: 383984 - DNA, 1011 bp, Salmonella enterica
atgcaaattctgcccgccaccgcgctaaactggctggcgcagtaccgggaactgtatgaatcatttctgttttgtatcagcggttattacgatcaggccggaatcctgggcgaactggtgcaggaagcggacagggcttcggtggcgcagtttatgggggcgaatgccagcgcggcgctggaacgtccgcaaccctcgcagccaaaacagatcctgaccgcgctcagagaactggtgcagtcacagcttaaactgaataaccccaattttggctcagacggctggctgactgacgatgcgctgtggcttatcagtaaaaccaccgctgacaggatacgcgcctggctgctgcaacagggtgtgaccggtgttcccgacagcaatatccggttgtttgatgagatgcaggcgtatggtctgattatcccgacacaggaagataaggcggtctggagctgtgaaattcatgctgacagcggctggacgccgggctgcccactgacgctgctacgcatattgcctgcgcgtatctgggatacacccgatgctcgccccgcaccgttcaccggaaaaatcactccggttgctggcgtagcgaatacgcctgaaccctccgccacaacagcagacagtatcagtacgtcgccatcggcaatcatctctgatccgctggccgatctgacattttcgctgtttgcaccagaagaagaaagcctcgccagcgccccgctcccctcagaacctgccgacgatgtggatgacataccgctccctgtcgcaatgaccactggtaatacgagcggtactgaatggacaaagatacaaaagatgttccagaagcaaaaactgcatctgcgtggtgatgacggtgtgaatattttcgcctgtgaggtaaaggggccgcgcaaaacccggctggtaaaaggctatctgctggataaaccagaactgattttcggtaacagcgtgccggaggataacccgtgcctgtcagttatcagcaatgtgtaa

SEQ ID NO: 383985 - DNA, 204 bp, Salmonella enterica
atgcctgcttatcaagtatgtcagaatttcttccaggatgccttagctccgtttcataaataccgacaaacctcagaaaaacagcagaacgcaaagctccaaaaagcatttcttgatgcgctcgccgaagcggtaaacccgaagtccagggtacttatcatctattcagtagcacagatgactttaagccacgggaaatcatga

SEQ ID NO: 383986 - DNA, 357 bp, Salmonella enterica
atgaagttgtacagtcgccatatgcagatagagcaaaacttccgggatgagaaaagtgagcgttctgggctcggtttgcgtgccagctacagccgttcagcaggacgtcctcttgcgctaagcctgctggcaacactgagcacaatagtactgtggcttattggctatcatgctgaaaataaaggattacatctgagatatcaggccaacagtattaaatcccggcgggttatttcatatctgacgttagcggagaatgtcctgcgacactcctcgctaattttaagacgaatagtgctgagcacccttcttaatcatctcgccaaaacctaccgaagtatggtgttggtttattag

SEQ ID NO: 383987 - DNA, 156 bp, Salmonella enterica
atgacatctcaccgactgttacgattaccgcaggttctggataaaaccggcctgaaacgtccacaggtttacagctatatgaagaccggcgattttcccaaatccatcaaaattggcccgtccagcgctgagggatccccacaaactcagcgctaa

SEQ ID NO: 383988 - DNA, 588 bp, Salmonella enterica
atgcctgacgaaagacgatcactggatggtaaaactgagggggattatatttcacctgccagttatattcttgatacaccgttattaggtcatgaatgcattacattacaactgcgactggccaggtcactgagacttcctccccccaaaacgggacactgtaatacccattgtggcattctggtttgtgatggagctgatatatttcaactagtggaatgctgctcaccagatgaacgtattaatcagcaattacaacgattatctcacacaagagtagaatattataaaaataagttaaataaacagaggattaaccgtcatcgatatggttattttccgctttaccagtttcctgccgatgcatggtttgtcattaagcgtgccgcacttgaccagtttatccatatttttttaaatgttctgataaacaggaaagaaaacctcgaatatcaacccctgtatcacgcctgttgtggctggcctgtaaacataatgaccacatcagtcagctcgtcgatcatccctacaaattactgtctgtttttgaagaatgggcgcaagttgacggtatcactgaacatttaa

SEQ ID NO: 383989 - DNA, 195 bp, Salmonella enterica
atgatggtaataggaagcagcattcatatctcgttctcctttataacatcacagattccagaggtacttcgtgccgctataacgtacccgataaccgaaataacgggacagacaatggatgcggtattcacttatgaaactgaatacatttctgcgacgaacgttttgcatatatcacattcacttaatgaatga

SEQ ID NO: 383990 - DNA, 804 bp, Salmonella enterica
atgaatttcagactggcagtatatttatgtgcagcaacatttttactggctggctgcgtgccacgctcccccattgacgcgaggaaaacaagtttatccggcaaagagagcaacatcagcaaaagcacaattgctgcgcaattaaccgataaagatatttttggtaatgaaaccacactggccgtttcggaagaagatattcaggctgcgctggaaggggaaacatttcatgtaccaatgaattcagccgttatcctggtccagtccggtagtcgcgcaccggaagcgatgatccagcaggagatgagcaaatattataccgtttcaacattctccggcattccggacaggcaaaagcccataacctgtaataaagacaaaaacaaagataaagacgacgagagtcagaatgtcgcggttgctgaaaatatgaactggatgcaggcgctgcgctatatcgccgccaaaggtcatcagaaagcgattattgtttaccaggatacgttacagacaggaaaatatgatcccgtgctgaaatcaacagtgtggtccgactataaaaatgaaaaactgactgataccacatcactgcgctacctggtgcgttttatcctggtggatgtggctacaggagaatgggctacctggtcgccagtaaactatgaatcgagagtaattttcccccagaccgggaaaaaagataccagcaccacagaggttacagccacagagcagcaaatcacgcagcttaaacagaggacgtatgcggcgatagtgaaagacatggtgaaccgctatcagtaa

SEQ ID NO: 383991 - DNA, 1038 bp, Salmonella enterica
ttgacggtctggcttgatgagtgtgccattgctgcatggactgaggatgcacggcctgaaggtcgcggccgaccgctccactacactgatatggctatcaccacggttctgatggtgaagcgagtatttcacctttcgttacgggcgttacagggttttgttgactcaatttttaaactgatggctctgccgatacgctgcccggactactccctggtcagcaaacgggcaaagaccgttaacatcagcataaaaacgccaacccgtggtgaaatcgcacacctcgtcatcgacagcacaggcctgaaagtcttcggcgaaggtgaatggaacgtcaggcagcatggggccgacaggcgcagagtgtggcgcaagcttcatctggccgcagacagtgcgacgcatgagattatctgtgctgatttatcgctcagcagcacaacggatgcgcaggccctgccgggtctgataaaccagacccaccggaaaatcagggtagccccggctgacggtgcttatgacacccgctattgttatgatgcgttacagaggaaaaaaatcaggccactcatcccgccgcgaagcggtgcgcaatactggtgcgggaaataccctgagcgtaaccacgcggtggcgaatcagcatctgagcggcagcaatgatgtctggaaaaagaaagtgggctatcaccgtcgttccgtggcggaaacggcgatgtttcgcatcaaaagcttactgggcgaccatctgagcctgcgggactatgaggcgcaggtgggtgaagcgatagcgatggtcaaagcgctgaacagaatgacattgttgggtatgccggacagcacccggatcgcattacgggtgtaccagcaggagccatcctgtcggctaactctgatttattcaacaaagccctttgaaatcctcatttacaggtgcaataataaaaaatatcctccttgcaggagggatggccgaaagagctgtttacaccgcacaagctttataaagaagacttccctgaaatatataatgagctaa

SEQ ID NO: 383992 - DNA, 648 bp, Salmonella enterica
gtggaatcgctggcgctggcgatttttaaggccaacggtgtggatttacacaccgccacctactacacgctggcgcgtacccgcactcagggactaacaggattctgcgaaggtgcagaactgctggcggtgatgataagccacgactgggataagctctggccgcaaagcagccctgcacgaactgaaatgctggactggttcaacactcgtacagggaatatcctgcgccagcaaatatcttttgtggaagcggacctgccattgttgtaccgcactgagcgggctttgcagcttatctgcgacaagctccagcaggtggaattgaagcgtcagccgcgtgtggaaaacctgctttattttgtccagaacacacgtaaacgactcgaaccgcagccgaaaagtagcgttgagcacactccacagaccacggtcagaacgctgatttacaccccggaaaacgcggcatcatccgcagttgaaacaatagtaccgcccctgtctgaattgccggagatgaaggtggaggtgcgtcgcctggctgacagtctcccgacagccagtgtggcaaaacagggtagcaccgtgaaaagctttatcacgggtatggcctgctctgcggcttttgccgctgtactctggtggtag

SEQ ID NO: 383993 - DNA, 360 bp, Salmonella enterica
atgcttgagcgtgatgcgccgtatgggaagcacttcttcccgactgccggtgccgtggttgtaccgttaaaaggacgtgtcgataaggaagaatatgagtggtgcccatatgccagcaagaataagcatctaacgaaagatgctcggcgagcagagggtagtgaacttgcgctattgataaaacaaaccttaattgagcaatttgaccgggttatttatctgttagaaaagggcatcgggatgaaaatttcggaggccctggcgaaacagatgctggaggagtaccgcgtggctgaaggctggcgctacaggagagcaacccggcagaatattccctgggtatttgcatacatgatgtag

SEQ ID NO: 383994 - DNA, 1002 bp, Salmonella enterica
atgaatggaaaaattttgtgtggattattgttttcgctattaattggtggatgtggtgatagtaatacccctacagagaaagttttgaaagaacaatttagtaatcagtttcatggacgtcttatccttgattcaatagatattaaggaaacatcagttgatgggaataaaagaacatacgctgctaatggttcactttcaactggcgatgattggtatacgccagttgcttcgctaactgattatgttgttgttaaaaaatcatgggataaaagcaaagatattaaattctcagcgaccttgaatagtcttggtagtaaggataccgggtggcaaacaagattttcttcattgcaaatgtcagaaacgccaaaaggaaaaccaattcctaatattgaaactgacagtaaatatatcatcatggacggagcaggttttgatgataaaataaacacaattaaagacgaatatgctaagaagaaatcaaagctaaatgaattaaataatgatattgtaaaagttgaaaacaatatattagctattaataaagaaattgatgagtattgggggaaaggggaagatggaaaaacacagagccgttattctgttcaacgtaatttaaataaagaactggaggtttttaataaagaaaatgctccttactatttcgagaggagatataatgctgaagtttttgacccagcaatgaaggctcgcaaggaaaagttaaagaactacaggttgagtgattttgatgatataagggcggaaaaacgaactgcattagaaaaacataaagaagaatattcaattgaatataataaaattgatgagaagataaaagcgaaaatgaaggcgcttgatgatggcttacaagaactgatagcaaagaaacgtggtttcatacagcagcaatctacaatatcagatgagattcgtaatcttgattaccaatataaaagttggttgaactttatggaagaacttaaaaaaataaaatag

SEQ ID NO: 383995 - DNA, 483 bp, Salmonella enterica
atggatattattaaatgcattggcttcttgggatattcttcagtttttcctgaattagatgactttttactgagtaatgggataaaaaaacgtcctcagggtgttggtggtgctgatcacttaaaaacaccatcaaaagatgttgttctttcattcgaagagcgggatgtattcgaacatgactctttattgccggcaaaatctgatggaaagtatattttttcgtatctggaagttcattcagagaatgaggggagtctaccctatggacttactttcaaagatagccttgatgatttagagaaaaaactgggaaaaaacattaaagataataaagttgcgctgcctgaaaaaaggactataactttttttcatgattcattattaataattgtctttatgaatgttaaagatgaaatatttatcattaaatttatgacaccaacaatatataatgaaaaaaatcttggtgtcaagatataa

SEQ ID NO: 383996 - DNA, 1065 bp, Salmonella enterica
atgattaatactgatgattctataaaacatataggaagagggtataaggatctactcttggttgaattccttgataggttacatatatatgatcttccctttactccggaagaggatgaagctttttctgattaccctgcggttgcgtatgctaactcaagagattcgaggatcgtggaaattgagcggtacagcatgcatatgatttacgaagatcgtgaaaaatatgccctgttatataatgagaatgtagaagattcttttgttctgaaagaacttgttttttatagtgatggtattcaggattttatggggtttaaaggtaaacttccctttggtatatcaatggaagggcaccggacagaacttcattcgaataagaacatgaggtttattgcaagtagaaaaatttatgatgtcgattatgatatattttatgctgatggttttattttaaatattggatcagttgactccgaatatatcaacatagttcgcgtgagaaaaccacacatatatgatattgatatgctcggccttgtcaataataaaaaattcataccagaatatgttgattatcctgatatacgccagcttgtatctttatttggtcgaagtatctattgtgaagaacttaagctattgttaccttcctttaatataaatgaggttgactctcatggatgtgatttctctgaaacattagatctaatttatgaatatggattgaaattacattttgattgttgcaatcataaatcaaaaaacgatggtgtctatgatcccggtgttgttctgtcaggtattcaggttgtaaggcgaggtgaacaacattcaaaaggctattggggtaataatttttatgggattacgttttcagcgacacctgaaactatagttcattacgttaaacgttcgcctgatatagtcgatacaacatcaacaacagttgttttaatatgggaagaaaattcatttatattacatgtggtatttgatgtttttgattatcaggtaaaacaaatatcttatttcggtaattttattagagataaaattatatag

SEQ ID NO: 383997 - DNA, 519 bp, Salmonella enterica
atggaacttaaaaaattgatgggacatgtttctattatccccgattacagacaagcctggaaagtagaacataaattgtcagatattctactattgattatttgtgccgttatttctggtgcagaaggttgggaatatatagaagattttggtgaaacacatctcgattttttgaaacaacatggtgattttgaaaatggtattcctgttcacgataccattgccagagttgtatcctgtatcagtcctgcaaaatttcacgagtgctttattaactggatgcgtcactgccattcttcagatgataaagacatcattgcaattgatggaaaaacgttccggcactcttatgataagagtcgccgcaagggagcgattcatgtcattaatgcgttatcaacaatgcacaggtcctcgggcagatcaagacggatgagaaatctaatgagattacagctattcctgagcttcctaacattttggatattaaaggaaaaatcatcacaactgatgcgatag

SEQ ID NO: 383998 - DNA, 456 bp, Salmonella enterica
atggaaaaagtaaattatatttcattattattaattcatgaaatagatgattctggatttaataactctgaatctgaggtatatatacgaggagaaagaacaggtattattgttccggcacagactctggaagccgcaattctgctaaatgacggccgttatttattattcatgacagatgatataccatatgatgaagctcttgaagtgttcttaataaaaattggtgacggtattcaagagcaagttactctatcgacatcatatggttccggaacgtttcgtggtatgacactacatgaaacatatgtagagttttgttattttagcgatgaaacatggagagtggaagtttcagaatcacgcctcttaagattaccttttgagtgtggatttttagtgaccagacatccatttcgtcttcgctatttcattcatatttcattgtctagatag

SEQ ID NO: 383999 - DNA, 300 bp, Salmonella enterica
gtgaacattcaaagtcttcttgaacatatttcaatcattcctgatctacgtcagcaaggtaaaatcaaacataaattaacggatattttgtttcttaccatatgcgctattattgcagacgctgatgagtggcaggaaattgagggtttcggccgtgaacggcttgaatggttaaagaaatatgctgattttgaaaatggtatccctgttcatgacacgattgcacgtgtggtgagtaatatagacagcacagcctttgaaaaaatgttcatagactggatgagagcaggtctgagctaa

SEQ ID NO: 384000 - DNA, 474 bp, Salmonella enterica
gtgtcatgggtaataactaaaaaatccatttatattgcgacggccgtcatattattttcttctgttgttatatacttatggtcaggtaggccagtagagatcgtggacatccattacgatcctggtgaacaacttaacattctcgccacacacttccctattacagacagagggaaactgaattggtggagagaaaatgaaagaaaaatcttagaaaaatataatctccctgaaaatgatttttctgtatacatatggaattttggtgatggttatcaaaaattatcaccctatgatgccgaggatgaattttattgtttccctgatataaaaacagaatcaaaatgtataaaaaaagatatatatatgtccgttgactcaggtggtaattattataggatgtttttattttctggatctggctatttttatcagcccaaaaaagataatgatatgcttaccagaccaaattaa

SEQ ID NO: 384001 - DNA, 828 bp, Salmonella enterica
atgaaagttccattattaaagtttcccactatgatatttaaaaccaaaaatcttatggatgatgaatcggctgaggatatgaaatatggtgatttaacagaacagcaattgcgcaacgattatcatctggagcaggtatcagataccattgatccgtggcggaatcaattttttataccaggagtaacacaatttcctcaacctctttctgatactgaagtcgtcagtaatttgttcagcgatttcagactggagagtactaaacttacattcatggggtatcgcagtgtattccttgcaatggttgatcatctacagaacagaacttcgggagtctttacaagtaaagatctggatctggctgctaaagaacaaattgagaatgataaatcagtaaacagtacctatatgtcgataaagagtgttctggacaaaaatattgattttgatgccggaggatatcctgaatcccataggtcaaaattgacaagcggtattaaaaataaagtgttgcctaagtttgaccggaaccaggataaaataaacgggctgggattatctgtccacgatatgtatgctacccacattacattaacatcgctgaaggtggttaagaatacctacgaagcaaccatacattacaggatgcaggatcactttggtcttgacagtaatgatatcactcattggctttatagccattgggatgtctttaaaatttggtttgtacttcaacattatgagaaagagggctatgcttttaagccatttattacagagataaatgctaccgtaaaaatatcaggtgttagaggatattattcctga

SEQ ID NO: 384002 - DNA, 1029 bp, Salmonella enterica
atgaatgtatgtgtaaactcactttaccgattgagcacacctcaatttgaaagtttatattcagaagggacaagcgatgaagtgcttgcgttgttgattagtgaagcagagaacggaaatcagaattgtattgatctgttatgcaaccttgcgctacgcaatgatggccagggacataccgttgagaaagttctttttgatctatttagcggtaaaaaatcaggaatacaagatatagacaaacaaatcagtcagtcttgccttgtactacatcaaatcgcccataccgatataacaaaaaacaatactgagtggaaaaagctacatgcttcttccagattactttatatggcgggctccgcaacaagcgacttttctaaaaaaatagaaatagcacataaaattgttggcgaccagctcgctcagacagatgaagaacaggtgggagttgaaaatatttggtgttctgcgcgcatgttgacgtcagatgaactagcggctgcaacgtcaggtctggctcaagagtcaccttttctctcggtgaattatcctattgggcttattcatcctattaccaaagaaaatatattaagcgctcaactgcttgaaaaggtttctcaatcaggtttatctgataatgaagtcttcctgataaacacaggaagccactggattctctgtttattttacaaaattgcagaaaaaataaaatgccttatatttaacagccatcaagatttagatgagaatattaagcaagaaattacagaagcagcaaaagttgcaggcctggcagaaagcgaggaagttaattttattgagatttatttacaaaataatgtacccaatggctgtggtctgttttgttataatacaattcaactcttattgaatgtcggacaaaacgatcccgctataatattacgagaatttgctgaaaatttcttaacgctttcaggagaggaacaaacacgatttaacatccaaacccggcgacaagtacatgaacatagtctctcatcattgtga

SEQ ID NO: 384003 - DNA, 699 bp, Salmonella enterica
gtgaaagaaatccaaaatgatgttctcaggcaacaattgatcggctgttctggctatacaaaatgtttttctgatgatgttgtgcaggatacccgattatttcatattgaagccggtgactacattgtccgggaaggaagccagccagcatacctgttttatctggttcgcgggcgcgccagactgtacgcgacattgcccaacggacgcgtatcgctgattgacttttttggcgcaccctgttttatcggtgaaattgaattaattgatgtcgatcacggaccacgcgccgttcaggcgattgaagcgtgttggtgtctcgcgctgcccatgaaacaatatcgttcccgcttgttaaacgatgccatattcctgcgacagctttgcctcgcattaagccgtaaaaattatcggaatatcgtttcattaacccaaaacatatcattcccattaactaatcgcctggcagcgtttattttattaatgcaacatggtgatctgtatcatgaaaagcacacacagacagcagaatatatgggagtgacctatcgacatttattatatgtgttggcgcaatttacgcgagaaggattactgttaaaacagaagaatggttatatcatcaaagataaaccacgactcactgcgctggcgcttgagatgacgccggaaaacaatattatagatttattccattaa

SEQ ID NO: 384004 - DNA, 807 bp, Salmonella enterica
atgacgctaaaaggcattagccgaaaaaagattactgccgttttagtaataatgatggcgtgcgcctttgttgccgtttatccacagcagacgtttaattttgtttattcaaccgccattcgcattaatgactacgttcatttttccggccacccgtgggtgaaatcgttcggtatcaggattccctcgcgctatgtcgtacacggtattgatgtctcgcgctggcagcagcggattgactggcagcgagttgccgggatgcgagatggcggcatccagctaaggtttgcttttattaaggcgacagaaagtgaaaaccgggtcgatccttatttctcctataactggcggcaaagcaaaaaaaatggcctgctgcgcggcgcatatcactatttttcacccacggtatcggcacagaagcaggcgcggttgtatctgcaaacggttgatttggccaaaggcgaccttcccgccgtactggatgtagaggagcggggaaatttatcgccgcaggagctgcgaaaaagagtggctcagtggttacacgtggtagaaaaacatacggggaaaagacccattatctacacgggcgctgcgttttatcgcagtaatctggcaggttattttcctcaatacccctactggattgcgcactattatcaggctcgccccgatagcggcgcgctggtctggcatttctggcagcattcggatcgcggccgggtagacggtattaacggtttggtggattttaatgtcttcaacggttcgattcagcaactacaggcgttggctaacgtaccgtag

SEQ ID NO: 384005 - DNA, 336 bp, Salmonella enterica
atgaatgtcacttcaggcgtgaatgagcaaacgccattgctccctccttctgaacggtgtaatgacgaaaaaccggtagctgaaatcgcagagtttaacgcttatggcaataaacccagatgtttaatatacctgggaacctcggcattgtttacaggtgttttcagtgggggatgctcaatggctgtcgccagtgccagtagcggcgctacctatactaccgccctgacggttttaggcgcatcgtttggtatgggagcgattggtctaatgggaatatgcgccggactataccttagcgcaaatggcgtcagaacccggccagcctggccataa

SEQ ID NO: 384006 - DNA, 1143 bp, Salmonella enterica
gtggaaaatatcatatttttaacattagatcttgtttacccagacgatacaggcggccgtaaattatcattaggcagaatattgtatgagcaagaaaaaggaaataatgtaactgtaatccattataattataaaaaacagaatgaagagaatgctcgccgtttttttaaagaaaataatatatgcttttattcatttagtccgaagcataaccttcatgggtttactagacttttttgttacatgaagtcatgcataaataagatgcctgaaccctattatatgatgtataaagatgatgattttcatcattttttaggagcgaaaattgaagaaatagcaccagcgctaatatctatagagtcgatttttttaggcgggatagagaatataataaagtcaaagagaataaaaataaattatacatttcataatgtagagtctgacttttatttgagcttgtttgtttctgaggtgaataagataaaaaaagtacattattatattcagtctttattgttaaaaaatattgaacgaagaatattaaataacatgggtgttgatgttacatatacattcttatcaaaagaggatatgaatgtgtatatgaaaaaatataacatcagccgtaaaaatattataattaatcataataatattaaaacatctgaaaaagttagcaggcaagtgaatttttctgagccatttttcctttttccaggaagtctggatttccctgcaaacagttttgcaataaaaaaaatgttcgaaacgccaaacttaaattgggatttattgccaagaattataataacaggaactgcttccgacaatacacgaaaaaaattcctaggtttaaaaaatattcatttggttggtagagtttctgaagacgaattatataaattatattcaacatgtattgcgtgcatttcgccaattgtgacaggcgcgggcatcaagataaaaaatctagaggctataaaattaggcattcctctaatagcaacaaagttttcctgtgtaggtataaatgtccataatgaaaacattatcctcacagaaaataactttaactgtttttataaagcaatggttaaatattataatgaggtttttcaagttaattgtaacttaaaataa

SEQ ID NO: 384007 - DNA, 1368 bp, Salmonella enterica
atgacaaaattaacctgtttcaaggcctacgacattcgcggcaggctgggcgaagagctcaatgaagatatcgcgtggcggattggccgcgcttacggcgactatttaaaaccgaaaaccatcgtgctgggcggcgacgtgcggctgaccagcgaatccctgaagctggcgctggcgaaagggctacaggatgcgggcgtcgacgtactggatatcggcatgtccggcaccgaagagatttacttcgccaccttccacctcggcgtggacggcggcatcgaagtgaccgccagccataacccgatggactacaacggcatgaagctggtgcgcgagggcgcccgcccgataagcggcgacaccggtctgcgcgacgtccagcgtctggcggaggccaacgacttcccgccggtgaacgaggccgcgcgcggcagctacagacaaatcagcctgcgcgacgcctacatcgaccacctgctcggctatatcagcgtcagcaatctcaccccgctgaagctggtggtgaattccggcaatggggcggcggggccggtcattgacgccatcgaagcgcgtctgaaggcgctgggcgcgccggtggagttcatcaaaatccacaacaccccggacggcaccttcccgaacggcattcccaatccgctgctgccggagtgccgcgacgacacccgcaaggccgttattgaacacggggcggacatgggcatcgcctttgacggcgacttcgaccgctgcttcctgttcgatgagaaagggcagtttatcgaggggtactacatcgtcggcctgctggcggaagcgtttctggaaaaacacccgggggcgaagattattcacgatccgcgcctgacctggaacaccgaggcggtggtgacggcggcgggcgggacgccggtgatgtcaaaaaccgggcacgcctttatcaaggagcggatgcgtcttgaggatgcggtgtacggcggcgagatgagcgcgcatcactattttcgtgattttgcctactgcgacagcgggatgatcccgtggctgctggtggcggagctggtgtgcctgaagggacagtcgctgggcgggctggtggcggaccggatggcggcgttcccggcgagcggggaaatcaacagcaggctggcggagccggcggcggccattgcccgggtggaacagcattttgcggatgaggcgctggcggtggaccgtactgacggcatcagcatgtcgttcgctgactggcgcttcaacctgcgctcgtcgaacaccgaaccggtggtgcgcctgaatgtggaatcacgcggcgatattccgctgatggagtctatgacttatcatattaagtctctattacaatga

SEQ ID NO: 384008 - DNA, 1287 bp, Salmonella enterica
atgaattcaattataaatttgcataagaaaaatatgttaaatagatacttgcaacaatcaagttcattttttgcaaggataggtgtttcactaatatcaatggtcttaagcgtcataattgttcgagtatatgacaaaagtactgtaagtgcctttttcctttttgttagctacacaacatttttgacacaagtatttttgttaggtatgagcccattcctaaatatcttagcggctaagaaaattcgaccttcaagtatttataaagaaattattaaaaagttatatatatctatacctataacgatcgttgtattgtgggggttgaatgaaacctttgagattgaaggcgtatgtctattgtttttagctactgttattagtggattaagctgtgtgctaacagagttaatgaaaggaaatggtctatacatagcatctcagttatataatggtggtgtaaatacattattatttataattttacttgcatctaataaattacttggccatgatacaagtgtcttaatattatatttgatatcattattgatttcattagtgatgaattattatcagtggcagtcaagttataataaagtatatgtgattgatatttctcaggaagataaaattatatttaataaaattcttccaatctatttatcaactgttgtcatatatctattctcccaagttgatctgtgggttgtctctaagaattttgattcttccatagtcgctcaatatggtctagcaataaggttagcagcactattgagcttctcaacattatctgtgcgcgcaatagctgctagtcgtatacctttattaattcacgataaaaagttattacaaaaagaaatttattatagctgtaacttttcatttgtggtaagtctcttgacgctgctatcgttgctcgttttaggctattggttgataggtatgatttttggtgcagattatcagtattcgtggtttatattgatgatttttgcggtagggcaaattgtcaacgctgctacaggaccttgcgattttctgttaagccacacaggacacggtatatcgcttatgtggataacttttatttcattcatattgttgatagcttcatttacgggaatccaatttttagaaaataaaaatgtttttttatattgtagcgtcgtgtcctttattattgctgtgcagaatttaagtgtggtatatatggcgtttaaaaaaacaggtattctggcgctaccatatttcaaaagagaatatttacgtgtcgaaaagtaa

SEQ ID NO: 384009 - DNA, 1221 bp, Salmonella enterica
gtgtcgaaaagtaatagaactttaatcatttcctttttgctgttgtatatcatatctgcgttaatatcaatgtttcagaccttaacgcaaaataactatccgggagaattagaagaattcacaagatctatatctactgttgaagttattctattgagcatgttaaacattatctcgttcatagtttgctacttcgtgtttctcgtgctttcaagctttagacttaaatttaataaaaatatcagtgtgatttttaataagagaagaatcaataagatatttttgtttttattaatagcgcaaatattttttttagtaacaacgggagtaggaaaagtaactactaatgctaacgaaattacaacttcgatttacagtcctttattttcttttctaaaaccagagccttttatatatttattttttctatattttcgaatgaataaaaatttctcttacaaaggcgatattctatttacaacaaatatactattgtttgttttttttaaaatacttcaggggtggacaagcttccttcttatactattttttttagaaatgtacgctcgatatcggctaaaaaataaaaaaatcattttattattacccctgtttattattttttttggtggctgggtatatcagtatgcctttgtattaaaaaacgaaattcgtgggaatgatgttgctcctttgagttattaccaaggagttgagcagctaacatccaggctatcaatgaatcctgtttctttaggtgcatatgaaaattacgatgtggttgtgcatctatatcaaaaagaaaatagagtttttaaagaatctgaatctttattgagaccaatactacctggaggttttataaataaagattttagaatacttaataataatgtcatggcatcattctatccggatttaaacccatatacgagttctgattttggtattgttatgtattacagtatattgtttaattccagtctgcctgactttatacttttaatcatacttactatgatgttgtttttgatagcaaaagtatattttgattctatgtcgtcttatgatggacaatatgatatcttacttttttttattgttttttattcattttatacagtaagtatagaaaacgtatttggacaaggattctttccatacatatttagtactatatttttttacgcaactggtgggatcaaatttaaccgaaggtag

SEQ ID NO: 384010 - DNA, 912 bp, Salmonella enterica
atgataaaaacggatctcaatgattttgcgtggtttgtgcatgtggtcgaagagggtgggtttgctgcggcgggacgggcgcttgatgaacccaaatcaaaactgagtcggcgtattgcgcaactggaggaacggctgggtgtgcgattgattcagcggaccacgcggcaatttaacgttaccgaagtggggcaaacattctatgagcactgtaaagcgatgctggtggaagctcaggcggcgcaggatgccattgccgcgttgcaggtagaacctcgcggtatcgtgaagctgacctgcccggtgacgctgttgcatgtacacatcggcccaatgctggcgaagtttatggcgcgctatcctgatgtttcgctacaacttgaagcgaccaatcgtcgggtagacgtcgtaggggaaggggtggatgtggcgattcgcgtcaggccgcgtccgtttgaagatagcgacctggtaatgcgcgtcctggccgacagagggcatcgtctgtttgccagcccggatctcatcgcacggatgggaagtccctccgcgccggcggagttgagccattggccagggttaagtcttgcatcaggtaagcatatccaccgctgggaactttatggcccgcagggcgcgcgtgcggaagtccatttcaccccgcgtatgattactaccgacatgttggcgctacgcgaggcggcgatagcgggcgtgggacttgtgcagttacctgtcttaatggtgaaagaacaactggccgccggtgaactggtcgcggtgctggaagagtgggagccccggcgggaggtcattcatgctgtgttcccatcccggcgagggttattaccttccgttcgcgcgttggtcgattttttgacggaagagtatgcgcgcatggtggaagagtaa

SEQ ID NO: 384011 - DNA, 1413 bp, Salmonella enterica
atgagcagtgatattaacgttattattaatccctataatcaaaataaattatgtgcgctcgtcagctttcagacgactgaatcagtaaaagtcagctatattgtcagagggaaaaccagcgctgccgattttaactggtcagcctcagattataccgagagtccggaaataagcattgttggactttatgcaaactatctaaatcacatcgatattaccacgtgctcgctttccggtaacaccgatagttttacgctagaaatatcgacccaagggcaagattatggcgatacgcctttaagtctgactatcaatattcttgatcaaacgctggccgataataccttagggcaaggatggtttgtgacaagtgaatggaacgggtatgatattaatggcgatctgcgcattactggactatatccgtggatgtacggtaatctaaaaattattgataattcgctttggtctgcgcttgccagcgaaacctacgatcctgaaaaacacgcctttgcgccgcacctttataattttaatcttatcggtaacgtcacccaaacgcttacggcgccagagggttttggttttcaccacgatatcacgaccgatcataacggtaatctctatgttctgggctcagtgttagataactggtctgacacccaaaaactggagtgcattatctataaatatgctattgcaagtggagaactactctggcaacgcgattactcgaacgagttcattcatgctaccgtacttgataataccgatactaatgatgtacattttaatagtctggagtacatccctcaaaccaatcaactgatggtgaattcacggtcaacctgtaccattattggcttaaatattgagactggcgatccagaatggattattgataatccggaatttccaacattaaatgccgacatcaacttgagcgtaaaaaatcctgataatttcaaatatcctaatggcgaacatgcggtatttatcaccaacaatgacaaatatgctgattatcagggggaaaataaatttgtcatctctatattcaataataattcatgtgcggatgaaaatggcaatgagctggtccgtctcattgagtccgaaccggtagcctatacggcggctgagcttgattcacttccgactatttttgccgttgatctgaatgaaaaaacggttcagcgattagatcagtttgccttccccggacagcgcagcgagcttacatcttctgtctttgaaacgggagagaattactgcgtttattttggcgctgaacagtcatttttcgttttcgatactgacaataccactggggtgtcaatttttgctattgataccggtcttggctatcgcggccgaatctttagctatgatgagctacgttcccttatttaa

SEQ ID NO: 384012 - DNA, 5757 bp, Salmonella enterica
atgaaaaggaaaaaactactttcagcctgcgtcgcgatggcgcttagcggccagacctgggccgccgatgtttcatctgtggataccctggatgaaatgaaaaaatccagccgtatcacttgcccgaccgatctccataaacttagcgcggaacagctaaaacagcttccgccggaatgccgccaggacgacaatcaggacggagggtactggcttgcaggaggggttgcgatagcgggcgtcaccgccacgattctggcctataaccacgataacgattcacaccatcatcataatgataatccgcccgttcccccgactccacccgttccaccggatgatggaggcgatgtcaccccaccggatgatggaggcgatgtcaccccaccggatgacggtggtgatgtcaccccaccggacgatggcggcgatgtcaccccaccagatgatggcggcgatgagaccccgacgtataaacatattgaatataataacaacgtcatctgggatgaaaaatcatccacactgaagatccgcgacaccactttcacctacagcaaaaacgatgacggcacttacacgctgaccggagcggatggccggacattcctgctggagagctggtatatcgatgaagacagcaacaccatcttgctggatggttccagcccccacagcgacaatacctggatgtacgataacagcggcacgctgtatctcatgaaggaaaacggtatcactgttgacgatccgtccaaaacgatgtccatcaccggacatgatatggtcatcattgacagcggcggcaataccgcgctcaacggtgcaacggttatggcgattaccggagacaatatcaccatcatcaatgagggcgataccaccgccaacggcgagggctccattgtcggtaaaataacgggcgaccatattaccattaccaatgacggcgatatctttgctgatggtggaacggcggcgaaaatcaccggtgattatgccgtaataagcaatatcggcaactcgacaattactaacggtggcgcagggacgcgaatcaatggtgacaacgccggtgttaacaccactggcaatatgaacattgatggcgcaggttccgtagggataaaaattaccggtaacgacgctgccgtaaatatagaaagtgagatttttaacgtaaccaacggcgcaaccggtatcgaccttaccggcgatgacgcccttgtggtaaacaagggcgacattactgccgatggcgcaggttcaaccagcgtgcgggttaacggcgataatgccagtatagagcaggatggcgctctgacaatcagcggcggcgcgcacggtatcgacgtgaagggcgatggtgcgaagattcgcaacactggggaaatctccgtcagtgacgctggctccgttgggatggtggttaagggcgataatgctgacattgagcaaaaaggcgacctgctggtcacccacggcgctcacggtattgaaattgacggtaacgataccgccttcaataacgagggcaatatcaccgtgcgcgatgccggttccactggcgtgctgattagcggcgatgatggcaaatttaccaacacgggcgatattaacgtttcgcaggatggcacagggatatggcttaatggcgataacactgacgttgtgctggatggcaacgttaacgtgtcgctcaccgagggtgatactgcgtattttcacgccatcggggttaacgttactggcgataactcccacgttcaactgaacggcgcgatgaatgtcacctttgatactgcttcgacaggcgtcggcgttaatggcactccgaccgggttgagcgtatccggcgaggacaatactgttgatatcaatggcgcgctgggactgacgactcaactggagccccagtcgctgcgtggctcggagcttgccattcacggcgttaatgtcactggcgacggcaacgtcgtgaatatcaatcagggcctgaatattgattataccgtcgccaataacgctgctttcactaatgttgttggtgtcgatgttacgggcaataacacggtaaatatcggtggtagttccgttatcgatatcgtggggttctctggcgtggtacagcttgccaccgtttctgacggcggacacattgttttagatgatgatgcaacgctggacattacctatgtggacgggggatcgaattattatggcaacgggtcgataatagatgcgagcggcagtggctccaccattgaaaataaggcgacgatcaacgctacggataacgtcaatgtgataggtgtcagcaatggcgcgtccctcactaacaccggtaagattaatattcaccctgcggaatcaataaataatacgcaaaccgccgcgatcagatccgttgatgatggctctacggccaccaattctgcgggtggcgttattaatattacttcgaccactaagccgatctacgcagacgggatatatgccttcccgatagtatggttcaacaatacctattacgccatggtggcaatgaatgacggtacggtgattaacgctgaaggagggaccatcaaccttcagggggctggtctgtatggcatgggatcatccaggggcagtatgaccaacgcgggcacgattaatgttgacagttttattccggtactggatgaaaaaggcgcggtaatcgacagtaattactggggagcatcgaacatttttctgctgtcaggtgggatgattgccggctctaccgacaccaacaacaacaaagccaccgcactgaataccggcaccattaatgtcaacaacgaaggtttcgggatgctggcgatgagcggcggtacggtcaccaaccagggtactatcaacctgacggctgacgctggcgaaacggagcaaaatgttaaccagttatttgccatgggcgcgattaaaggcggtatggccattaacgatcagagcggtgtcattaacatcaacactgatattggtcaggcgttttataacgacggtacggggaccatcgttaactacggcaccatttgtacgctgggtgtctgccagagcagtgaagagtacaacccaggagatacggatgtgtcgctcacttactctggcacggatgtcatcgccacaagcgggcaacaagtgacgctggatcggggttatcgggtggtcggcaacggcagcatggtgagcaatgcaggtaaagtgagtggcggtaaactaaccatcgagaaaaacgctacgttgaccaatgacagtaccggcatcatcaacaccgcgattaccgttgatacagatggcacactggtcaataacggcaccctgaataccgtggaactggcaggcggcacctttaataacaacggtacccttaacgataaagtgactatcggtaactcatcccgcgatgcggtgttgaataacaccggttcgctgtccacgctgcaactgaacagcggcaccgttaacaacagcggcaccgccacggcgcgtatcaatatgcagggcgatgcggtgtttaataacctggcgggcggcgaagtgaaaaaaggcgcgattatgtacaacagcgccgtggtgaacaacgccggcacctggaaactgggctacgaaaacgaaggcactaacatagggaagctcgaaattgacgatcagtcggtgtttaacaacagcggtgagctgatccttgataacagtaaaaacgccatccatatgctgggtaacaacgctgacgccacgctgtacaacacaggcaccatgaccctgacggcttcctccggcaacggtgcggtgaactttgatgacggtgccagccagtttatcaataacggcgaagttaactccgctattacggttgcagtcagtaatgccgatgccgatgcgggcaacgccttcttctggaatcaggataacggcgttgttaatttcgataaggataacgcaagcgccatcaatttcacccatagcaactatgtggctgaaaacgacggcaaaatgaacatcagcggcaacaatgcggtggcaatgaacggcggcagcaatgcgcgtctggtgaataacggcgagatcaatctgggcaccgcaggcaccaccgataccggcatgatcgccatgcagcttgacgccagtgcgacgtccgatgcggtaattgaaaacaacggcaccatcaacatctatgccaatgattcctttgcgttcagcgtgctaggtgcggaaggccatgtggtgaacaacggcaccgtagtgattgccgatggcgtcacgggatcgggtttaatcaagcaggaggatgtcgccgtcgagggtgtgaacggtaataacggaaacagcacagaggtgcattacgccgactacacgctgccgaatgggaccatgaccagcagcaatggcacatcttcttccgcctctgcatctggtgagatgaataatctgtccggctacgtcgtgggcaccaacgctgacggtagcgccggtcaactgatggtcaacaacgccagcctcaacggcgtggagatcaacgcaggctttgccgccggtaccgatgccactaccatgacctttaacgacgtggtacagggcgataacctgaccgacgcagatgctatcacttcctctaccgtagtgtggagcgcacagagcagccaggatacaaacggtaacgtagacgtcaccatgaccaaaaacgcctatgttgacgtggcgacggataccgccgtcagtgatgtggcgaaagcgctggatgcgggctacaccaacagcgagttgtacaccagcctgaacgtcggtaccaccgccgaactgaacagcgcgctgaagcaaatcagcggcagccaggcgacgacggtgttccgcgaagcgcgggtgttaagcaaccgcttcagtatgttagcggacgcggcgccgcaggtgagcaacggcctggcgttcaacgtggtggcgaagggcgatccgcgcgccgagctgggtaacgacacccagtacgacatgctggcgctgcgtaagtcactggatctgacggcaagccagagcctgagcctggagtacggcatcgcccgtctggacggcaacggttccgacacggcgggcgacaacggcgtgaccggcggctacagccagttcttcggcctgaagcatcagatgtctttcgacaacggcatgagctggaataacgcgctgcgttatgacgttcacaacctcgacagcagccgttcggtggcctacagcgacgtcaacaaaactgccgataccagcgtgaaacagcagtacctggagttccgcagcgaaggggcgaaaacctttgcgctgggtgaaacggtgaaagtcacgccgtatgcgggcgtcaagctccgtcataccctggaagacggttatcaggagcgtaacgccggcgactttaacctgaatatgaacagcggcagcgaaacggcggtagacagcatcgtcgggctgaaactggactacgcaggtaaaaacggctggagcgccaacgccacgctggaaggcgggccaaacctgagctatgcgaagagccagcgcagcgccacgcttgctggtgcgggcgaccagcgctttaacgttgacgatggtcagcagggcggcggcgtgaacagcctggcgacggtgggcgtgaagtacagcggcaaagacagcgcgctgcatctggacgcctaccagtggaaagaggacggtatcagcgataagggctttatgctgaactttaaaaaacggttctaa

SEQ ID NO: 384013 - DNA, 744 bp, Salmonella enterica
atgacaaaaattgcgcttgttaccggggggagcaaaggtattggatttgccgcagcaaaggcattatatgacattggttatacggttgttgttgcggcacgcaatgaagaaacactgcaacattgtgcacaaggtttatcaccagaacgttttgttccgatggttgccgatgttgccagtgaagctgccgtacaagtattgtttgccgcgatcaaagaacgttttggccgattggatctattgtttaataacgccggaaataacagcccagcaaaaacaattgaagagatctcattcgaggaatggtcacgtgtgttcagcgttaatgtgcactccacgttcctgtgtgccaaagaggcaatcaagatcatgaagtcgcaaagccccatgggaggtcgtattatcaacaacgcctctatttctgcgatgaccccccgcctgtacaccgcaccttataccgcctctaaacatgccgtcaccggtttgactaaagcgatatcactggattgtcgccaattcaatatcgcctgcgggcagataaacataggtaacgctgaaacgacactatccagtcggatgaaaaaaggtgtttatcaggcggacggttcgattaaaacagaagatatgatgaacgttgatgatgtcgctgccgctattaagatgatggctcagttaccggtgactacaaacgtgctggagatcaccattatggcgaactccatgccgtatgtcggtcgcggctag

SEQ ID NO: 384014 - DNA, 480 bp, Salmonella enterica
atgatctatggtgatattgcattaatgacacccagtcaggtaggggcgctacatccgacaattgcgaaagtcatccactatcttagcaagaatgatttaagccttttcccgccaggtgaaaaattctatatccaggatgacaccatttttttcaccgtggttgaacccatgaccaaacctctgagcgattgtcgacctgaagtacatcgcaaatacttggatcttcattttctgattgcaggccaggaacgtatctgcgtcagctttgatgatggaaaaaacgaaattattgaaacccatccaggcgaacgcgatgtaaccttttatgctggcgaccgcataaaagataatgtactcactttaacccctggccagtttgtcattgtttttccggaagaagtacatcgggcttgttatatggtggatcaccccgaaaaaataaagaaaaccgtcgtaaaaatcaatcttagcttactgtaa

SEQ ID NO: 384015 - DNA, 957 bp, Salmonella enterica
atgaatttaaaagagataagcgttgttatcgtcggcaaactaagcgatcggttaatggaaaaagtagagtctacctttaccgcatatcgtctttgggagctcacagatactgacgccttttgggcacaaaaagcgaatgatattcaggcgcttgtaaccagtgggaacccggtgatgggcgcgtcaagggcactaatggaaaaatgcccgaatctgaaaatcatcgccagcaacggggtgggatacgactcaattgatgtcgctgcggcaaatgaattgggcattattgttaccaatacgccaggggtattaaacgattgcgtggccgatatcgggatggcgctgctactcaacgtcgcgcgtcgggtcaatatcgcagaccgttatgttcgcgaaggccgctggccaaccgaagggcgattcccgatggcgacaaaagtgagtggaaaacgctgtggcatagtcggcctgggtaacattggccatgcggttgcccggcgggctgccgcttttgagatggatattcactattacgatcctaaaccatacaacaaacctgaatggacagcgcacaatacgctgatttcattggctgaggcggttgacttcctcgtgctgacacttccgggcggcgctaaaacccgcggcctgatcgacaaggacgttttgcacgcgctgggacaaaatggctatttaatcagtatttctcgtggttctgtggttaatgaaaccgatcttattcatgcgcttgagaataacgtcatcgctggcgctgcccttgacgtttatgccaatgaacccaacgtcccggaagccctgattaaactggataatgtcgttcttacaccacatattgccagcggtacgagtgagacctttaatgcgatggccgatctggtattcgccaatctacacgcctttttcaccggcaaacctgttattacccaggtgaaataa

SEQ ID NO: 384016 - DNA, 1401 bp, Salmonella enterica
atgaatcgctatctaaaagtactcatttgcgcgatagtcgctatcgccatttggtttactcccgtcccagcaggattgacagaattaacctggcatatcctcgctatctttatcaccacggtggtggcatttattctccagccactacccgtcggtgctatcgcattgattgccataagttttattatgcttaccggaatgatgaccacctctgaagccttaaaagggttcagcagcaccacggtatggttaatcgttgccgcttttctctatgctaaaggttttattaaaaccggtcttggtcggcgcatcgcctatctgctgattcgcgggttcggcgggagttcattacgtctgggctatacgctggcgttaagcgatatgatcattgcccccgccacgccgtcaaataccgcgcgtgctggcggaatcttgtttcctattgttcgcggtgtttccagtagttttggctccgaacccgatcaggaaccacgcaagattggcgcttatctgatgcagaccgtctttcattccaactgtctgtcatcctcgatgtttatgaccgccagtgcgccaaacgcactgattgtttcattagccgccagtaccttgtttgttgatatatcctggggaatgtggacgctgagcgcgttagtgcctggcatagtcgcctttatcaccctgcctctggtgatttacaaactctacccgcctgaaattaaaaagacgccacaagcaaaagctctggcacaagcggaactggagaaaatggggcctatttctcgcgatgagcgtatgacaattggtattttcctgctctctctgcttgcctggagtacttcgaaactaaccggccttgatgccaccgccgttgcactgtctggcgtatgtctgatgctgatgacccatgttattaactggcaggatgtacagtcagaaaaaggggcatgggacattctggtctggctgggtgtgatgatctgtatggccgataagctcaaccagttgggattgtttaaatggtttgccgtgacaacctccgcactttttacaggaattccctgggaaattacgcttaccgtattgctggttgtgtactgctattcgcactatttctttgcgggcagtactccacatgttgttgcgatgtatgccgcattcggcggcgtatcggtcgctgcgggggcaccaccgatgatggccgccctttcacttgccttcgtcacaaatctgatgagtggcatctcccactacggtaatggccccgccgtcatctactacggcgcaggttatgtttctcaacgagactggtggcgtttaggtttcatcgtcatgttaattaacatcgtgatttggtttggattgggcgcggtgtggtggaaagttctcggcctgtggtaa

SEQ ID NO: 384017 - DNA, 438 bp, Salmonella enterica
atgctgcgttttatgacggcgttgatgggtgcgttattacttatgcaatctgcgtttgccgatacgggccgaccagaaattggtaaatatgtctttggctatcgtgggcaggaaggggctgttgtgtggatgatgcggattggcccgaaagcggcaaatgaagctcttatccagatatcccatgttgataatgacattgatggtcatatttttctctgtaaagtgaaagcgttacaggaaggtgagaaatcttattccactacaataaaaggtgaatcttttgaattgttgcgtctgaaaggggggaatggaagcttgcacatccctgatgaacaggcaacctggtcagtagcctacagtaatgagctgtctgacagcgatgtggcaaacccggagtatttcctcactgcatatcaaaagcaactggcggataagtaa

SEQ ID NO: 384018 - DNA, 1293 bp, Salmonella enterica
atgaaaacagcaagcatagtgcgggtcacggcactggttattgcggcgttgctctcaggatgtaaagaggataaaccgcagcaggtcatcatcgaatttatgcactcctccgttgaacaagaacgccaggccgtgattcgcgacctgatcgcccgttttcagaaagaaaatcccactatcaccgtaaagcaggttccggtagaagaggacgcctttaataccaaaattattacgcttgcccgttcaggggcgctgccagaagtgattgaagtcagtcatgactatgccagggtaatggataaagagcagcttatcgatcacaaggcggttaagaaattgattgataaacaaggggaagacgccttctatgacggcgtactgcgcattgtgcgtaccgaggatgggacggcttacaccggcgtaccgatcagtgcctggctacaggggatctggtatcgcaaatcagccctggcgaaagcggggatcgtcgaacctaaaaactggacgctgttgctggatgctgcacgcaaactaaccaacacccgcgataaaaaatacggtattgccctaccaacggcagaaagtgtgatgaccgagcaaaccttttctcagtttgcgctctcaaataacgctaacgtgtttaatgctgaaggtaaagtcaccgttaattcgccggaaatgctcgcttcgctgaattactaccgtgaactgtcccggtatacgatgcccggttccaataacgtgatggagattaaagacgcttttatgaacgaaactgcgccaatagcggtttattcgacctacatcctgccagccatcgctcaggaaggttcgctggccgacctcggttttgtggttccgacggaaaaaacgtctgcggtctatggcgtaataacgtcattaacgatcactaatgggcaaaagaaagaagagacggaagccgctgaaaaattcgtatcatttatggaacaggcgcaaaatgccgctgaatgggtgctgatgtctccaggagcaatgttgccagtgaccaaagccgtcgcgcaggatcctgcttacaaagataacccggccattcaatcctttggtgccctgacaacgcaactcatcgcgcagtatccgcatatgcaggtctttggctcagtcggcgagaagaatttttccgggatgggggatattaccggctcagccattctcagtgagatggtcaatcaggtgaccgtcagtaaacaagaaaccgcccccgcgctggaacgcagccagcagcgcgtgacggaactcttgcaacgccattaa

SEQ ID NO: 384019 - DNA, 2109 bp, Salmonella enterica
atggacttaccttcagattattacccacgtgtttacgccggggtgttagggaaattaatcggtgtgtatctgggccgcccttttgagggctggacctggcaaaaaatcatgcaggaactgggaccgattcagtattacgtgcatgaaaaattcaaccgtcccctggtgattaccgatgatgacgtggccggaacgttcacgtttattcgcgcgcttgaggattacgggttaccaccggacctgacgccagagcaaatggggcactgttggctgaattatattattgataaacgcactatcctctggtggggcggcaatggtaattcaacggagcatacggcctggctgaatcttaagaaaggcatccctgccccgttgagcggtgctatcgccaccaacggtaagaccatcgcggaacaaatcggcgcgcaaatttttatcgatagctgggcgctcgttgccccaggccaacctcaactggcggcatcgctggcaaaaaccgccgccagcgtaagccacgatggtgaatccgtttatgccgctatgctatgggcggcgatggagtcccaggcatttgtctgccaggacatcgacaaattgatagccaccggtttatctgttattcctgcagattcacaaattgccaggctggtcgccgatatctgccgctggcggcacgaagataatgactggcagacaacgcgccagaaaatcgaaaaccactacggctatcacaaataccccagcaactgccatgtgatccccaatcatgcgttgatgataatggcgatgctctacgcgccggacgatttccagttggcccagtgcatcgtcaatacctccggatgggacaccgactgtaatgcgggcaatgtcggctgcctgtccggaattatgctgggattacagggcatcgacgctggtccggactggcgcggcccgctggcggacagaatgctgatttcctcagcagacggcggtttttccatcaacaacgcggtgcgtatgactgattatctggtggatttaggccatcagattgccggaatagcgcgtcctgaaccgaaaaaaaacggggcgcaataccacttctccctgccgggaagcgtccaggggttccgctggttgaaggaagagaatgccgctccggttgaagtgaaaaacgaagcctggcagggtcgccatatgctcagtctccattatcatcatcttgcccgaggtcttcaggccagcgtgaccacccaaacgtttaccccgccggagatcgtcgaaatgcgcagctacgatctcatggctacgcctctgatttaccccggacaacgcttacaggcgaggttgattgccccgccggataatatcgcgacgcttaatgtacggctgtgctatcgggtctatgacgataataaccgcctgacgccctgctacggcgacgcgcagccgctggcgccgggtgaagagataacgctctctctggatatccccgactgtaaaggacaacccatcggcgaagttggcgtaacgctgagtaccgacgaccggattgcccgtggccgactccttattgacagtgtgcgctgggatggcgtaccgaggctcaccctgcgtaaacccgccggagagaatgatttctggtggcgatcctgggttaacggcgtggacctcttttcccgccattaccccaccagctttcgaatctcgaaagaatatgatgagggcttaatcattcacggaactcgccagtggaacaactatcgggtgcaaagtgacattacgctgcatctgggtgactacggcggtctggccttccgggtgcaggggatgaggcgctactacgcggcacgcgttatgcgcgacggaaaaatacaaataatacgcgtgcgcgacgcggttactcatgttctggcagaaaccgaactggctgatgtttatgaacgccccatcgctttcgatatcgctgtggcgggaaacaccattttcgccaccgtcgacggaaaaacgttatgtgtggaagacgttgagcgtgaagcttttgccgatggcgggatcgggttactgatttgcgccggagcactgtctactgacgctattcatatctgcgccaatgtttaa

SEQ ID NO: 384020 - DNA, 1002 bp, Salmonella enterica
atggcaaaaagaattacgcagcgtgacgtcgctgcactcgcaggagtatcgcaagccgtggtctcagtggtgttaggtacgggcaatcattcctatccgcaagacacggtggataaggtggaaagcgcagcaaaacaactgggctatgtaccaaaccgttttgcccaggcgctaaaaaccaataaaaccatgtccgtggcctgtattgtcccggatatcgctaaccctttttatgcgtccctggtacgtggcgtgcagttggtgatggacaagcatcactacgatgtgattgtcgccagtaccgatggcctacgggaaagagaactgcactttttgcgctggtcagcgcaggggcgggtcgatgccatcgtcggcactttttttcatgtcggcgtaaaagacttcacaccttacctccaggccggactgcccatcgtccggatcgaagcagaaagtaaaacagccgggcctttgccgttacacagtatgtatatcgacaacaccgccgctgcgcgtcatgcagtggaatacctgctggcgcaggggcgcaaacacatctgtatggtaacaggcgctggcggcccggctgatgcccgcgtcaaaggatatcagcaggcgatggaacaggctggtctgcctccccggctccttatgcaggcagatttcacagagcaaaccggctatcagatcgcaaagtcgcttattgctaatgacccgcgcccggacgccattttcgccgccaacgatttactggctatcggtgtgatgcgggccgccagagaggcaggaatagccatcccccggcagcttgccgtgatgggttttgatgatattccctccgccgagctggtcactcctggcctgaccacggtcgctcacttcccggcgcgaataggacaaaaagccggtgaaattctgatgatgcatacagcaggagaacaagccgcaccgggtagtaccacagaaatgccctggcgcctggtaaaaagggaatccgcctga

SEQ ID NO: 384021 - DNA, 723 bp, Salmonella enterica
atgggagaggctatttctctctggccattgacggggatcgccgtcattgtggtcggatttcttttacgttttaacccggtattggtcgtcattattgccgggatcgtcaccggactggcggcgcatatgccaatcgctaccattctggaaaagctgggtgagggatttctcaacacccgcaacctgccgtttatcctgctgatcccactggcggttattggcttgctggagcgtcacggactcaaagagcgcgcgcaggcgtggattgccaaaatccgcagcgccaccagcggccgtctgcttattgtctatctgtttattcgtgaggcgaccgctgccctggggctgaccagcctggggggacatccgcagatggtgcgtccgctgttggcgccaatggcggaaggggccgccgagaaaaaccacggcgagataccgggggcggttcgttatcgtctgcgcgccatgtctgccgcgaccgataacgtcgggctgtttttcggtgaagatatctttgttgccttcggcgcgatcatattcatgcacaactttatgctggagtctggtgggatccagaccgaaccgctgcatatcgccctgtgggggatcccgacggcaatttgcgctttcctgatccacggcacgcgtctatggcggctggacagctatttgcagcgtgaagtggcgaaagcgaatgccgcagcacaaggagaagcgaaatga

SEQ ID NO: 384022 - DNA, 996 bp, Salmonella enterica
atgaattttcagcaaagctatctctactggctggcaggagcggtattactgattgtggcgctgatgtcctggcgggataaggctaacccgcgtcgcttaaccaccggtctgttttggggcctgtacggcgttctctttctgcttggtgactggacatactcgctgtttgacgataaacgcgcggtgcatattgccgtaggcgtcgcggtggtcatactggccctgatcgccggtttcggcggcgtaaagctgggaagctaccatcaacgaacgcagcaacagcgcgaagagagcgccagtcgtctgggtaatcgcctgtttttcccggcgctggcgatcccggtggtaaccgttatcggcgtgctgatgttcaaccatattccgggtttacaggatgcgctgtttgggccgggtaatcatgccacgctggtgacgctcttttcgatgaccgcaggttcgttgattggtctggcgatggcgataaaaatgacccatgagcgggtgcatcagccgattcaggaagcgcgccgactgctggactccatcggttgggcattcatcctgccgcagatcctggccacgctcggactgttgttcactgcggcgggcgtcggcagcggcatttcatatctgacccaggaatatctggcggtggatagccgttttatcgcggtggctgtgtacaccattggtatggccttgttgacgatggtgatgggcaatgcgtttgccgctttcccgatcgtgactgcgggaatcggtattccgatcctggtcttgcaacacggtggtaacccggcggtgatggcggcgattggtatgttctccggctattgcggaacattgatgacgccaatggcggcgaacttcaatattgtgcctgcggcgctgctggagctaccagacaaaaacgcggtgattaaagcacaggtgccaaccggcatactgctgctgttggtcaacgtattcctgatgtatttcctgatgttcctgtaa

SEQ ID NO: 384023 - DNA, 645 bp, Salmonella enterica
atgaaaacagtactcatcacgggatttgaaccctttggcggcgagtcagttaacccttcctgggaagtggtctcgggtctcgacaatgctatcatcgatggatgccgtgtcgttgcccgccagttgccgtgcgtatttggcgagtctcttgccgtactaaatagtgcgattgacgcattgtcgccatcgctggtgctggcggtggggcaggcgggtggtcgaacggatatcactgtggaacgcgtggcgatcaacgttgacgatgcgcgtattgcggataatcagggtcaacagccgattgatgtaccgattgtggtcgatggccctgcggcatggtttagcacattgccgattaaagcgatggttgtctccatgcgcaacgcaggaataccggcctcggtttcccagacggcgggtaccttcgtgtgtaaccacgtgatgtatggcttgctgcataaactacgcgacgtgccggtggtgaggggcggttttattcatatcccttatttaccacaacaggccgcacagcatcctggcgcgccaagtatggcggctgaaacggtgcgccgggcgctcgaggtcgcgattgccaccgcattgcaggtggagagcgatatcgccataacaggtggcgcaacgcattaa

SEQ ID NO: 384024 - DNA, 792 bp, Salmonella enterica
atgcctgaaggcccggagatccgccgtgcggcggataccctggaagcggcagtcaaaggcaaacccctgacggatgtctggtttgcctttgagcagttaaaaccgtatcaatcccaactgatcgggcaaagtgttacccagcttgaaacgcggggtaaagctttgctgacccatttttctaatggtctgacgctgtacagccacaatcagctttacggcgtgtggcgagtggtcgatactggcaacattccgcaaaccacgcgggtgctgcgcgtcaggctgcagacagaggataaaactattctgctgtatagcgcgtctgacatcgaaatactgacgccagagcagctcaccacccatccattcctgcaacgggttgggccggacgtcctggatatgcgtttaacgcccgcagaggttaaaacgcgtttgctgtcaccccgttttcgcaatcgccagttttccggtctgttgttggatcaggggtttctggcgggattagggaactatctgcgggtagaaattctctggcaggtggggttgaccgggcagcataaagcctcacagcttaacgatgaacagttggatacgttggcgcaggcgttgcttgatattcctcgtctgtcgtataacactcgcggtcaggtcgatgacaataaacaccacggcgcgctgtttcgctttaaggtctttcaccgggacggcgaagcctgcgagcgctgtggtggaaccattgagaaaacgacactttcttcgcgacccttttactggtgtccgggctgccagcattag

SEQ ID NO: 384025 - DNA, 1047 bp, Salmonella enterica
atgcctgttttgcagtggagcttgttgtttctactatcgctccttctttccctgttctttttgttgatacatctaccaggcgcattgttgctcggttcgatgatcgtcggtatcattttcagcatgcgcgggagctccctgcgccctccccgttgcacatttcttgccgcgcaggccattctcggctgcatgattgcgcaacaccttacaggctccattttaacgacacttgcggcacactggtcgatggtgattgtcattctgctggtaacccttatcagcagcgcggtaatcggctggctgctggttcgctacagtaatctgccggggaataccggcgcgtggggttcatcacccggcggggcagccgcgatggttgcgatggcgcaggattatggcgccgacatccggctggtggcgtttatgcagtatttgcgcgtactgatggtggtcggcgctgccgcgctggtaacccgatttgtcatgggcgatcaggcgcaaactgtaaatcagcaaatcgtctggtttccgccactgagcagcaatctgttgagtaccatactgttggccgctgttgccggtatagccgggcgcttactgcgtattccctctggcgtgatgttactgcccatgctggcgggcgcattgctaaatgccgggggcgtaatggtgatcgaactgccggagtggctactggcgatagcctatatggcgattggctggcaaatcggtcttggctttgacaaaaagatctttttaatggcgctgcgacccctgccgcaaatattgttgtccattttttcactgatggcgatttgcgccgcgatggcgtggggaatggcacattatatgcagatcgactttctcaccgcctatctggcgaccagcccaggaggagtggattccgtcgcggtaattgccgcagggagtcacgccgatatggcgctgatcatgacgatgcaaaccctgcggctgttcagtattttattgaccggtccggcggttgcacgttttatttcaacgtatgcgccaagacagcccacctaa

SEQ ID NO: 384026 - DNA, 243 bp, Salmonella enterica
atgctaatagataatgaaaaaacaataagcgattacactgagtcagaattcattgctccgctatctaacttttttgagaataaacatggactaaatgccagatattttggtaaatttatcgatgacctacaactacatgtagtcaaagtcacccagcatccacttggtaatggactgatttttaatgctccagatgagattgaatgttcactcttgggagtatttaaggaaataaaaaagtag

SEQ ID NO: 384027 - DNA, 201 bp, Salmonella enterica
atggcgaataaacagattcggcagatgggaacactactattatattcaattaagaaacgtttcggtaaaaagcatacaaacatatataagagtggggtgagcgaggaaagccaacgcacaggcaacttgaagtatgacagttatataaaccttaccatttctcgcttacatacaggagtacataaaaatgctaatagataa

SEQ ID NO: 384028 - DNA, 297 bp, Salmonella enterica
atgatcctcacaggattgtcattgtttccggatctcacctgggaagtgatggagaattcgaagtatcactttattgagacggtgaaaaagatggttatcgatcgcagcgagcaggaactgattccggtgatcccgagcgaagagacggtcgctatgccaggaatgcagcccggcaagccggtgctggaaaaaatttcgcgcggctttttacaggatggacgcatttttgagtacagccgcaataccttcaaaagtgacgactataaattcactctggtggcaaaacgacgccattaa

SEQ ID NO: 384029 - DNA, 141 bp, Salmonella enterica
atgaacctgacgaccttgtcccgtccccgtgcagtctgtttacaagcgagattcaccgggcgcgacgataccattcgtcagctcgcgcagcgtctggccgagcctggaaaaattaccgatggcggaggcgttcctggctga

SEQ ID NO: 384030 - DNA, 636 bp, Salmonella enterica
atggcggaggcgttcctggctgaagtgttccaccgggaatcgctggggccgacggcgctgcgcgagttcgaagtgattggcgaggagaaaaaaacgttcgccttaacgctgttgcgcggcgtgggcttgttgggcaaagaggatttattactgcgtcctggccgcccttccggtattaaacttccggtccccgattcacaaatgcgcggcgcgttacattgccgtttcagcctgttcagctatagtggaacgccgcttaacgctggggtagctcagcaggcgcgcgcctggcttacccccgttcagtgttataacaaaattccgtgggatgcgatgaagctgaataaggcaggtttcaccgttcccgatagctatagcttgttaagcatgtcgccagttggctgccagcttagcgcgttgaaaaaagctgaggatcgggatgagttaatacttcgactgtttaatccttcggacacattaagttgtgaagcgttggtagcgtttaatcaccctgtggcgcggtgctgcgagaccaggatggacgaatcaatagagacggaaaggcaggaaattgatgcgattaatgggggagtccttcctggacagtcacgcacctttagtctgaaatttgcctga

SEQ ID NO: 384031 - DNA, 891 bp, Salmonella enterica
gtgccgctgaaaatccagaatgactatttacacggttttttctcgatagccgaagtattctcccacgcgaccaggttagccacggtcgtgattgatattcacggtaaagcactttcggagtgtcataattttaattcattctgcacattaatgcgggcagatgagcgctatcgtgcgggttgcgaaaaatgtgataagcagtgtgcctttgatgggttaaaacagcttaagcctataatactcacctgtcatgcagggttaagtttgttctcgatgccaataattgatgaagggcatctttatggttttattgtttgtgggcaggtccggccaaagtatcaggagtataaaactattgttattgataataaagattcatggatggatgacccaaaaataaaagctgaatggagtcaggtttcagtagtggataataatacgctggtggcgtcggctaatttgttacgttttattgttgataattttgagcaagagctacaatccgatcagctatcagcaccgccgacccgttataatcgtcattattacactgaaccttcccgtcatgagaaaaaacttcaggcggcactgcgttacattgatgaaaatttgtatggtgaattatctctggaatccgtcgcggcgcatgtgtgcttaagtgcgaactatttcagtcgattttttaagaagcggcagggcgttaattttaaaacttgggtgaatcagaaaaaaatgcaaaaagcgggggagttattgcacgatcccgtacattcaatagacagtattgcccggaaactgcattacgcacaaaccagctacttttgccgtgtgttcagggcggcccatcaaatgtcgccccaatcttttcgtcatgccagactttcgcagtaa

SEQ ID NO: 384032 - DNA, 789 bp, Salmonella enterica
gtgaaaacgttcggaaaggtctggctcgttggggcaggtcccggtgatatttcattgcttactctcaaagcgatgatgtgcattaaacaggctgatgtcattatttacgatcggctggtcaaccctaaaattttggaatgggcattacctggctgcctgcttatcaatgtcggcaaaagtccaggcttccattgtgttccccaggagaaaattaacgcattgctggttcagtatgcccaaacacatcgcaacattgtgcgcctgaaaggaggcgatccttatgtgtttggtcgtggggctgaagaagttgaggatcttgttgaaacgggcatcccatttgaagttgtgccgggtatcagttctaccatcggcggcctgacctatgccgggattccggtgacgcatcgcgatttcgcctccggctttcacgtggtgacaggccatacgcgggaaggtaaccaacagcaggactggcgtcaactggctaagctaaatggcactctggttatcgtcatgggtatcgccaatctgacatttatttgcgaagagctgttgatgggcggtaaatcagcagatacgcccgctgcgctaattatgtccgccacccgggagaatcagcgccggttaacctgtacgctcggttcattactgagcaaagcgcaggaagctaacattgctccacctgcgctgatcgtcattggcgaggtggtgatcctaagcgatcgcctctcttttatacccgaggccatcaccttgccagaagaccattactgcgaaagtctggcatga

SEQ ID NO: 384033 - DNA, 1002 bp, Salmonella enterica
atgaacgtaaaatttctcggcgcctgtatcttaaccagcagcgtattgtttagtggcgcttccctggcacagggcgcgccggactacgccagtattattaaacaggcacatcaaaaatataacagtaaccacgacggtaacgtcgccgactacatccccgctctggcgacctatagcccgaataatttcgccatcaccctcgccacggtcgatggcaaaatttatcaggtcggtgatgtgaaaaaaacgtttccgatggagtccctgagcaaagttttcaccctggcgctggcgatggaacagcatggtccgcagaaagtgctggataaactcggcgcgaatgccaccggccagcccttcaattctggcttagccgtcgaactcaccaaaggcgcgccggagaatccgctagtcaacgccggggccatgagcgccgttagcctgatcgacgccaaagataaaacggaccgctggaacaaaatcctcaataacctgaacgtctgggcagacgccacgctcaccgttaacgaacccgttttcaaatccgaaatggaaaccaaccagcataaccaggcgctggcgatgctgatgaattcatacaacagcttttatggcgatacacaggaagccgtcgaaatttatacccgtcaatgttcagtggatattaccgttgagcagctcgccaaaatgggggctgtgctcgccaacggcggcaaatcaccgttcaacggcaggcagctactcaacgcaagctatgtgccgcaggtgctggcggaaatggcaatagccggactgtacgacggcagcggcaaatggttgtacaccgtcggtgtcccggcgaaatccggtgtgagcggcggtatggtcgccgtagtgccggggcggtacgccatcgccgtctactcgcctccgctggatgaagccggtaacagcgtccgcgcccagcagactatcgaatatgtcgctaatgcgacacaggccaacctctttttagcgaaatag

SEQ ID NO: 384034 - DNA, 1020 bp, Salmonella enterica
atggggcgcagaagaaaagatctgggcgatgtcaagctccccccacgcgtatcaaaaaccagaacccgttactactacaaacccacgtcgcgggaaactgtgacactggggccaatcactctcactatgtcggcattatggaaacggtacgaggaagaacggcgcaattactcggatgtaatgacgttcgaaaagctctggggaatgtttcttaaaagcgcctactacaccgagcttgcaatacgaacccagcgggattatttgcaacatcagaaaaaattgcttgccgtgtttggtaaagttaaagctgatgtaataaagccagaagatgtgcgtcagtttatggatcgtcgtggactgcaaagtaaaaaccaggccaaccaggagatgagcagcatgtcacgtgtttaccgctgggggtatgaacgcggttacgttaagggaaatccgtgtgccggtgtcagtaaattctctctcaaggctcgcgagcaatacatcactgacgaagactacctggctatttataagcatgctgatcacgttgtcagggctgcaatggaaatttcttacctgtgcgccgccaggcaagctgacgtactcgctctgcgctggatgcaagtttctgataaggggatttttatccagcaaggaaagaccggaaaaaaacagattaaggtctggacacctcgccttcagcaagcgctgaaaacagcacagacagaatgtccaaaactgtcacctgacgcgctggttctctacaacaacgatcgtggtcagttcatccgcaagacgttcaataatcgctggttaaaagctgtacgcgccgcacaaagtgaactgggccgacaactggattacacattccacgatatcaaggcaaaagctatttcagattttgagggtagtagcagggataagcagattttcagcggccacaaaacagaaagccaggtgcttatctacgacaggaaggtacaaatcagcccgacactggatcgtccggttattggggaaaagtga

SEQ ID NO: 384035 - DNA, 225 bp, Salmonella enterica
atgacaagagaaaacgatctgctaacagacgctgaacttattgaatttaccggttatcagaaaccatccaaacaacgggaaatactggaccgtggcggcgtttcttacattcccgatcgggaggggcgccccatggtaacctggactcatatcaacgctgtactgaacggacagatcatcgtgcagcaatctacagaaacaaaacccgatttcggagcaatttaa

SEQ ID NO: 384036 - DNA, 183 bp, Salmonella enterica
atgctgaaactatcacttaaacgcggcgatgccgtccacgtcgtattcgcggacggtagtaacggaattattgaagcacgcagccgctgtgaactgggtatgcacctgccaaaaaacgtaaaggttacgcgcgagaaaggcgcattcctccccgaaaacctgattaagcgtaatcagaaataa

SEQ ID NO: 384037 - DNA, 555 bp, Salmonella enterica
atgactactgcaatcgcgttagctgctgactataccagtctgttgcaattgctggaaagctctgatgagcttactccagaaatgatcgccgatacgctggaatgcattgaaggtgaactcgctgataagctggatgccatcatggtaattgcccgcaataatctcggtcatgccaaaacctgcgatgaagaaataaagcgcctggcggaacgtaaaaagtatttcgaaaataaagataaaacattacgtaaatatattctgtcgtgcctgatggccgctaatttggataagctcaagacgtctaaaaataccttttccgccagaaaaggtagcatcagtgttgtcatcgataacgagaagctactgccagacgaactggttactgttcagacgattatcgccccgaacaaaaaagccatcaaagaagcgatcgaagctgcggaagctgccgcagcgcaaatcactgctgacggtggaaaagtacctgccgaactgttaaatccggtaccgggcgcccatcttgagatcggcgaacgctcactacaggtacgctaa

SEQ ID NO: 384038 - DNA, 2274 bp, Salmonella enterica
atgacaatttacaactgtctgttcgagccgaagaaatcggctattaaagatggtgctgttgcgctggcaatcagcatcgaagcaccaaataaaaaagtcgctgaaagtatcgtcattggcaaactctgggaacactatccggcaaacggcgacaactattttaagcccaaaatctgggaagactcggagggtcagcctcgtccggaagttggaaaatttgatgaacaatttgctcagacgaacactttcgacggggaaaaatggatcgccaacaaaccagacaccagcgttccaagtttaccaagcagtaatgaaatcatcgatctgatgaagctaccagcccgggaacggttcgctgccgtcctcatgttcagcaattctcccatagatggcgtgctttattctcaggttctggactatctcgataatctggaaaataacactgaaccctttgatgatgacgatcggattaattcaaatatccttcatgctctgcacaataacgaacccgttcgtcatatgcatattgaagggttaaacaatctgattcaggccatcttcgctaaatttgaagaccagacaccgggcaaggctgctatttctcaatttatcaaacgctggctggagaatccgggtaagcgtgaagaaatggtaccaagtaagacatcttcccttaacaccagcgataatatagagagtcctaaagtggcccctctacgtggttataaacacacttacgcaacactggaccaggagatcgccgtcgccctgctgcctatatctcctgacacaccagtgctttcaggaaatcttcgcgatgcagaaaaaatcattgcagaagaccgggaggattttaaacgctggtcaatggccctgcgtaccactgagaagatcctcaaatatgaccgaccgagtatttttggtgttatacagaacgcgccagccaaagatatttaccatttcccagagtctctgcggcgccatattgattcatggctgactgagcatggtcagttcgaatgtcctgaatccgatgcggagaggagcggtaagctgcttgcggcatatcgtggcgaatatgtcgaaggcatcagtgaccctaacgatccgaaatgggttaaaaccgatacacaaccacaggtatcaaacctcggcaatggaatgttctccgttgataatctgatgtctgaaaccgcctcaaatgaaggtgaaaaaacggaagtggcagaacaggaaactgttacagaagaccaggcggagcaggctcgtgaaacgctaaataatatgggttacggagtatatgcgaccagccaggacacaactgaccaacagaatgaaaatctgagcgataaagtggaaaaaattgttcaggatgcggatcagctcgtcgatcgcgttaagcgtgaagaacagcttcctcaggcgtcagaactggttaagagcattaatgaaatgcaggctggagaaagcgacaacctggaattgtggaaagacgtgttcaaaacagacgagcgttttactactgcgttctctgtgaacggaggcggaacctcaatcaatggtacctacatgaccatgatcgctacacgcgaatttggtccaaaaggtatcggctggggtgtcgatattctggaagagcgctttgacaatggcgcgccaattactcgcacagtcaaaggcactgacggtaacaacacgtgggaactcatccccgacggtgtcggcggcatcctgacagaaaaacatcacattatcaaaatcagactttggtacatccgcaacggtgtacgcggtgaggagatttctttcgggtgtaccccatatatctacagcagcaaacatggccttatttgtgatggtgaagcgacaaaaaaatcactgactgacgcaaccaaaaaagcgctgtctgcgcttggtttctgcgctgatattttcatgggcctgtacgacaaccaggagtatcgccagaaaaataaagctgaattcgcgctcaaaaacgccagcgaaaacgcggaagatgcagcccgcgttcgtcaggaactggacgacaaactgacccgagtcgcaaacacccttgcatcagctgtgtcagagaacgagatcaacaaggtttattcttcgattgcccgcgaagcggaagtgcatcgcaaggatgcagaagcgaaaggtgatacacagcacgcgcgttacttaggtgggcgtctacggcggctgaaaaccattaaagatgaacgtatcgccgaactgaacaaagcacaggagaaggcagaatga

SEQ ID NO: 384039 - DNA, 246 bp, Salmonella enterica
atgcagactgaaattatcatcgacaaggtaatgagtgctggcttgtctgtactcgaacatgagaacaacggcgatttcggaaatggcgttatgcatctaacaattgtcggtggtgttcgccgcgttgaattctatccaacaaccggaactgtgtacgctaacgccgtaaaaggtaagtacccggtttttaagcagaagaaagcaggaatcaaagtagctatccgacttgcaaaatcaggcgcctga

SEQ ID NO: 384040 - DNA, 324 bp, Salmonella enterica
atggaagcgcttgccatcccagtaaagctgtacatccattacaacgccaacactttttctccggataaatacattgtcgctacctgtgacatgtcacgcacctttccagatcaatacgtcctgctggagactcgcgatatatccatcgatgtaaaccagccagaacctttcgacattattgctcttcaggtcgaccagttgcgtggtcagaaagagaagatagcaacgctggcaaaagatcagatagcccaggttgacgacaaaatacagcaactgctgtgtattgatcactctcctgtccaggaaagcgatattccgttctga

SEQ ID NO: 384041 - DNA, 402 bp, Salmonella enterica
atgaagaacattgaactgaatgaccgcatccgtagcagaagaacacagctcgatatgtcgcagcagaaacttgcagatgctgtgaaggtttcacacgtcactatctttaaatgggaaagtggtgaaacgcagccgcgaggcaagaatctattcacattaagtaaggccttgaaatgttctcccacatggttgctttatggtgatgaagaccaaactccattacctccatcagagatcccagcagagttagatgagcgtcaacagaaactgcttgagctcttcgattcccttcctgaatcagagaaagaccgacatttgactgaattggagcaaaaagttgatgacttcaatgctctgttcgaagaactattagctgccagaaaaaaatcacaaaaaaaatag

SEQ ID NO: 384042 - DNA, 204 bp, Salmonella enterica
gtgcttactcaagatgcaataaattactttggcagtaagaccaaattggcaaaagcattgggcgtatctcagcccgcagtttctcgttggggagtacatgtccccgaaaagagagctgcgcgtttggctctgatgaccgcaggtcagcttgtatatgatccgtgcgaataccaggacattacaaaaactgatgatgcagcttaa

SEQ ID NO: 384043 - DNA, 561 bp, Salmonella enterica
atgatccgtgcgaataccaggacattacaaaaactgatgatgcagcttaacaagaggcgtattcgaaatctgattaagcgtaatcagattttcagcgacaggagacgcgacaaagtggaaaacctcgacgaactgaaaagagaaatcttcaagtgggctgcggaacgcgggcaggaacatgttgccatcgagatctcccgtatgtggtttcggatggggggcaatacccgctctgtaaaacttcaccagatggaggattcgaaaggcaatgccgactggcgggccatcaacaataaccggcagcagatttttcgctggttacgtggtgagacgaaagcggcgagaaccaaaactaaagcgctggccaaagctatggaagcggcgctccccgcggaacgatatgcgcagttgggaatgacagctcagcacttaatttgcattgcgatccgcgatttcgccgcagcgattattgctctgttgcttgatgcaagggatcgaccccagcggatagcacaggcattacaagccatacaggaaacacagcgcctgaccagcgtttaa

SEQ ID NO: 384044 - DNA, 225 bp, Salmonella enterica
atgcagacatcaacagaccgcatcacctggcggaacggctggcgtttaaatggcgaaccgtcctgtgcgcatgatgtacggggaatatttgaagaacgcctcgccgcgaaaaaatgggaaatatacgaacagcgtaaagctgagatgatcgagacgtgcgttttcctcacaccgaaagactacgaattagcctgtcgtgaactggctgagttgctggggatctga

SEQ ID NO: 384045 - DNA, 981 bp, Salmonella enterica
atgagcatgaccctaatggcccgggcgatggcaataaaaaccggaaacccaattcgtaaactggtgctgattaaacttgctgataacgccaatgataatggcgaatgctggccatcttatcagcatattgctgatcattgtgaatgcagcaggagtgctgttcgctcgcacattgacgcgcttattggcatgggcgttttaacaaaagaaaaccgcatgggtataaacaatggtaagggcaatacgtcgaatgtgtattacctgaatcttgataaccctatgccaccaaaaagcacagcccctgtgccgtcaaaaatcacaggtatgccgttagaaaacacaccccctatgccatgtggtggcaccagaaccagtcactcttttgaaccagtcaatgaacctaatgatccccctaacccccagaagggggagggcgacgaatggctccttgctgacgctaaaaaagccctggaattctacaacgaacaaaccggaacccgttgccgtgatattaagccgttcgtactaatgctgacgccgacacaaacacgcgaagcatacacactggctgagctgcaattggttattcgttgggtactggctacctggcgccgccgtggttctggtttgccaaaaccggccaatatttgccgcgtaaatcgctttgacggttatctcgcggatgcagaagcatgggctactacggaggctgatgtcgatccggatgctgtcatgaaaggctacaacgagatatttgctgacacattgcctgctgctgaactggatgccgatcgccgggggatgattattcgcctggctgctcacatgaaaaataaaactacgggggcatttcttggctatttcgaaaaattccgcgctgatgcacccgatttttatttcggtgccagtggctggcgcgccagctttgattatctgatgaaacctgaaacgttgcgtaaaacaagggaggaagcactgtga

SEQ ID NO: 384046 - DNA, 1389 bp, Salmonella enterica
gtgagtcctcaggaactggaagcatgtgtactggctggcctgttgaatggcggcgcttcacctgatgcattcgatgtgatcgcctccaccccagaagaatcattcagcataggattttatcgccgtacattcagcgaaataaaaaaacaggcgctgactagtggcatgattgacatgttatttattagcgaagcactgggtggttcgagtctggctaacttgtcggaaatatcccgtatccctgcaacggtgccaaacctcaaaggctacgcgaggaagatggttaaggcatggcgaagtcgtgcgttggcgaagctcctgcaggatggggccgatggcattcgtaacgcagcaaaccaggatcaacgcgatcagatagtcgaaaacgccgtagcacaactgctggatatgactgccgatagtggtgacgttcaaccggtacatatcaacgagctattgcccgcttacatggacacagtacagaaacgtatggatggcgatgagtccacgcgcaatttgctgactggtattgtggatcttgataacgcaacaggtgggattaacccgcaggatcttattgttgtggctggtcgtcctggtatgggtaaaacagaattcgctcttagggttgtggaaggtgtaacgtcaaaaggaggtggagcgctcattttcagcatggagatggctgctgctcagattgtcgagcgttcgctggctggcgctggaaacctgtctgtttcacgtctgcgtaatcctcaggatatgtacgacgaggactgggcacgattgactgccgccattggtgagcttacggaccgggatatctggattgtcgatgcgaccgaccttacagttgaacagattcgcgcgattgcagaaacgcacaaacgacgccatccgcatctggcaatgattatggtcgattatctcggtctgattaaaaaaccgaaagcagagcgtaacgaccttgccgtagcgcacatttctcgcaatctcaaaaccatggctatgcggctacatacaccgacctttgcgctcagccagctttcccgcgcggttgatgcgcgtccggcggcgcaacgtcgccccgtaatgtcagacctgcgtgattctggttccatcgagcaggatgctgacagcattctgtttctgtaccgcgatgacgtttataaccctgaaagcccggcggctggtgtagctgaagtcattctgggcaaatgccggttcgctgctgctggcaccgtaatttaccaggaatttaaaaacggacactttctgccgatcgatcagcacgtcggcaaagagaagacccgcattcaactggaggcagcaaaacccagaaaaccgcaccgcaaatattcagagaagtacaacaccgatgcattttaa

SEQ ID NO: 384047 - DNA, 681 bp, Salmonella enterica
atgaccgatttaatttatccaaaagtagagaccattgatgatgcctgtgactggacgaatgtaatcatctggcggatgaatgccggagccagagcgcgcagccgttcaatgtatgttccgtgtccccgtcctgtcccggtaccgggattaaccgtacgtgtatcttcgacggtgaaaaaggtgaaactgtcagggccagcacctcggcgtcacacgaaaacgcatactggcacagtgatctattccggtggtgagaagacagttaaacttcgcgaaaccgcaacggtctggacttccggcagcaaagaaaattacgacaaaaagacaggctacagggtgggggtaaccagccgctgccgcttgctgctggattcgattaaacctatagcagcatctacagaacctgtcgttcagtccaaatccagcgaattaccagcggtacaactggtagccatcatgaagggaaaaacgctgtcataccaggggattatgtccgccattaaaaaatatcacccggacatcaaaattaccatggaacaacttcagaaacgagtctttgcgctgtgtatgtctaatttcgtcggcattgagcggcatgacgatatgcccgttacacactttacgctgaaaagcgttgatccccgtttttacgttcactcagagaaaaacatgagggcttaa

SEQ ID NO: 384048 - DNA, 249 bp, Salmonella enterica
atggccgggcaatcggactatctcccgcccggcttaccgctcaatcgtgccaaatggccgcaagagtgccaactcaaagagcattatgacatgcgcgccgccgcgctcgttcgccagctctatgagcgcaaagtcactcgccagatggttatacagcacattgacgcgacgccggagagttatcgggagtttttcagacaacgtttgaattattggcgacagcaacacgaagggggatctggtggataa

SEQ ID NO: 384049 - DNA, 285 bp, Salmonella enterica
gtggataaacaactggaagagacgggtgacctcatgactgagttcaccagaaaatatacaaataatgccatcgaaattattgctgattatatccagcgagccagcaaaaatgagcaattgcaggaagccaaaacacgtctcgataaaaaaattattctgttcgttgatgatgaaaactgtgaccagtcacggctaatgagcgtgtttgtgccagcaatgacgagccatacccgggaaagattttttgaagaaattgcagtggcgcttgagggggcgagatcatga

SEQ ID NO: 384050 - DNA, 1134 bp, Salmonella enterica
atgacgtaccagttgcatgtggggcgttgtgaggtggtgcttaagtcaatacctgacaattcagtcgattcgattgttactgatccaccttatgggctctcgttccaaaatcataaatgggattacgacgttccatccgtagagcagtggcaggaatgtttgcgggttttgaagcccggcggtcatcttctggcgtttggtgggtctcgaacctatcaccgcttggttgtaaatgcagaggatgctggtttcgaaattcgtgaccaaattctttggatttacggtagtggtttcccgaagtcacataatctagatggccaatggaacggctgggggactgcacttaaaccagcgcatgaaccaatcttaatggctcgcaagccatttaaatcgacggtcgcagaaaacatggtagcgcttggtaccggcgcactcaatatcaacgcctgccgcattccaaccggagagcaattatctggcggtgctggttgtttgctttctcatcgacgcgacggaacagagccagccgcagagtatgaacaatctgtggggggccgttggccagcgaacattatccatgatggaagcgatgatgtgattgcctgtctccctggtaatgccggtgctgctgcgccggtaacaggtaatgaaccctcagcggcctctacggggcaagttcttggcatgcgtcagcgtgtcgctaccgttcaccacggcgataaagggagtgccgccagattcttttactgtgccaaagtaaaaccgagcgaacgtgatgaggggcttgagcgttttatagcgatatctgccagtgatatgacaggagggcgtaaagagggaagcgcaggtattaatgatccgcgtgctggcgctggtcgtacgaagggcgcgaaaaataatcacccgacagttaaaccaatagctctgatgaaatatctctgcaagctcatcactcagcctggcggaactgtgctggatccgtggatgggtagtggaagcaccggacgcgctgcgattgaagaggggttcaattttgtaggcatcgatcttgatcccgattacgtaactattgcatccgcgaggttggccttctcgttaaaaaaatatgcaaaagaaagagcggaggaactatga

SEQ ID NO: 384051 - DNA, 273 bp, Salmonella enterica
atgaacgctgagctacaggacgctttattgggttacgcatatcgtcgaattgttgagttggaaaacttacttcttcctaatatttctgaaacggtttggccagcggaagtgaaaatggttttttctcaggttaaaaacgccggggatctcccggcacatcaccagcgtcgactgaaacatcacatcaatcgcatgtggctggaacaaatgccgataccggccatcattgcagcggctcagtcactggcaatcgccatggagaaatacgcgtga

SEQ ID NO: 384052 - DNA, 2073 bp, Salmonella enterica
gtgagagaaatcattgttgataattttgctgggggcggtggcgcttcaaccggtattgaaatggcgatcggccgcagcgttgatattgctattaaccacgacgagaacgccgtggcgatgcacacaacgaaccatcctgatacattgcactactgcgagtctgtgtatgaagttagaccaaaggtagctactgcaggccgtccagtggcgcttgcgtggttttctccagattgccgccacttttccaaagctaaaggcgctaaacctgtcgagaaagcgatccgtgggctggcctgggtggtgctgcgttgggggctggatgttgaacctcgagtcatgaagctggaaaacgtagaagagtttaaaacgtggggtccgctactggctggggaaatgcgacctgatccagcccgcgcaggagaaactttcgaagcgtttattgggatgctgacaaccggcatcccggcgagccatccggcgctagcagaatgctgtgagtttctgaatatatcgcttgatagcgatgacgcagctcgactggttaaaggtctgggctatgtcgttgagtatcgcgaactgcgcgcctgcgactacggcgcaccgacaatcagaaaacgtttcttcatggtcatgcgccgcgatgggaagcctattgtgtggcctgagccaacgcatggggatccgaaatcacctgcggttcaggctggcaggctggcgccatggcgtacagctgcggagtgtatcgactggtcaattccggcgccgtcgatattcgaccgcaaaaaatcgctggcagaaaataccctgaagcggatcgcgcgcggcatacagcgctttgttatcgacagtgcgtcgccgttcatcgtgaaatgcaatcacactacgaccaaagggaaatacgactgtttccgtgggcaggcactgagtgagccattgcagaccattaccaaaacccatggctacgcgttagccgttccgcatcttacaaaattccgtaccggcgcaaccggccagcccattaccgaaccggtaccgacagttaccgctggcacgtcaaaacgccccggcgggaatggtcatgctctggggattgttgagacggcactgacaccatttctggccggtaatggtggaagtgaataccaggctaagccgcgcccgctggataagcccgcgcatacaatcatgaagcaatcccgcgcctgtcttgttgctccagttatagcccgccagtttggagccagcgtcggacaccgggcaaatgaaccgagcgcaaccatcaccgctggtggtggcggtaaatctcaactggtaacaccagtgttgatccaaatgggttatggagaaagaccggggcagcacccgcgtgtattgcagcttgaaaagccgttggggacagtaaccgctggtggtaacaagttcgctgtagccagcgcatttctggcaaagcactacggcggcaactatacgggcccgggcgtcggtttagatgagcctgttcattcagttaccacggttgatcaccacgtagttgtcgctgcgcatttgatggtcaataacacaggacatcccggcggcacactggacaatccggctcatactgtaacgacaggaaatcatcatgctgcaattacctctcacctggtaaaactgcgcggcacctgccgtgacggccagccaaccagtgagccaatgccaacggtgacggcgggtgggctgcacgtaggggaggtgaaaaccactcttgcggtcgatgaatacgacgaatatcgcgcgcagcagacgcttgagtttctgcgtgaatattgcggcgaggattgcgacgggctggtgacagttgacggcataacttaccgcatagttgatattggcatgcgtatgctgcaaccacacgagctataccgcgcgcagggcttcccggagtggtacatcatcgaccaggactatcggggcaaaaagtacgcgaaggacaaacaggttgcgcgctgcggtaacgctgttcccccacctttcgcagaggcgctggtgagggctaatttacctgaattatgtgtaagcagggaggcagcataa

SEQ ID NO: 384053 - DNA, 339 bp, Salmonella enterica
atggcaaaatcagcatcagaacgtaaagcggcgcaacgcgcccgtcagtctgccgctggtgagcgcaagattgaactggtgcttgattctcaggagctggacatgttggagcggaactgcgccgcccgccgcccgggtcgtgcgccgtatgaaatgggcgaatatattgcgatgctaattcgtcaggatgatgcgcgagttcgtggacgtatcaaatcaatcagcgcaaatcaatgtggaaaatgcggcgacgcgctgccgattacatcatgcccatgtgcaggtgattctcagtgctgggttacgtctggatggcatgcggtgaaactaacaatgtga

SEQ ID NO: 384054 - DNA, 192 bp, Salmonella enterica
gtgtttaaaaagacggagataggggaacatctccccgataatggtcgcgttctcattacctgtaaaaatggcaaggtgatgtctttaagaaacgtgtacgacgatgaacatgtcgcatcccttaaatcattgttagaactggcagaacaagcaggctgtattgttgttcaaaaaggtaaacaaagggtataa

SEQ ID NO: 384055 - DNA, 597 bp, Salmonella enterica
atggcgcagtattcatttgtaaaatcagcgggcggtgtacttattccagcaaccccggatgctcgcgaatttatcgacaaaaaatttcgtctgggcgctgttttgtatgccgactttaaacaggcacgtaatgcagcgtttcacagaaaatttttcgcactcctcaatctcgggttcgattactggcaaccgtcgggcggtgcaatatccccggcagataaaaaactggttcggggatatgtacaactggttgctcactacgcgggtcacgaagaaacactccaggaactggccgatcaatatcttcgcgaagaggcagaaaagcgcgcaggtaacatcagcgctgtaaaatcctttgaagcgttccgcgcatgggtaactatccaggctggtttttataccagatacgaaatgccggatggcacaatccgcaacgaaccaaaatccatatcgtttgccaaaatggacgatattgaattttcccagctctacaaatccgttcttgatgtgctctggaattatattttgttccgtacatttccctcacaacaggctgcagaaaacgctgcctctcaattattcagttatgcagcatga

SEQ ID NO: 384056 - DNA, 579 bp, Salmonella enterica
atgattaacccatcaacgacaggaaagggcgatgagatgctgcgattaaacacccttgagtcagtctggattcagggcaaacttcgtatgtgggggcgatggtcatatattggatcaggctcaggcggtcacatgtttaataatcttcttgcgtcaaaaaaagtcagtaaaacagccattcagcaggttttgaaacatctcaaatcatcgggtctggatcacggtgaactaatgtcatatttcatggatatgctttccggaaaagcaaaaagcaacctggcattttgcacggatgaagagggacttcttatggatgctgttatcggtgaaatccttattcgctcaggctatcagcgtctttttgaattgattgtcgatcgttacaagaatcgtatgagtaagaaatctatggcaagaggactgaatactcgccacccggaatggtgcctacgtacctgcgaaagccgaattgatgtctggttgcagatggcagaagccatgttgtacttacctatgtgtgatgtattcgataaaaaagctgatcgattccggttgcaaagttgcgcggggattgcttga

SEQ ID NO: 384057 - DNA, 327 bp, Salmonella enterica
atgtccgagaaaatcacagagcaattagtattccgccccgccagtgaaaagctgacaaaggaactggatggtgagtgggtgattctgctcaacccatgcgatggctggcatattgcccatgtgctggcgctggaagaggatggtgaagtctaccatgtcggcgcatatcaatttgcaggtggggagttcgaaccgcacgaattttatgttgcctgggcattgcttccagactcgataaaactgtctgatcactttgaagatcagaagatgagccaagagattagagatgctcgctggcgtgaatggacagctagcatcagtaagtga

SEQ ID NO: 384058 - DNA, 348 bp, Salmonella enterica
atgaaaatgcacaacgatccccaatcctggcagggctggctggagctgttccagagctggtggcgaggagatacgccactgggcgctgttctgatgtcgttatttatggccggtctacgtattgcctattttggcggtaacggtggctggaagaaaaaaacactcgaaattctgctttgtggcgccctgacgttgaccttctcatctgcgctggaatatttcggctggcccaagtccctgtctgttgcgattggtggcggcgtcggccttatcggtgtggatgcgatccgcggcttcgcaatgaagtttatcagtggtcgtatcggtggggataataacaaggtttaa

SEQ ID NO: 384059 - DNA, 519 bp, Salmonella enterica
atggcaaaagagaccatgataccgttactcacaattgccgcgtggagcggcacgggaaaaacaacactgctgaaaaagttaattccggtattgtgcgccagtgggattcggccaggtttgataaagcacacacaccataatatggatgtagataaacctggaaaagatagttatgagttacgcaaagcgggcgcggcacaaacgttggttgccagccagcagcgctgggcgttgatgactgaaacgccggaagagccggagctggatttagcgtatctggtaagcaggatggatgcttcgacgttggatatggtactggttgagggatttaagcatgagcctgtcgcgaagatcctgctttttcgcgagggctgcggatatagtcctgaagagttaacgatggatgagtttgttatcgcgattgccagtgatgttccgttatctgtggatattccattattagatattaatgatatacagcaaattgctgatttcgttacgcaatgggcaagacgataa

SEQ ID NO: 384060 - DNA, 243 bp, Salmonella enterica
atgatggctgagatggaaatgggcaggatattactcgacttatcagatgaagctatcaagcgtctggatgatctgaaaaaacagcgtaacctccctcgtgctgaattactacgcgaagcggttgaacaataccttgaaaggcagggactggctgaaaacaccatctccaatgctctggggctgtggcaaggctgcgaggaagatggtgtcgaatatgaaaggaaactgcgcgaggaatggtga

SEQ ID NO: 384061 - DNA, 213 bp, Salmonella enterica
atgaaaagcatcaaaaattttgtcgtagttatcgctctggctacgtcttttggctcattcgcggcgcagacggtcacagcatcctccgccacgctggatggtgctgaagctaaaattgccgctcaggcccaggaagcgggcgcgtcatcatacaaaattacccaggcatttaccggtaaccgcgtacacatgaccgcggaactgaataaataa

SEQ ID NO: 384062 - DNA, 717 bp, Salmonella enterica
atgaacgcgatatttaaaaaagggctgctggcttctatgctggctgtggcaacgtcttctgcaatggcggcatccagtattgatatacaggttaaaggtaaaattgtgccctcatcctgcacaccttcattcactagcggtggcggtattgctgatttcggtaccattaaagttgcagcattgaatgctaccacgatgaccgcactgccggatctgaaaactattcctatttctattacttgtgaagaagctacccgcgttgccgtgacttttaatgatgcgcatgcggattcagctccaactgcagacctgcctatcacttatgcagacactgatttctctataagaacgcccgctaccgctgggcttggcatgtacaacggtaagaagattggcgcttattcaataggtattcagactgatgccggcaaagcgacaaatgacaagggtgataacctctttccaatttgctcagacgttgctgatgcgactgtaggttggatgacaaaaagcggaagccattatatgcaaattgaaacggataaaagtgaattttattcattcaccgcgaccaaaggcagtggccagccggatgcgcagaaacaatttaactttattgttggcctgatggcagcgatcaacccaacgaacgacctcgatattactgatgaagcaacgctggacggtttaaccaacgtcgagctggtttatctgtaa

SEQ ID NO: 384063 - DNA, 684 bp, Salmonella enterica
atgcttgtgctaaaaagaacgctggtctatgcctgcctgctcgcttcgtttaacaccctcgctgccggaatggtgccggaaacgtcactgctgattgtgaaagaagatgagcagggcgccagcatggatgtcaaaaatacggataatgacacgcagctgctgtataccaaactcacagatttacccgacgatcctaaacctgttctgattgtgacacagcccgtggtgcgtgtggaggcgggtaaaattcagcgtgttcgatttgtactgaaaaatagcgccgagccgctgaaagttgaacactttaagcgcgttatcttcaccgccattccgcagcgtgaaaaaaataaagttaaagtgacctttagtcagaacctccccgttattattcgtccggctggtctggcggaaaatctggagccatggaaggagctcatctggcagattaaaaacggcagcgtcactgtcgagaataatacaccgtatgttgttcgcctggagcaaaaagtgaaattattgccttcaggctcgcaggctgaattgtctaagacgtatattttaccaggagaaaaattaacgacccgatctaagaataaaattacggcggcagataaacagattgaaatatatccagccactcgttatggctataaagttcagagctacatcaccgacctgaaataa

SEQ ID NO: 384064 - DNA, 2427 bp, Salmonella enterica
atgttaaatgtttcctgtaaaaaggggatgctggcgttttgtctcgtgacgctgactttcagtattagggcagagataaactcgccaacgcaagaacctatggagttagcccgagcgatatttgataccgacgcgttaaaatcctacggtctggacgctgacattgctgaatactattccatggcacctcgttttaccccaggctatcataacgtgaccgtgaatattaacggtaagccgcgtacgcttatgcctgtgagatttaacgaaaacggtacgccctgtattgatagcgagtttctggaaaatgcaggcctgataaaaaaaaccagacgaggctcctgtccgcaaattcatcaatactggtccggctcaacgattcagtcctccccgaatattgaagaaatatcgatcatcgttccagttgaagcgttagatcctaatttcgggcgtcagtttgctgacgttcgtgggggccgcgcggcgatgctcaattactccatgttcggcacccacaaccagtatgacgatctacaagacgatcgtttccagtccaccctggaaatgggttttaatgcgggtgactggattgtgcggagtatgcaatttattagcgacggcagcgaccagagttttgacgttgactccctttatacctatgcccagcgtacctttaccgattatggcgtgatggtgcagggcggccagattaacgtggccaacagccgcttcagtattccaggtatttacggggtacagatgatgccggataacacgcttttgcctgaggcgggaacgggggtggaagtctcgggtatcgcccgcaatcctcaggcgcgtgtggatatccgccaggggggacagctgatttactcgacgctggtgcctgccgggcctttcaacctggacgacgtgccgctggccaacctcaataccgacctgaacgtgacggtgaccgagacggatggcagcgaaaaccgttttaccgtatcggcgagcaccttccgcagcaaccacgttggccgcgcaccgggctttactctggcggtaggacgtgttgacgacgacatggattcgcgctacgaaaaaccgtgggtggtatccgccaacaatggttggtccatcaacaagcgtatcaacttccttgctggtatggtcatggccgataaccattactacggtttctccggcaacctggacaccgtaccgatgcaaaacctgtatgcttcgctcggttttcttggttcgatagataaccagtcacaaatggacggcaacaaaacgacgctcgacctggggtattctctgccgtggggtatcgccatgacgttgggtggtagctacggcacgcgagattatcgcgagatggcggagctttacggtgacgatgacgatatgtcgcaaaccaaatatgacaccagcgtcggtatcagttggtcccatacgacctttggtcgcctctcgctcaactactaccgcaacgagagctggaacagcgagtatgatagccgccgcatcatttcatcgtggtcgcaaacttttaaatatttcaacgtgagcgtgaactgggaatcggatgtcagccgcaatgacgatagcgataacgatctcttttacgtgaatgtctcgatccctctcggtaacaaaggtgttaacaccagctcctggtatcgtgaaagtgaaggtaagcgctcctggggtacccgtgcgatgggatcgctcaacgaggcgaaccagtatgcggttggcgtctctcaggatcatgatgagaacaccaccagttgggacagctcattgaacagcaacctgcattataccaaccttgcgctggccgcagggggagataacaacagtaacatcaactactccgcggcgctgagtggcgggattgtggcgcatagcgatggtgtgaccttctcgccttaccgcgtggctgacacatacgccattgccagactagataaaccagtggcaggcattgagattggcacctcgcgtggcccggtatggacggataaatggggccaggcggtgatccctgcgctttcaccgttccgcgaaagtaccattgagatcaatactgaaaagctgcctggtaatctggatgtcagaaacggcagaacggcgattaaggcctctcacggtgccgttgcgaagtgggagtttgcgacgttaagccagcgtcgtgtgctgcttacgattactcgtgcagacggtacgccgttgccggaaggtgtctctattgtggatggggcgggggagtacattacgaccgcacctgaggacggcgtgatcttccttaatgatatctctgccaaccagctactttacgcaaagctggatgaagggcgttgcaggctgacgtataccctgccggaggcagagtccaataaattctacgaagaggtgacagggaaatgtctctaa

SEQ ID NO: 384065 - DNA, 600 bp, Salmonella enterica
atgtctctaaagaacgttcataagtctgtggtgattattgcattgctctgcgggatgtcaggtatgccgacgatagcgcaagccgatgatggcgaatgcgaaatgatgtccgccgtaaaaatcgtcgacttcggtcgttaccgtaaagaggagatgcaaaaagggtcgactgagtatgttggcaaagtttataacgggtatgcctcagtaacgcgtgaatttcaggtatcagtgatatgcccggatgtgcgtaaaatgcgcatctccatcaacggggccgcccggcagaacagggcgtaccggtttacggatagcggcgcgatgaagatcgcctttaaggatggccgcgtggacggcactaccgtgcagctagcaactgcggatatcgggtctgtcgccgttcagggaggtgcgtcagaggtgacgctgccgcccgagaaagcgctggtggctgttaacggaacggaagtggcggggaagcagtttgtcgcgaccatgatggtgacgacctacctgtcagataacgctttcagcgtttccaactccacggatcttaccgagacgctgacgctaaacgtcgatacccttccagcgcaataa

SEQ ID NO: 384066 - DNA, 897 bp, Salmonella enterica
atgaacattgatttacttaaatcgctctgcgaggccagcgcggtcagtggtgacgaacaggaagtgcgggatctgctcatcgatacccttgaaggccacgcggatgagatcgcctttgatggtctcggctgctttatcgcccgcaaggggacgcgtgggccgaaggtggcgattgtcggccatatggatgaagtgggctttatggtcacccacattactgaggacgggtttattcgcttcgacaccatcagcggctggtggagtcagtcgatgcttaaccatcgcgtgacgatccgtacccgtaccggcgaaaagatccctgggataatcggctcggtcgccccgcacgtgctgaccgaaaagcaaaagctgcagccgctgagttttgacgagatgtttatcgatattggcgccaacagccgtaacgcggtgctcaaacgcgatattgcccagggagattttatcagcccggaagccaatttcgcccgcaggggcgaggataagctggtggcgaaagcgctggataaccgggtaggctgcgcgctgatggcggagttatttttgtcggtcgatacccccaattcgcctgtgcgctggagcgacaccatagcgaatggacgcccattcttctgcttacccatcaaaacgctatcgcaaccatcaataaaatggccattgagagaggtgatgaactgccgggtggtcgtcgccttcacgcccgatgaactggtagccctgtccgacgaatgccagccagcgctgatcgtgaataacagacattttgtgctggatgactcgctgcataatgtactgactatccgcaacatcatcactgcggtgggtatcgatcagattaaggattttttggcctcggcgtttattcgccagcagccctaa

SEQ ID NO: 384067 - DNA, 291 bp, Salmonella enterica
gtgggcgcgaccgtcgcgaccgaatccgcgatcccctatgcgctggcgatgctaacagccaataccctgagcggcggcattgccggcatgttaaccatcggttttggcgtacagcgccttgcgccgggactgggcatcttcgatccgctgatcggcctgatgtccccggcaggctccttctatctggtactggcgattggcctggcgttgaatattaccctgattatcgttctgaaaagctggtggctgaagcgcaaagctgcccgtatggagatggcacatgaacattga

SEQ ID NO: 384068 - DNA, 297 bp, Salmonella enterica
gtgtggccgagcgagcacctgatcggcgtcgccttgtttcagctggttgatgaaatcctgatggataattttgcgacacagggtgccgatgattttgacctgatcatcctcaccggtttgtggcacgccgaggcagatccagcaattaacgtcctcgccgtcgctggctttccagtccacgttttctggtttacgtgcgaacaggacgaagggctacctgatgcaggcacttttgccgtgtgggacggcaatgcccgaaccaaagccggtggagtgcagcttctcgcgcatcaataa

SEQ ID NO: 384069 - DNA, 672 bp, Salmonella enterica
atgagaaaagctcttttcttactattacctcttgctgtaacaaatgcgcacgcagtatatgttgatgttcgtcatgaatatcttgatgacagtaaagctaactatgaccgtgcgtatatttcgcatcgttttgcgaatggttttggttttgcgatagaagctatctcaaaatcaggcggagatgataccaataaagcgtttaacgatctggaaacacagggcaacgaatatacgataagctatcaatttaaaacgggcgatgtcgcctggcaaccgggttttgtgctggaaacaggggatggttactctacctataagccttacttccgcgcgacgtggacattaaatgaaagctggtgggttggcgcgcgctatcgttttgaatatgtacgccgttcttctgatatccgggatgatgatactatcaatcgtatggatgtctgggcgggttataaatggaacaactttgactggacaatcgaaggaatttataagaaagctgataaatatgatctttacgatggcggtaaagataattacgaatataacttcagaactgcctatattattgaccaatggtcgccattcgttgaagtaggtaatgtttccgtcagtagtaacagcgatgaaaggcaaacccgtttccgcgtgggtataggctacacgttctaa

SEQ ID NO: 384070 - DNA, 516 bp, Salmonella enterica
atgaaaacattcagaaaaggacttgatttattgctgggcgctatctgttgcctggtgctggctataatggttggcatcgcctgctggcaggtggtgagccgctacattctgggcgttcccagtacccttaccgaagagatgctgcgatttctcctggtgtgggtatccatgctgggtatggcttttgtcgccggccagaaacagcatatcagtctgactctcttactggataaggtgtcgccgacgattcgcggctggtgggatattatcctgcaggtcatttttatcgcgttttccatttgggtattgattatcggcggcttaaagatttctgcgatttctatgctgcaaacctcccctgcgctgggcattccgatggggaaaatttattacgcgctcccctgcgcgggcgtactgatcatcctctatgggctgctgaatatcgttgacgccctgaaagttatccattccgccacggataccactgagcacactctggagaaatcacatgattga

SEQ ID NO: 384071 - DNA, 387 bp, Salmonella enterica
atgttaagtgtttttatcccttcatcccggaaatgcatttccagacgtcgttatttattgttattttttctggcacatgtcctaagcttcatttttattgcagtgtcggtgaagttacattttacattactggtaattatatttacagttatgctacattacctcgtaattaatatgaactgccagcggctcagagatagtggctttacctatataaaatactatgtatggggtacgcttgcggtctatcttgtcgccatcgtactaatgcttgcggaaaaattcgcctgcgatggcttcggtacgcccctttttcttatctggtattttaccactttctctctcttacttctggcacccacagaaacaaatttatccaacaaataa

SEQ ID NO: 384072 - DNA, 156 bp, Salmonella enterica
atgggggttatactgggcggctactttcacttttgtcgtgtctactcttgtattattaagccttgcgctggcgaatttaattatcgctattgcgcggtttttcgccagatggcgacgctagcgcgtcttatccagcctacggcgctgttaccgtag

SEQ ID NO: 384073 - DNA, 240 bp, Salmonella enterica
atgcgtggtgattgggggatgacgaatctcgctattatatgggggattattgaggcgctgttcagtattatctttattctttgctactccaattttcgcaagctttggggagggtgtttattatcgctgtgtgtcagccttgcgagttttcttgtctggtgcgagtcatattatggacgatgggacgatgggacgatgggacgatgggacgatgggacgatggtggagagtatggtgtag

SEQ ID NO: 384074 - DNA, 255 bp, Salmonella enterica
atgtcagcgttagaatcttcggggataactagtcagttcattgatcttggtagaacttttcatgaattatcgacgagtaacattgataatgagcgaatggttgatgattactactctgtcggagatagccgaagttgggacaacttactcaacgaaaaacgcctgctgataatgtctgaagctggctcttttatgcttatgaccgcatctgaaagcgagttcttgcttacgtctttggcccccgaaatgcgttga

SEQ ID NO: 384075 - DNA, 228 bp, Salmonella enterica
atggaaacgcctgtttctgacactcttaccgtagatgttctgctgcatttgccggggtggtgtatttatggcagaacaccagggctggcttggggaagtaaatctttatatgggttctggataactgtcggttttgatgacatcggtggatgtaaacaatttcatctgctgctgaacatggaaagtggcgcggaactggaatgtatttcgctgaaaaaagggtcataa

SEQ ID NO: 384076 - DNA, 480 bp, Salmonella enterica
atggccaatctcgtttatctgacactaaacggagacatacagggaatgatttcagctgggtgctcgtcaatgcagtccattggcaacaaagcccagcttgcgcatctggatgagatcatggtcacatcgttaagccacggtctgagccgcgatcaaaacgtcaatcatcagatgctgaccatcattaaacccgtggacaaatcctcacctctgctgggtaaggcgatttcggataatgagtgtctgacctgtgattttacattttaccgtaccaaccgttttggcataaatgaactgtactacaagctcaaactgactaatgcccggatatcgaatatcagtctgaacgttccccataccattaccgacagtggagggcagccagaagagtcaatctcgtttagctatgaaagcattaactgggaacactgtatcgctggcaccagcgcttacagtctgtggagtgaacggcttttttaa

SEQ ID NO: 384077 - DNA, 1359 bp, Salmonella enterica
atgagtaacgcacagacgcaaattatcgttaccggccgcgatccccgtgacctgccggaattcagcgccatacgtgaggagatcaacaaggccaatcaaccttctcagccagagcttaactggaaactggtggaatcgctggcgctgaccatcttcaaaacgaatggtgtggatctgcataccgtttcctattacaccctggcacgcacccggatacacggacttgccgggttctgtgagggtgtcgaattgctggcggcaatgacaggtcatgagtgggataaattctggccacaggataatcatgctcgtaccggaatgctcgactggctcaacacccggaccggcaatatcctgcgacagcaactgtcattctctgatacagatctgccgttactgtaccgcgcagagcgggcgttacagcttatctgcgacaaacttcagcaggtagatttgaaacagccgcctcgggtggaaaacctgctttattttgtgcagaacacgcgaaaacggctggagccgccgcagaaaagcagcgtgaatacgccgtcacaaaccacggtcagaacactggtttatgcgccggaaagcacactgcccgcgccgccagaagccctcccgcccttacctgatttaccggaaatgaaggtcagggttcagcatggcgccagccctgaaacagagcctatggcgggccgcaatgtaaaatcatttctggcgggtgttgcctgtaccgccgccgtcgcagccgttctctggtggtggcgggtatacccgatgcagcagcaactggcgcaggtcaaagataccgcgcaaggcgcggcaacggcctggctggcctcccctgatctgggtagctacggacaacggctgctacagcttcctgatgccccgccattgcaactgctggagacgggtatgcagatgatgcgaacagcagacagtcgctggcccgagagtttgcaacagcagcaggcaacggctcggtggaacgctgttctgctcacgcgggcgcaaaacagcccgcagatgaaaggctggaaacaggcgcgggaaaatctacgggatttcgccgacctgatgctgaaaaaagaaactgaaaagcagggttttaccctctcatatatcaaaacagtgacctggcaggcagagcggttattgaatcaggaaactccgctggaatatctgctgacgcagtaccaggaagcccgcgcccgcaagcaaaacactgaagcgctggaaaaagagatcaatgaacggctggatggcgtgttaagccgttggctgctgctgcaccgcacaacgccggattcggcaacggatagcgaagccgggcaaccggtatccactaataattaa

SEQ ID NO: 384078 - DNA, 1416 bp, Salmonella enterica
atggacttacgtaatcccgatgtctggtttgcaaacctgctggaaaatctgccggaagaaaaactggccgccgcactggacgacgacaatcctgaatgggagtttatcgacagcgaaatcgtcaagctcggttcgctggcccacagccagcttgatgtgccggaactccagcgccgggggctggcgctattggcctcagagagcaaggactttcgcctgctggcgcacctgctgcgcaccctgcaacataccggtgatatgctattggcgttgcgcctgctgacgcagtatacggagcattactggacggttgccgcaccgcagaatatggcacataaaaaacgtttttcccttcaggtactgaaacgttttgagaccggcgctgatggctttgcgcaacaggccgataccgcacaacgcgaccagtttctgggcgaactggcaaagctggcgcagctctggcagcagaataacgcgccggacctggcgcaggcggcagatgatatctttgcgctgtaccagcggacattccgcgacagcgaacctgccgcagcctcccatgccccggtacagacttccgccacagtcaccacggcccccgccgcaccagcgacacctgccacaccggcttcaaccccgacccccgtggtaaacatcgacagttatgatgataaagcctggcgcgacacgctgctgaaagtctccgccattctttgcgagcgccagccggactcgccgcagggctaccgtctgcgccgtcatgcattatggcaggccatcacctccgcgccacaggccgaaagcgacggacgcacgccgttggccgcctttcccgccgatatgatggatgattatctggcgcggttaaacaatgccgacatggcgctgtggcagcaggtggaaaaaagtgtattgctggctccttactggtttgacgggcattacctctcggcacaggccgctcagcggctgggttacaccagggttgccgatgccatccgcgatgagaccgcgcattttctcgccaggctgccccagctcgccgccctgctgtttaacgaccggacgccgttcatcgcggaaccaacgaagcaatggctggcctcctcttctgcgggtagcaacacagcgcctgccgtacagacaggtgaggagttacaggcggtccgggcatgttttgacgcgcaggggctggaagccgcgctgcaccatctggaaaccctgcccgcaggcgatccccgcgaccagttttaccggcagtatctcggcgcgcagttgctggaagaggccgggatggtacagcttgcccagcagcagtaccagctgcttttccggctggggctgcaaatgatgctggccgactgggagccgtccctgctggaagcgctggaacagaaattcacggcaaaaaaataa

SEQ ID NO: 384079 - DNA, 735 bp, Salmonella enterica
atgagcaaaatgcggatactcctggccggtctgttgttaccggggctgctcgccagcaccgtacaggcagaagcgcctgctgaaccggcggtgtccggcgcggtgctgccgggcatcgtggtgccagaggcgaatgtacaggcgacggtaacggccatgatggcctgccgccgggagcctgctgcgctggagcggctggactgctacgaccacattcttgcgccggaacagcctggttttgagcgagcgctggtgaaggcaagctacaaaggcgaggcctggaaacgggccttcagccaggaaaaacagcgcccggataactctaccacgctgatgctaacgcagagcgacggagagcggccaaccgtgattatcaccacgcctgctatcggcaacgtgccgccgcgcccggtactgatgttcagttgcgtggacaacatcacccggatgcaggtagcgctgactcacgccatgacgcagaacgacatcgccgtgacgctgaccaccgacaccggccgttttcagtcgcactggtttatccgtgagaacggcaccttgctggagtccagccggggcttatccggcattgacgagattaaacagcttttcggcgcgaaaacgctgaccatcaataccggtacggacagcgccgccggaaaactgacgtttaacattgacgggctggcgaaaactatctcaccgctgcgtgaagcctgccactgggcgggggaataa

SEQ ID NO: 384080 - DNA, 2760 bp, Salmonella enterica
atgatccagattgatctggccacactggtaaaacggcttaaccccttctcaaaacaggcgctggagatggcggcgtcggagtgcatgagccagcaggcggcagaaattaccgtcagccatgtactgttacagatactggcgatcccgcgtagcgacttaagggtaattaccgaccgcgctaacattggtgcggatgaactacgccaggcgctgacggtggaaaactatgccactgcccgatctgcagacagctacccggcattttccccgatgctggttgaatggctgaaagaggcctggctgctggcctcagctgaaatgcagcagacggagctacgcggcggcgtcctgctgctcgccctgctccactcgccgctgcgctatgtgccgcctgccgccgcccagctgttgaccgccattaaccgcgaccagttacagcaggattttgccggatggacgaaggagtccgccgaatccgtggtgctgaatgccgacggacaggtcgccagcgccacagccaataccggcgacagtctacttggccgctatgccaaaaacatgacggaagatgcccgcaagggacggctcgatcccgtactgtgccgggataatgaaatcgatctgatgatcgatattctctgccgccgtcgcaagaacaacccggtgattgttggtgaagcgggcgtaggtaaaagtgcgttaatcgaagggctggcgctgcgtattgtggatggccgagtgccggacaaactgcgtgacaccgatattatgacgctggatctcggcgcgttgcaggcaggcgcgtccgtcaagggtgagtttgaaaagcgtttcaagggacttatggcagaagtgattcagtcgccgaaaccggtcatcctgtttatcgacgaagcgcacacgctgattggcgcgggcaaccagcagggcgggctggatatctccaacctgctgaaaccggcgctggcgcgcggcgaactgaaaaccattgctgccactacctggagcgagtacaaaaaatacttcgagaaagatgccgccctgtcgcgccgcttccagttagtgaaggtgagcgaacccacggcggcggaagccaccataattctgcgtggcctgtcggcggtgtatgagcagtcccacggcgtgctgattgacgatgaggcattgcaagcagcggcgacgttaagcgaacgctacctttcgggccgtcagttgccggacaaggccatcgacgtgctggataccgcctgtgcgcgggtagcaattaacctgtcatcaccgccgaagcagatttcggccctgaccaccctgcgccaccagtgcgaggcggaaatccgccagcttgagcgcgaactgcgtattgggctgcggactgacacctcacggttgactgaagtgttggtgcagtatgacgaaacgctgaccgaactggatgaactggaagcggcgtggcaccagcagcaggcgctggtgcaggaaattatcgcgctgcgtaagggactgctggatgaaactgttacaccggatgcagagaccgtcgccggagatgaactgatagcagagaccattgacgataacaccgtggctacagatgaccccgtcgccgggcagccggaacctgaaatccttccggcagagcgtctggcacagttaaccgtcgaactggacgccctgcacaacacgcagcttctggtttccccgcacgtcgataaaaagcaaatcgcggcggtgatcgctgaatggaccggcgtgccgcttaaccgcctgtcgcagaatgagatgtcagtcattaccgatctgccgcagtggctgggcgacaccatcaaggggcaggatctggcgattaaacacctgcataaacacctgctgaccgcgcgcgccgacctgcgccgtccggggcggccgctcggcgcgttcctgctcgccggtcccagcggcgtgggtaaaaccgaaaccgtgctgcaactggcggagctgctctatggcggtcgtcagtatctcaccaccatcaacatgtcggagtttcaggagaaacacaccgtttctcgcctgattggctccccgccgggctacgtgggctacggcgaaggcggtgtactgaccgaagccattcgccagaagccctactcggtggtgctgcttgatgaagtggagaaagcgcacccggatgtgctcaacctgttctaccaggcctttgataggggtgaaatggccgacggtgaaggccgcctgattgactgcaaaaatatcgtctttttcctgacgtccaacctcggttatcaggtgattgttgaacatgcggataacccggaaaccatgcaggaagcgctgtatccggtgctggcggatttcttcaagcctgcgctgctggcgcgtatggaagtggtgccctatctgccgctgtcgcgtgaaacgcttgccgtcattatcgccgggaagctggcgcggctggataacgtgctgcgcacccgctttggcgcagaggtggtaattgagccggaagtgaccgacgaaattatgcagcgcgtcacccgcgccgaaaacggcgcacgtatgctggaatcagttatcgatggcgagatgctgccgccgttgtcgctgttgctgttgcagaaaatggcggcaaacgcggcgattgccagcgtcgtgctgggagtggcggacggcgcatttatcgcggacgtggaggacgcgccggaggtcagtgcagacgccgacgcacagccggaaccagaaacagaggacgctgctgttttatga

SEQ ID NO: 384081 - DNA, 1347 bp, Salmonella enterica
atggcgacaatgaaaaacaaggttatctggcaggagggcgtgtttgccctgccgcagcattttcagcagcagcaacgccactgcgaatacctgctgacccgtcgtctggatgcgcagggagattttgcctggggctttaccgatctctccattaataccgcactgctggcccaaggaaaaatcatgattgaccgggcggcgggctgtatgccggacggcaccgtgttcagtatcccggaccaggatctgctgccggcgccttttcagccggggacgctgtcatcgaaagaaagtcacgatatttatctggctctgccggttatcagcgatgtggtcaatgaaattcaggggctgcacagcgccgggcagggaacaggacgctaccgccttacccatacccgcattcgtgattttcataccgatgaaggtgacgaacagcctgtcggtctcgggcaactggttccacggatcgtcagcggcgcggaagatctcagcgcgatggtggcgcttcccctgtgccgtattcgtaacaaaagcgccaccggggcgctgatgctggatgaggcttttattcccaccgtccagacggtacaggtcagcagcatactcggggcatttgccggagaggttcagggactgcttaccagccgcgcggccgatctggccggacgcatcggatcgccggagcagagcgggatcgccgatgtggctgaatttatgatgttgcagatgctgaaccgccaccagatgcagttcacccaccgggtacgcctgcacacgctgcatccggaggcgttctaccgggacctggtggggctgctgggcgagctgatgacctttacggaaagcaaccgcctgccctgcgcggtggagccctacgatcaccgggatctcaccctcacctttaacaaaacggtgataccggagctgcggcgggcgctcaatactgtactggttccccgcgcgcagaatctgcccctgcattataccgaaggcacctggattgcctccgttagcgatccgacgctgttgcagtccagcaagctggtactggccgtgcgcgcccggatgcctttcgaccaggtacagcgccagtttattcagcagtcgaaagtcgccgccaccagcaaaatccgcgacgtggtcagcgtccaggtgccgggtattccgctgcgcacgctcaccgcggccccgcgccagttgccctaccacgaaggctatgtctacttcgagctggaaaaaggcaccccggcctggcaagacgtggtgaaaacgggcgcgctggcgcttcatatctccggcaccttcccggatctggatctccagctatgggccataagagggtaa

SEQ ID NO: 384082 - DNA, 534 bp, Salmonella enterica
atgacagggcgttttttgcgcgtctgcgtgatggtgatgttcttcgccgccaccctgagcggatgcgagacggcgaaaaaaatcggccaggtcatctccaatccgaatatccaggtgggcgatctgaagtcacagccatcggaagtcatcgtcaccctgctgaccgagccggataccaatctcaccgccgatggtgaagccgccccggtggacgtgcaactggtctatctgagcgacgactcaaaatttcaggccgccgactacgaccagatcgctaccaccgccctgccggatgtgctgggaaaaaactacatcgaccaccaggattttaacctgttgccggacaccctaaaaacgcttcctcccataaggctggatgagaaaaccggctttatcggcgtggtggcctatttttctgacgatcagacaacggaatggaaacaaatcgaaccggtggagagtaccggacgccactatcgcctgctggtgcatatccgcgccagcacgattgagatgaaaaaagaggaagagtga

SEQ ID NO: 384083 - DNA, 1284 bp, Salmonella enterica
atggctgaggaaaaacagcaatcccggcaggcatcgctgactttacaggtaatgaacggcaatgaactggaaagcggacgtgccgcaaaatgcctgttcagcgaagacggcggcgatatcggacatgcttccgactgccactggccggtgcaggacagggcgggggctatcgccggacatgcctgttctgttatccggcatgacggtgcgttctgcctgaaaagcctgatgccggggctgatgattaatctggcacccgtctcaggcgatgcgctggtgcgcctgcgtcagggcgatgagatccagctcggtgcactggcgctgaaagcttttctgcatgaaggggccgccatcacctatggcgagcggatggcgacgccggaaaccatcgtcatgaaccgcgataatctggcggaaacgctgctgaccaccgaaggccagcccgcttatccaggaatgccgttccagcaccagcttgcctccacggtggcgaacggtttttccggcgatccgctacaggcgctacagtcggagagtctgacggcattaccagactcgttgctctccatgcgtgcttcccaaacagagccgccgttgtccgatctgaccggtaatcatgggattaataccccctttatggatctgccgccgggtcactcccgtaacaataacgaagatgaattttccgacatggcgcagtaccacctggccgtcacgccgttactgcgcgggatggactgtccgctgaccattaataactctcaggacgccgacgagtttcttgaagaggccgggcgagcgctacaggcggcaattaaagggctgctcaacctgcaacagcagcagaacagcctgtccgataaacacctgcgcccgctggaagataacccgctgcgcctggatatggattatgccaccgcccttaacgtgatgtttgctgaagggaaaagcccggtacatcttgccgcccctgcggccattgccgaaagcctgcgcaatatccgccaccacgaagaagccaataaagccgccatctgcgaggcgctgcgcgtgatgcttgatgccttctcgccacagaatctgctgcgccgctttgtgcagtaccgccgcagtcatgaactgcgtcagtcactggacgatgccggagcctggcagatgtacagccattattacgatgaactggcatccagccgccagcagggttttgaaatgctttttaacgaagtctacgcccaggtctatgaccgggtactgcgcgaaaaacagagggagccggaagcatga

SEQ ID NO: 384084 - DNA, 1050 bp, Salmonella enterica
atggcaggaaaaaacgggccagcacgccctgatataatggcggaggcaccgtttccggtggacgtgcgccgctgtaatttctatgttctgatggaaacgcttcatcgtcggtatggcgtagcgaatcaggaaatttcgctgcgtaccgaacccgaacaagaaattgtgcgtttcagttccgatgccagcattgcgtttccgggcagtgatttaagcaagctttcccgaaggcacagcggtcagtttgtgctggaaacgaaattcctcggcttttccggtagccagtcgccgttgcccggctattatctggaccggatggcacgcgaatccgcgcagaatgaagacggtctgaaagagtttctcgatctgttcagtcaccgctggacgcagtttgcctaccatgcctggcgtaaatatcgctattacatctgctttcgcaacggcggctccgatacattttcacagcgaatgtatgcgctggtcgggctgggcagtcagagcatgcgtgacaaacttgccattaaccacagcaaaatgctggcctatgccggtatcctggccacaccaggccgggcaccggaggtaatctgcaatctggtgtcgcactgttttgatttaccggatgtcactattgaacgctggcagttgcgtaaggttaccatcgatccgtcacgccgtacccaactgggggtacgtaatccgaaaagcaaaaccgccggacatgtgccgggcaaatccattattggcgtcaattttacccttggctcccgtgtgccggatcgcagcggcaaattcctgttgcagattggcggcctgtcgcgtgaacgctatctctcatttttacccgatggtgaaaaccacctgccgctgaccatgtttatttcctttattctgcgcgaccagtttgcctgggatttacggctgagtctggcgccgcagcaggcaaagggaatgcgtcttggcgacagtgccagttctcaactggggcgaacctgttttattggtgagcccaaaacgccgcccgccatcaccatttgtatcagggaataa

SEQ ID NO: 384085 - DNA, 1842 bp, Salmonella enterica
atggctttcgaagaacgttactaccgcgaagagctggactatctgcgtcaacttggcaagttgctggcacaggaaaaaccgcatctggctcactttcttgccgagaaggagggcgatccggatgtggagcgcctgctggaagccttcgcctttatgtccggtagactacgccagaaactcgaagatgagttccccgaattcactcatgggttgattcgtatgttatgggccaactatctgcgccccgtccccgccatgacggttattgcctatgaacccgaagttgatctgttgaaaacgccgatcaaggtttgccgtaatgaactcatcagaagcagaaccagccattttcaaccttccggccagggagcgctgacggacaatagcaatgaaacaacgccctctcaaccctgtcattttaccctggcgcgggatatctggttacaacctctgcgtattgataacgtgcgcaacgtcagcagcctgaaagaaggtgttattgatatcagcttcattgcagacgaccgggtgtcaccggatatcctcgatctgaacaggatcaccttctggctgggcaacgaagacgactatacccgccaccagctttatctatggttctgcgaatgcctgatggacgcagaactgattgccggagaacgtcatttgccattgccggctctctggctggatgccgccgggtttgacaagcaggatgccctgctgccctggccgaaaaacgtccacagcggctatcgcgtgctccaggaatatttctgttatcccgaagcgtttttctttttccacctgcgggatgtcgccccgctaccagcagattttccggtcagcgcctttacgctacgcctacgttttaaccgcccgttaccggctgatattaaattacgccaggattcactgcggctgcactgtacccctgctgttaatctattctctcattacgccgaacccgtcaggccggacggtcgcatggcggaatacccgttgcgggccagccataggcatccggatgcctatgatatttttcagatcagtgccgtcaccagtaaagtaaaagctccctctgatgcagccattccaggtagtcaagtgcatcactggcccgaatttgagagcttcaaccaccagatggaatacagccagcagcgagaagttgtctactggcaccaccggacaaaaacctccctgtttcatcgcgggctggaacattccatcgcttttgttcatgctgacggcagcgtgccggacaactcacgatttaacgatgatgtgatcaccgcctcattaatctgtaccaaccggatgctccccgcccggctgcacaccggtgatatctgcattgctgtcaacaagaatccggcagtagcctcatttcgtaacgtcacacgtccgacacaacccctctggccggtgacagacggcgacatgcactggtcgctgatttccgccatgaacctgaattacctctccctgctggaccgggaaacgctgatccagatcctgcgcacttttgatttgccgggcgttcatcatccgcagcgggccaggctgtcgcggcagaaactggacgccatcgaaaaactcgaaactaaacccgtcgatcggctatttaagggcgtcccggttcgcggactggcgaccacgctgtggatacgtcccgatccgtttgtctgtgaaggtgaaatttatttgctgggcacggtgctgtcgcacttctttgcgctctacgccagcatcaattcctatcactgtctgaaaattataaacacggaaagccaggagtcctgggaatggcaggaaaaaacgggccagcacgccctgatataa

SEQ ID NO: 384086 - DNA, 423 bp, Salmonella enterica
atgagccgggattcaggatttacaggcagtctgtttgagcgcatcacggaggcggcgaacccgtcttcataccagagccccaaagaagcgctgctgagatcgatcaggcgtaacctgcaccagatcctgaatacccgctccggcagttgttatggttcgccggaactgggcatcgttgatttgaatgatgaaacactggcttccagtgatttcagacgtgaaattcgaaaaaacatcagcgagtgtattttgcgttacgaaccccggattgccgataccgtcgtcacggcagcaatacaggatgaatataccccgctggagctgcgttttcacattgtggcaacggtagatttcagtgaggccagagacgtgttcgagtttgatattctgctggacagccaccagcattattgtgtggagtaa

SEQ ID NO: 384087 - DNA, 1485 bp, Salmonella enterica
atgtcagtacaggaagatattaccgccgccagcgcgccacagactgcctcagcgccgtcactgcttgatgaaattatggcgcagccccgtgtccagcctgcatcagaaagctacgatattacccgccagggcgtgggggcttttattgccgccatgctacagaacgacagtaacgaggaacccgtcaatattctggccgtggatgccatgattgccgatattgatgcgcgtaccggcaggcagatggacgcgattatccatacaccggagtttcaggaagtggaatcgctgttgcgttccctgaagctgctggttgaacgggctgatacccgtgaaaacatcaaaattcatttcttgaacgccacccaggaagagttacttgacgacttcgatttcgcggcggatatcactcaatctgcttattataagcatgtttattcaagcggttatggtcagtttggcggcgagccagtggcggcggtaattggcaattttgcgtttaaaaataccacgcgggatatgaagttgctgaaatatctcagccaggtgtccgccatgtcccattcacctttcctgtcgtcaatatcgtccgaatttttcgggctggattcgtggacggaattaccgggcgtcaaggagcccggggccattttcgaaggcccggcttactcccgttggcgtaccctacgggagtctgaagattcccgttatctgggactgaccgcgccccggttcctgctgcgccatccctactcgaccgatgaaaacctggtaaaatcgttccgttataatgaagatgtcagccagcgccacgatgattatttgtggggcaataccgcgtttctactggctgccaatctggctgaaagtttcgccaaataccgctggtgcccaaatattattggtccatccagtggtggcgcggtgaaagacctgccggttcatatgtatgaagccatggggcatatgcaggccaaaattccgacggaggtgttaatcactgaccgtcgcgagtatgagctggcggaagagggatttattaccctcacaatgcggaaaggctctgacaacgcctgctttttctcagccaattcggttcagaaaccgaaaaaattccccaaaacgccggaaggtaaagccgctgaaaccaattataagctcggcacacaactaccatacctttttgtcatcagcaggttagctcactatatcaaagtacttcagcgtgaacagcttggttcatggaaagagcgaggcgatctggagcgcgagctgaatggctggatacgtcagtatgtggccgaccaggaaaatccccctgctgaagtccgcagccacagaccgctgcgccaggcgaaaatcgacgtgctggatgtggaaggcgagccgggctggtaccaggtcgccatcagcgtaaggccccattttaagtacatgggtgccagttttgacctgagtctggtcggacgcctggataaggaataa

SEQ ID NO: 384088 - DNA, 498 bp, Salmonella enterica
atgagaaacaaaaatgatggcagtgtcgcgccgaaagaacgaatttcaataaagtacaccccaaaaattgacggagtgccaacagatattgaactcccccttaaccttttgattaccggcaatctgaaaggtgcgcaggatgaaactccgctggatgaacgtaccgccgtttctgttaaccgacacaacctcgatgccgtaattgcggaagcgggtattgagcgggaattttcggttccggctgaactcagcgatgtgcctgatgaaagtctgcatatcaacctgaaaattaagtcgatgagcgatctttccccggacagcatcgcccgccaggtcccggagataaaaaaactgctggagctgcgcgaagcgctggtcgcccttaagtcaccgatgggcaaccttcccgccttccgccagcaaatccaggcgctgctggaaaacgaagaaacgcgcgagcagttgatccaggaactgggcatcgccgctaagaaataa

SEQ ID NO: 384089 - DNA, 519 bp, Salmonella enterica
atgccaacaccgtgttacatctccattactggccagactcaggggaatatcaccgccggtgcatttactgctgattcagtcggtaacatctatgtgcagggtcatgaagacgaaatgttggtgcaggaattcctgcataacgtcactgtgccaaccgatcctcagtctggccagccttctggtcagcgtgcccacaaacctttcatcttcaccgtagcgctgaacaaggccgttccgctgctgtacaacgcgttggcttcgggggaaatgctgccgaaagttgaactgcactggtggcgtacctctgttgagggtaagcaggagcactatttcaccacccgtctgactgacgcgaccattgtggatatgaacctgcatatgccgcactgccaggacccggctcagcgtgagttcactcagctgctggcggtatcgctggcataccgtaaggttgagtgggaacacattaagtccggcacttccggtgccgacgactggcgtgcgccgctggaagcgtaa

SEQ ID NO: 384090 - DNA, 2538 bp, Salmonella enterica
atgtccttaaaaggtttacgcttcacgctggaagttgacggccaggagccggacacctttgcggtggtgagtttccggttaacccagcgccagtcggctccgtttgtgctgagcgtggacgtggccagcgactcgttcatgcagacggcagggatgctgctggagaaaaaggcggtgctgaccgtctggcagggcgatattgcgcagcgtcacgtgaccggcgtggtggcgggattcgggacgcaggagaacaacgggtggcagatgcgctaccacctgcgcattcagccgccgctgtggcggtgtggcctgcggcagaacttccgtatcttccagcagcaggacatccggacgatatcggcgacgttactgaacgagaacggggtgacggggtggacgccgctgttttatgaggcgcacccggcacgtgagttctgtgtgcagtacggggagagtgacctggcgtttctgtcgcggctgtgggcggaggagggcatcttcttctttgaccggtgtgcgggggacagcgcggcgcagacgctgacgctgtgtgacgacgtggcggggctgccggacgcgggagagtttccgtttaacccgaatacggatgcggtgaccacggcgtgtgtcagcacgttccgctatgaagcgcaggtgcggccgtcgtcggtgcagagccaggattacacgtttaaggtgccggactgggaggggctgtacggtcaggagggggacaacctgaacgggcagcttgcgcagtatgaggtgtttgactggccgggacggttcaaggatgaacagcacgggaaggattttgccctgtaccggctggaggggctacgcggggatgcggagaaggcgacgggggtgagtaactcgccggcgctgtggccgggagcgaggttccggcttgcgaaacacccgcagagggcgctgaaccgggagtggcaggtcatcagcagtatcctgacaggggaacagccgcaggcgctgcacggcagtaaggggaaaggcaccatgctggggaaccgttttgaggcgataccggcggaccggacgtggcgtcatgcgccgctgccgaagccgggggtggacggcccgcagagtgcggtggtgacaggcccggcgggagaggagatattctgcgacgaacacgggcgggtgcgggtgaagttccgttgggaccgttataacccggagacggaggcgggctcgtgctggatacgggtgtcacaggcgtgggcggggccgggtttcggtaatctggcgataccgcgtattggtcaggaggtgatagtggacttcctgaacggggacccggaccagccggtaatcacgggcaggacataccatgagtttaaccgttcgccggggaaactgccggggacgaagacgcagatgaccatccggtcaaaaacctataagggaagcgggttcaacgagctgcgtttcgacgatgccacgaacaacgaacaggtgtatatccacgcgcagaagaacatggatacggaggtgctgaacaaccggacgacggacgtgaaggtggacgacacggagaccatcggtaacaaccagcgaatcacggtggtgaagggccagacggtgaaggtgggcagtaagaaggaaggggggcacgaccagtccatcacggtggcgaacgaccggcgcatcacggtgcgcaatgaccagacggtgagggtcaggcatgaccggatggtgaacatcagccacgatgaggggctgtatgtcggaaatgaccgtaaggtgacggtggagggcaggcaggagcagagcacggcgggggaccatatcagcctggtgaaggggacgcacagcctggaggtgaagggggacctggcgcggaaggtgtccggggcgctggggataaaggtggaaggggatatcgtgctggaaagcagcagccggataagcctgaaggcgggcggttcgtttgtggttattcatgcgggcggggtggatatcacggggccgaagataaacctgaacggcgggggcagtgcgggaacgccggtatcaacactgcaaccggcagtgctggaggcgcttatggatgaggatgatggtcaggatagcggcggcggaggtactggtgatggggagggcggcccgaatgattcaggtgagtctgatgatgaaaataaagctgacttgcagagtttgcgatttgcttttcctggcgctgaccgttcagttgaaactatgagttggttaatcggccagccgtataagattagtgacagtaaaggaaatgttctcgcatcagggacgattgagcagtcgggacggttgccgagagtgatgcttgatgaaccagatgaactgaccctgactatgggtaatgaagaatggggggttgaggatttagctcgggggaatgatgacgcgtcatcggataatactgcatatgatgatgagtggtgtaatttggaaaacgatccttattacggaaaactggaacaggatgagcaatggccattagatgcggatattgacgaagtgcatggcaatgatgagtaa

SEQ ID NO: 384091 - DNA, 813 bp, Salmonella enterica
atgagccacaattttatttcagcaacctacaatacgataaaaaaaatggctatgtataaaatggctgatgggacagtatatattcggcagggaggcacactcccatggcgtacgcaaaacccctgtaatgtaagaccaaacggtagaaaggaaaggcagtatttacaaccattgaggctcgcagttgcagttactgccagtggtaaattcggtatgtatggatgtgaaaaagatggctgggagacggaaaaaaaactattgcgaagcgatctgtatcgtaattgtacaattagtgaaatggcaaaaatacatagtcctgaaaaagacggaaatgaccctataaaatatgcgaaagatatattggcagagagtggcgtatcgccgttgttgacctttgggaatatggatgatgcgacgctggaaacagttatgagagccattaaaaaagaggaggggtattataatttaaaagaaacacgggtcgaaaagtgggtttacaccactaacattactgttactgatggcgttcgtcctgttcttggtttccctttgaaagttatagcagggacgcgtaagtatgattgtgaaactgataagtacggaagacttgctccaatcgttcatacaacagagggaatggatattgaggtgaaagccgcaaatttagacggtgaatatgaaacaatttattcagctcaggcggaaaaggaaagtaaaaatattatcctgaaaagatgtcttgttcaatataaagcacatactttagcctataattctgaatcacctcataaaaaagtcagcctgagccaatag

SEQ ID NO: 384092 - DNA, 372 bp, Salmonella enterica
gtggcgcgacatcctccggaacaggcgaatcttatcctgtttcgccaaataatcctacagctgatgctggtaatgcggggcatccagtggatgggcctttatcaccaggaggatggacacccgatacgactgatggggcagactcatcaccagcggaaacagggggcgcggcaccctccgaaactggtgaatctctcccacctcaccctgatttaccgggtgattctacaaccggagcgggtaatacggctcatacatcggatggagccaatgggcaaaaatctggttcgtcgcagacaacaactaaaccagacaagccaacaaatttaccgaccgtgggaggtaaagatagcgggaacccagtggcaataa

SEQ ID NO: 384093 - DNA, 576 bp, Salmonella enterica
atggttgtagcttatgaagaagctgagaaacgctggaaatggggaagagtaaaagaggctaatggtgggataaactatcataagttaacaggagcaaataacccaactatggtaggagatcaaaatgcttggtgtgcatcttttattaactattgtttaaaaatgacaggttataaaatgtcagggacaccaaattctcaatttttttcaaaaagtcctgactttaaaaaaatagacactccaatatttggggctatcactgttttccataagaaaggcacaaaaaaaagtggacatgtgaacttggtatattgcaaaacaaaagacggggaaattggtttattaggagggaatcaaactgacagcgtaactattaatccaagatatgctgtatatgacagccctaaacttcgacttgagtttataggtttttatgtgcctgtcagttactattttcatgcgaaagagataatacaaaaaggtggggatttaactcctgtttttgataatattggtgctttgagagaatcgttaggggctaataaaccctcagtaaaagatggcaaaacccgttga

SEQ ID NO: 384094 - DNA, 495 bp, Salmonella enterica
atgagatatataatatttatcctttttttatacgctgaatattctaatgcagctacttcagaatgtttcagtaaatcagatatagttgaagttaaagaaatatttacatcgaataataaagataatttaattgaattggctatacaatctgcaaaattagaaatttcgcaagactctttttttaataacacaaaaaatgtacttcccaaaatgaccgaagtatcatatgagtgggggcgtagatatgcatctgaaatgccactgaaatcatcaggcaaattccctgataaaaatatttgtgtgtggagtgtgacagtttcattccctgataaaatcaggattaaatgtgatgattctggtatctacgggtattttattagttttaaaaaaaataaaaataatataaagatttataaattcacctccatattagatgagctatcagatggttcactggcatgcaaagcagcaaatggttatctattttcgaaatga

SEQ ID NO: 384095 - DNA, 261 bp, Salmonella enterica
gtggttattcatgcgggcggggtggatatcacagggccgaagataaacctgaacggcgggggcagtgcgggaacgccggtatcaacactgcaaccggcagtgctggaggcgctggccgatgacggtgatgatggttctgatgcgaatgatgcaaatgatgcgggtaactcagggccaccacagaaaaacgttcaggacatgtttaatacacccccgcagaacctggtgccgccgcaactccggagaatattttcacgataa

SEQ ID NO: 384096 - DNA, 459 bp, Salmonella enterica
atgagaaagattagtctgaaaaattttttattgatggttttattgctatttattcctctgagtaaagtcatggcagggaagattgaatgcacatctccgcaggaaacagttctccacttttatcgatggtatcttaatgaaattaaggatgaaaaatatccgctgacacgccattataatggcgataataccaggataaataagtgggttagttcatctttactcagcgaactgaaaaaaaggcaattacatggtgaaattgattatgactattttactcatgcacaggatttttttgaatcgtggcttacgcatattaataccaaagtaattaagcagacacttagtcaatctgaagtacagctttctttaggtgagaaagatttattgaatgaatacaaaatagaacttaattatgagccttgctggaagattaattctgtacagccggttagctaa

SEQ ID NO: 384097 - DNA, 2691 bp, Salmonella enterica
atgtgggacgtgaataaggccatcgaacatttaaatagacatgcagagcaggagtctgttggatattgcgcgaggtatgttaaaaacgcaatcagtgccgggggagatatcagcccatggccttcgatacagggtgcaaaagattatggcgatgcattgctgcatagaggatttcaggttatctcgcttgagagtggttttatttctggtgatgtggtaattattcaagggattaggaaagctgattttccagcaggtgaaataacaagagatcacccttatggccatatggccatgtttaatgggcagcaatgggtttcagattttaaacaaaataatggttattaccctggtggtgattaccgaaaagcaaagcctgcatgtgttttttatcgacataaagatgcccctggtgacggatcgcagagtaccaatgtaaccggtggaaaattgaaaatcagttaccccatcagggataaggacggaaaagagtttcgttccctggatgaggtaatgcgtctggttgatgcagaagctcacggcacctggctgctgggagggaacggactgtggcacggcgcagtccatatcagtgaggtatctaatccgcactcggcccttacgccggatacgctcagcgccggaaatccggtgcctctccagtttatggccgatggcagcattgtggcgtaccggatcaacaatgactatctgacaggcccttataaagggcaggaactgcgttacagcagcacgtttgtgctggtgaaatcacggtgtcagccagacccgcaaaaagaaaaaagctggctggaattttacagtctgtatatgcatctggcgccggtgaaagattatccggcttccccctgctataaagtcagggacggtcacagtgggatactactgcgtaaatacaccgaaggggaaaacggtcttccggacggtcaggagaaaggggatactcagcagtacagggctccggcgagtgccgggggcagtctcaacgagaaagaccgctttgtgtcatcgcgtaccgggcgtttttatgtgacaaaaagaggcaccaagcccaccctgacgacgttcggtctggtgcgtcgggtgatagacggagaaatgaaggatgaacagtactgggtgacgctggacccggcgctgatggagccggacggagaaatccgggcgctgatgcctgcatggatgcagaaagcgaaggaaaggggcgtttttaactcggtacaaacagtgggggaaacagacgaatggaaggtcagagccggaacacctgtcggatttatgggatatgaggaataccccggcagggagagcggccaggttgagggggaatggtttgtccaccttgaggtcctgagcgcagacccgggaatgccggcatttttaggcaacccggaaggcgtgaagggggaaaaacggacggtcctggcaccaaaaggaaggctattatacacccgccagacgacagcaggacaggagacatttaccgccacgtcagcgactctgggcgctcagtgcgctcttccgcgggaagccacaacgccggtcacggatgagtcgaagcaatggtggtttaacatcacgggcagcggctggctgccggagaaggatgtggcagaggctggacagtacgatttactgaagctgggctttcagccgctggaggaaaacagcggaggtgatatggtaagaagcccgtatgaaagctgggtgccggaagcctttgattcagtcagtcgtgcggcagagcagggagatgaatggtacgaacaggtgccgccgttttaccgtgacctgatggtaaagatggacagtgtccatgatggtaaattaacggaagaggagataagacaggcgctggtggtgcgtgacccgctggtgaggcatgtggtgaacaggctggtggtcagacaccacagcgagtggtacagaggtcgtcccactgggaggtgggaaggattctacaaggatcttgacacagaggaaacggcatactgtgagaagtggcagacagatctggagtggatgagtaaggtgccgccgtttgataagggtgaggcggtgtggcattttcatccggtggtgtttttggatgcgttaaatgtatacgaaggtgagcgttgcaggggtttattctctaagatatcagatgtaatccttcgccatgaaggaggatatgtaaatgatcctgacgataaaggaggagagacaaatatggggattacgctggatacatggaaagtgtttgcaccgagtgatttaggcattcaggcaacatcgaagacacttaaggaaatgacaaaacagcaagccgaaacgatttattataatcattattggaacccaaagggcttttgcaaaatagaaaacacaaaaattgcattgatgatttatgactggacgattacatctggacttgctgtaaaacaaatcagaaagcttttaaatagtgagtatgattcaaggatgagtatcagcaatgagatgaatgatgatatgattcattgcattaataatatggatagtcaagagcagctattaaatagaattgctgatgttagaagggattattatcgttccttaactgttacaaatggagaacccaacacacaagtaaaatttttgaaaggttggcttgctcgcgttgatgattgtttagaggtgattgtatga

SEQ ID NO: 384098 - DNA, 384 bp, Salmonella enterica
atgagaaagttatgtctatccttgttctttatttcgtttacctccatggcttgcatgacaggacattgggagtcgatgaataagtcaagcacattctcaatcgatattaatcaatcaggagagcatatcagagggaagtattgttttatcacaaacaatggtaacagagtggactgtgtggaacaagatgatgcggacaatatcagtggtagtatcaaatctggtgtagctaaagttcagtatgaaagtacatttggtggtcaggggcgagccacgatagtgcttaaagacaaaaagatgatttatactatagatgataaaactccattcatacaggcgaatatgtcagtaccgaatgaaatccagctaacaagaacaagataa

SEQ ID NO: 384099 - DNA, 147 bp, Salmonella enterica
atgaaaatcagttaccccattagggataaagacggaaaagagtttcgttccctggatgagataatgcgtctggttgacgcagaagcacacggcacctggctattgggaggtgggacagggcgagagcatgaattgcatttttgttaa

SEQ ID NO: 384100 - DNA, 825 bp, Salmonella enterica
atgggaaaggtatcattattgttggcagtgtgtgtactaccattattttgtagtgcttcggatgcagtgaatgctgaatattctattttttcgatgtatagtgggactattggtaagagcaacattacaatgaatcttgttacttccggaaaccgtatttctggtagttatatatatgataaatataaaaataaaatcttgctaaacggagtagtgaattcgaattctgttgagttaaaagaaaaaacaaataatagtactgccgctataacgcttgttcatatcggtaaaggctatacgggtaagtggtgcgataaaaaatgtgttcctgtaacaattcagaccaataacacattcaaagacggcgggttgaaatatattaaagttgatgattctgatgcagtgttgtataaaataaatctagtgtttaaaaataaaaatgaagaaataattatttctgatgctatagacccaccgtctttagagtttgttgatattaatggcgatggcttttacgacttggtagtcagaacagatcaccgaccaaataatggtagtcagactgtttatatatcaggcaataatggatttatagaagataaagatttgtcaaaggaaaacggcactttcgtatataatccttataaaaagaacattgtttttaatttaaaagatgattgctgtaatactttcaataaagtcatttactatttttataatggcaaagcagagcgggttgataatatgttctttgactactcatctaacgaaggcaaagattctaaaggtggtgatatttcaaaggataaattcgagtcttactaa

SEQ ID NO: 384101 - DNA, 573 bp, Salmonella enterica
atgagaacctggaatttacttttagccgcaggggcaatgctgctacccggcgcgctgacctccgcctacgctgaaacggtgtgtacctcggtacttagcgtaaaaacgttaaattatggccggttagcccgcagtgacatcaccgcttcccgacaaatggaaaatggccaggccgatgcaataacgacaaaaaagacgttattaacggtaaactgctcgcaacccacgcgtctgcggctctattttgcgggaaaccacaacgaaaaggccctgttcagctttggccccgccgctgcttttcggatggcggcagaccacgccaacgttgatggtcaaaccgttcagcttcttagccaccctctggatgaatcggcaaaaataaccgacagcgcgatgcaacaatcgatcaaacccggaaaccaactgctttttatacaaaacggcgaaagcaaaggaacggcattttccgtgcgtctaaccgtccaacccctgctggcacacacgctattttccgtagcagataaaactgttttacagtcaacagtgaatattatcgccgaggctcaggactaa

SEQ ID NO: 384102 - DNA, 2427 bp, Salmonella enterica
atgcgtcaaccgctgttgctattgctgctgtggggcagttactgcaccagtgcagtctcagccgaagagattcaattcgataccgaaacgatgaagtctctgggattgagcgagcacattggcgactattttgccaaagaagcccgcttcctacccggcgttagcgcggttaacgttatcgttaacggtcacaacaaagggcgagtagaggtcctcttcaacgaacagggcaaactatgcgccaataatacgctattacgcaaagcgggaattaaagaccccgaagctcaccacgtcgaagaggagtgccgcgacctgcgcgtgagctacccaaccagcacaataacgctttttccaaatgaaagccgcattgaactactgttgccagatgaagcgctggaaatcacggacttgaacatcaacgaatcgcagcgaggcggcacggcggggttaattaactacacgctactttccagccgtagcgaatatagcgggcagcagtctgactactcacaagcaaccttaaataccggcattaacatcgctgactggatgctgcgcggtgggcatatctttacccgtatggacgggcgcaatgaggtcagccgaatctacgcttatgcgcaacgtagccttgtagatgctaaaacgctggtgcagttgggcgaaatcaataccaataacccattactttctggcgcggccatttatggcattcagttttcgcctgataatgatttaacgccgcagcaaaataatgtgcttgttaccggtatggcaaacaccgcacaggcaagggtggaaattcgccagcagggcacgcttatttacaccacgctggttccagcggggccttttgagttaacaaatgtaccggttgccagcaccagaagcgatcttcacgttaaagttaccgaaaccaacggtcagacgcgcaactacaccctgacagccgcgtcttttatgcagcaaagtagccaaccgcagggttacaccttttccatagggaaaacgaacaacacggcaggctatatcgcagaaccctggctggctacggggtcgggaggctggcgaattaaccgccacatcaccaacaacaccggttttctgttatcagaaaaatatcaggcgctggcgacgcagatagaaatgatgccgctggaaaatctccagctcgccgggcagctaaataccagccgcgatagctggcatcataatcaggggcaatcctggacactatcaggcgcttacaacgcgccgggcaatattagcccggcactttccgtttcccgttatacgccaggctaccgtgattttagcgatgcgctttctgaggaagacgatgttattcataccaaaggcgattataccgccagccttagctggtcacactctacgttgggcaacgtttctttcagctattcccatagcgagggttttacctcgcaggatgattcccgcaatatttcgctgaactggagtaaacatttttcatgggccaacgtttccgttaactggcaacatctgttgaacaactcgcgcgatcgccagtacgacaaaaatagtaataacgacatacgggatgacgacatgctttatgtgtatatcagcattccgctgggcgacaaaatgatcaatagctggatacagcgcaacggcgatcgtgagacgtatggttcttcgacaatgggaaatattaatgaaaatgtctcgtggaacgcctcggtcgaaagagatcagcaagaccagcaacatactcttaacggcggtttaagtgcgaatatgcactatacgcagatggacctgaacgccagcacctcaagtgatgattcacgcaactactctgccagcctgagtggcggcgtggcgctgcatcgtcatggtctgacttttgcgccgtattcactccaggagacgttcgccatcgtcacaaccgagcctgcgttatccggcgttaaaattaactctcagcaaggtgcagtatggaccgattttaccggcagggccgttattccggcactttctgcctggcaaccctcccgcgttgaaattgaaacggggtccttgcctaaaaacgtggatgtggataacggtctacagatcattaatcaggggcgcgggtccgttggcgcggtgactttcaaaacgctgacgcagcggcgcgtgctgctaaacgtgcgtttgccggatggcgcactgctaccaaaaggcgtggcgcttatggatgcggacggaaattatctgactaccagcgccgatgatggggtggtttttctgaataatgccaacagtaaaaatagtctttttgtccatgataccggcataaaagaagcgtgccgaattgattttgaactgacggaagagaccagcgcggatgttttttatgaaacgatggagatcgtctgcaagccaacggggaaacaatga

SEQ ID NO: 384103 - DNA, 702 bp, Salmonella enterica
atgttgaaaaggaatttcatctacggcgtttatctcgcctcgttaacattttcagcaaccagcttcgctaccggcatggtaccggaaacttccgtcctgctggttaatgaaagcaacggcgaagccagcatcagtgtaaaaaatacggattcccagcccgcgcttctctataccaacgtgctggatgtggcaggggaagataaaaacatcgcactgatcgtcactcagccagtggttagactggaagcaggaaaaagccaactggtgcgttttattttacaaaccaaaacgccgctaaccgttgagcatctgaaacgcgtaacctttgaaggcattccccccaaggaaaaaggcaaaaatcaggtctccatgaccattcgccagaatatcccggtgattattcatcctgcggggctggcagaagacgtggagccatggaagcgcttgcagtggcgtaaaaaaggcaaccaactggaagtggaaaaccccagctcctatattgtgcgcttatcgcaggaaatgcagggattacccggtaatgtcgctggtcaaattccgaaaacctggatacagcccggcgaaaaactcaccataagactggcagataacgcctcgctttctgcggtgacgcagataaaatttttccccgcttcccgctatggctatcagggaaatagctacacaaccgacctggcaaattaa

SEQ ID NO: 384104 - DNA, 726 bp, Salmonella enterica
atgaaaacaacccgttcagttttattttccgcccttgccttcagcgtgttgcttgtcagtcagccaggttggaccgaagaggggaactccacattagaagttactggaaccttaatgcctggtatttgcacaccacagcttgcggacggcggaattattgattatggcacaatctacggaatagggctgataagcacctccaatcagttgggagtgaaaaatatcgatctgaccattcattgcgacagcccaacgatggttgcgatctattctaccgataatcgtgtggatagtcaggcaaacgtcatcgttaaaaaatcatggaattccggtaatgatgcaacttcgaaagacaaaaagcgttatggccttggcaccacctccgggggtaaacccatcggcgctttcactattggtatcgatctcgaaaatgtgcaggttgacgatctccctgtgtctaactttcgtatgctatctacgacaaatattaatgctgctaatatttcatggagtccatcgtatgcagatgagctatgggagcacagttatcaaggttactggtatgcaattacgccaagttataacgaccgttttttccctatcccgttcaccaatgcaactatcccgttaattatcagcgccgcagtgacgaaatataaagacatggatactgaagaggaaattaatctcgatggtaacgtcacgttaagcatgatctatctctaa

SEQ ID NO: 384105 - DNA, 681 bp, Salmonella enterica
atgcgtaaattaatattcgtcatcgccctgacaggagcgatgattagcgtacagtcggcacatgctgatgagttaacaacggccctaatggtcaaaggaaagatcatccccggcagttgtacgccaaccctgagcgatggtgggaaaatagattacggaacgatttcaacgtttttattatttcatgactcgaatagtctgggggtgaaaaacatcactctgcatatatcctgtagcgcaaaagcttatgttggctttaccgcaacagataatcgtagtgatagcttgccggaacatattgaggtggttaatgtaaagaataacgatgactatcgtttatttgggttagggaaaacggcagaagataaagctattggtgcatttaccattgatgtagacacaatgaatttgaaggtggatggaaaaaagtatgatagaactgaaattctttattcaaccactggtacttcatggccctttaccaaaaatattcgcagttatactgataaagccccttatattgaagcgctgagtaatacatctggtggattagtgaaagactttaaggaagccgaaattcctttggttattaatacttccattgtcgacgcgcgagaactttcagtaaccgataaagttatgctcgatggtaatgttacctttagcattgtctatctgtaa

SEQ ID NO: 384106 - DNA, 738 bp, Salmonella enterica
gtggataatatcgcagaaaataagttaacaaaaaatttactactgtcaaccttattatgctgtcttcttaccacggcaagtaacgctatcgccgaaacggatcaggttacgctaaccgttgtaggtgaagttattccgggttcttgtacaccttcattagataacggaagtaaaattgattacggtagtttcgtgcgcactaccttaaccaaatcctctaaccagctaggcgttaaaaatattaatttaaacatttcctgttcggcaaatgcggttgtcgccctgtacgccaccgataatcgtaaaaccagtattgccgatggcattagcgttgaaacatcctgggtgggtaaaaaaacggttaccgataagaactcgttgtttggtttaggcacgacaaaggatggagaacagatcggggcgttttctttaggcatcgattacaacaagatggtttttgataccggaacaacgaaaacgctgataaaaaccgataatgtaaaagctgaccccgtcgtctggaaatctagctctgatggtgccatagtcgatcataattcaacggcgggtggctggattgccataacccccagtaccagttccagtacacccttctcttttaaaaccgccacgattcctcttattgtgagtgcggctgtcaaaaaatacagcgccatgactattacggaacccgtaaaaatcgacggtaacgtaacgttaagtatcgtctatttataa

SEQ ID NO: 384107 - DNA, 1053 bp, Salmonella enterica
atgaaaccgcaatattggcttttagctttactgaccagcgtcttttatgcgcatgcggccccaactggctactgcgtgccagacaatggcaaatatcataactatcttgacttttcacagtattttaccacctcggataatatggccgggacgacaacgcttattaatgtgcataacaacaatacctcgtttgaaggtacctgttattgtctgaccgggccgaatcagagttacgatcacacctatataaccagcgtcattaatccggcgctggcgccagcgggaaacagaaacaatgtcgcctattttaacctgaatgaatacgttgatatcggcttgcttgtttacatactcggtatcggttatacggctgtgccctttgatcatctgcctaataaaaccggtacgccctatcaatgccacgacggcgtgagttctaccaccacgttttttagcggcggctcggggcagatctatttgtacgttaaaaaacctttcaccggggtgatgacgattccagcgacggtggtagcgaatatttatgccacgatcgatccgcataccgtctcgaatgagattatttctgatgtgattgttcagggaacagtgacggttcctcaatcttgtgagattgaggagggacaggccattatttttgatttcaataaaatcctcgcgtcagagttttcgtcgacgaaagggaaagcgctgaccgatcgcaaaatcacgcgtaccgtgaatatcaaatgtaccaatatgatgttttacaattcgctgggcgcgaccctgcatgcctcagccgtggcttctgacagttcgatgattgcgacggacaacgaagacgtaggaattaaagtctacgataaatacaaccgggaagtgaatacgaatggcggtgccctcgaagcggaaaccactaaaattcccgacgttatgggggagacgctgggcacgctgacattttcaagcgcgcctgccagcgcgacaggagcgagacccaaacctggtcagttcaatgcaacggcaactctgacgattgaaattgctcattaa

SEQ ID NO: 384108 - DNA, 2478 bp, Salmonella enterica
atgttatccctggcgtcgctatgggtcagcggcacgcattccgggcacgctgctggtgaaacctttaactcacggttgttagaacttgaacatccggttgacgttgatatcagtcagtttagccgacccaataatctccctgaaggggattatcaggttgatatttatatcaacgagcgcttttttgagcgccgtgaggtccatttttttagaacaaacaacgagggcgcactccagccctgtttcagcgacttaaaaaatacgctggctacgtttggcataaaagtgaacgccataaaagcgctggctacggttaacgccagccgctgcgagcccgttccaccgctggcgggatccacatggattctggatgacgaaaagctcgcattaagggtttctattccgcagatttatatcgattcttcagcacgtgacgccattccgccttcacgttgggatcagggtattaatgccctgatggtgaattatgatttttcgaccacccagatgttgaaatcagactatgacagtgacgatctgtattatctgaacctgcgtagcggtattaactttggcagttggcgacttcgtaactacagcaccctcaatgcggtaaacagcaacggcagttatcattctgcgagtacttatttacaacgtgatattgccagcctgcgaagccagataatggtgggggatacctggacggcaaatgatctattcgatagcagccaggtccgcggcgtgcgcctgtatactgataatgacatgctgccggatagtctgaatggcttcgcacctgtcgtccggggcattgctaaaagtaatgccgtcgtcaccattcgtcaaaatggctacattatctatcagtcggctgttcctcaggggccttttgccctgaccgatctcaacaccaccagcagtgggggcgatctagacgttacgatcaaagaagaagacggtagtgagcagcattttacgcagccttatgcttccctggcgatattgcggcgtgaaggtcagacggactttgatatcagcattggcgaactgaacaacagcggtagctattcacctgacttattgcaggcgcagcttttacacggcatgcaagggggaatgacgctgtatggcggcacacagttggctgaaaattacacggcaatagcggctggtattggtcaggatctcggcgagatcggtgcgatatcgatggatgtcacccatgcgacttctcgttttgtcgatgacacggagcagggacaatcctggcgttttctctattccaaaacgttcgatgtaactgataccagcctgcgaatagtaggttatcgctattcaacggaaggattctacaccctggatgagtgggcttcccgccggagcgatagcgagacgttctggcaaacgggtaaccgcagaagccgcctggagggaacgtggacgcaaccttttgcgcaggggtatggaaatatttacctgacgctgagtcgggaacagtactggcaaacggataaagtggaacggctgatccagattggctacagcaatagctggaaacagataacgtggaatgcgtcatggaactataccgatgctgcgaattatcacgatggtgactgggagaagggtggcgaaaacgaacacgttttcatgctgtcactttcgcttccgctttcccagtggttaccgaacagctacgccaactataacgttactggcaacaataaaaaccgcgtttcccatcaggtgggcctgagcggaagggtgcttcagggcaataatttaaactggaacatacagcaatccgttgatgaaaatggcgacagtatgggcggtaatgcgggactggcctgggacgctgcatatggctccatgaaagggaattatgcctggagcaacgaagcccgaagtctcaattacggcgtcagcggcggtattttactgcattcagaaggtgtcaccttctcacaggagatgggagaaaccgtcgcgctggtgaaagcgcctggagcggcgggcctgacggtggaaaacagcagcggcatcgcaacggactggcgcggctacaccgtcaaaacgcagttatcaccctatgatgaaaaccgtattgcaattagcgacagcgactttgcctctggcaatgttgagctggaaaaaagcgtccagaatctggttcccacacgtggagcggtggtaaaagcggaatttgttacgcatatcggctaccgcattcttttcaacgttcatctcagcaatggcaagcctgcgccttttggggcaacgggatcggcagcgctggacaccggaagcgtcacgggcattgtcggagaagagggcgaactctatctttccggtatgccggaaaagggacaatttacgttgaccctaagcgacggcgtaacctgtcgcgcagaatacatgcttcaacaacagcctgacgctggactggtacagatgcctgtcatttgtcgataa

SEQ ID NO: 384109 - DNA, 684 bp, Salmonella enterica
atgcgcaggcgttttatcgacatttttattattctctttttggtcgtttttgcctctccctcctggggcggaattatcatcggtggcacgcgggttattttccccagcaataaaacagataccactatttctgtaattaacaaggatacttccctgccctatctgattcaggtatggattgatccttttttagccacagagaaaacgaaacctccatttacagttattcctcctgtttcaaggctggagccaaaacaggagcgcgtattgcgcattattaaaacaaaaggcgatttacccgtcgatcgggaatctgtattttggcttaatgtgaaaaatattcctcctacgccggacaaacagaacagcaagctggaaatcgcaattaaaacacgcattaagttattctggcgtcctgccagcatcactgaaaagcctgaaaccgcccgtctaaaagttatctggcgcaagcaaggcaataccctggtggtgaataatcctacggctattcatatcaacgttatcgatgtcgctgtagacggcaaaccgctggatttggcgatgattaagccctttgagacgctcaacattccattacccgctggtgtcgcgagtaagacgctcacctggcatagcatcaacgattatggctcgataagcgacgtcatcaaacaacccctttga

SEQ ID NO: 384110 - DNA, 525 bp, Salmonella enterica
atgaatggaaaactttttaaaagtgcattagtttgctcatctttacttttaggttggcaggctcatgcggcaaatggcaatggtattgtacactttacaggcgaaattattgacaacacctgtgaggtttctacgacaacaaaagatcaaaccgttgaccttggtaaagtcagtaaatccacatttactggtgtaggctcgacagcttccgtacaggctttccagatcgatctgattaattgccctgatacatataaaaaagccaccgctcgctttgatggtacagaagatggagacggttaccttaaactgaacgctggtggggcatcaggggtagccattgctatctacaaccgggctgacaacagcttgctgaagctctacaaccagtcagccagtgcagctatcggggctgatggtaaagcgacactgccgtttcttgctcgctatattgctacctctgcagccgtaacgtcgggtgtggcaaatgcggattctgaatttactatcacttacagtaattaa

SEQ ID NO: 384111 - DNA, 1710 bp, Salmonella enterica
atgattattggattcggaaataatgtcgtctcctcactggcggctgatattaccgccagccagacgaccattcaggtgatgcctggtgcgggagcgatgtttgctaatttgcttaccagcgattatgcgaacagctcaaaccctcttaaaacttacgccaaaattacactgacagacgcaaaagaaacggtttttgaggtatgccatctgacagcagttaataatgacatgctgacggttattcgcggtcaggaaggtacaacagcgaagggatggtcactgaatgacgttatagcgaattttgcgacgcgaggatctgaaaatcagtttgtacaaattgaagagctccagagtgggcattatgtcgctggtgtggccggaggtacagagaataatctgacgctggagttaccagcaacttatttcgtcaatggtggagttgactggacattgcgcactccacttgtggttattccggcgctaaacaataccggagccagcactctgcaactgacgatgggggggcgtgtgcttggcaaattcccactatacaaggggaataaagcagagttatcggccaatgatattattaaagatgctcctgtcttatgcgttctggataatacaaaaacctatttttctgtgcttaatcccctggagatttatttgggatcacggtatttgcagaaggaccagaacctgtccgacgtaccggataaggccaaaggtcggtccagtcttgagatctacagcaaaaccgaaagtgatgaaaactacatggctaaaagccagtgtggtgcggatatcccgaataagccgctgtttgtacaaaatatcggagcacttcctgccaacggtacggctgttgcagcgaacagactggcatcacgcggtgcgcttccggcactgactggtgcgacaagaggcagcgatagcggcctgataatgggcgaggtttacaacaatggctatccaacacaatacgggaatattttacgtctgaccggaaccggtgacggggagatattgatcggatggagcggggttaatggtgctcctgcgcctgcatatattcgcagccacagagataacgccgaggctgagtggtccgaatgggcaatgctctacaccacactaaacccgccaccggattcgcatccagtaggggcggcgattgcatggccgtctgatgctactccagccggttacgccctgatgcaggggcagtccttcgataaatctgcttacccgttactgggtatagcgtatccgtccggcgttattcctgacatgcgaggctggacaataaagggtaagcccatcagtggacgtgctgtactgtcgcaagaaatggacggcaacaaatcgcacagtcacaccgcgcgagcgcaggatactgacttagggacaaaatccacctcatcctttgattacggcacgaaatcgaccaatacaacgggcaaccatactcaccagttcggcggttatatcaactcatactggggagattccaatcacacttcatttcagcctggaggtggtgcgtggacacaggccgctggcgaccatgcgcatacagtttatatcggaggacacgagcacaccatgtatatcggtccacacggacacgtcgttattgtggacgcagacggtaatgcggaaaccacggttaaaaacattgcatttaactatattgtgaggctggcgtga

SEQ ID NO: 384112 - DNA, 825 bp, Salmonella enterica
gtgattaaattaattctttcagcacccgtgccggcaatggccgcggcttttgaacattcctttcagaataccgaaaatgtggaaattatccccggaccgtttgaaaccatcactgagtttgactgcatggtcagtgcggcgaactctttcggtttgatggatggcggcgtggatgctgcgataacagcatattttgggccgcagttacaggaacgtgtacagcaaaatatcatccgtgaatatctgggagaacagcctgtcggcagcgcctttgttattgaaacgggtaacagtaaacatccgtggttggttcacgctccgacgatgcgcgttccgctgataatcgacggcaccgatgcggtttataacgcaacacgggcagcgttactggcaatttttcagcacaataaaagcgccggggaaggccggaaaatcaaatcggttgtgttccctgcgatgggggccgggtgtggtaaggtatcaccggatagtgtcgcccggcaaatgaggctggcgtgggatggttttattaactgcgccacggaaattaactggcaatacgccagcgcccgccagaatgctgtattcagcacaacggcatactgtccgtcaaagacgctttgcccgaacgccagaacggaatatatcggttttggtgattacagaacgtattgcaaaaaatcaggtaacacctgcatcagtccccgtcatcaggttgatgatatttatattggtgcgcatagccatgctgtttcccccggtacttatccccacagccatcacctgaatacagaatatttatccggagtaaaaaatgacgtttaa

SEQ ID NO: 384113 - DNA, 543 bp, Salmonella enterica
atgctgttcacgttgtcaggctgcaatagaatttcttacccgtgcgccgcccggcaggctgatgtactcgctttgcgctggatgcagatatctgataaggggatttttatcctgcaaagaaagaccgggaaaaaacagattaaagtctggatacccgaccttcagcaagcgctgaaaacagcacaaacagaatgtccaaaactgtcacctgacgcactggtactctacaacaacgatcgtggtcagttcatccgcaaaacgttcaataatcgctggttaaaagctgtacgcgccgcacaaagtaaaccgggccgacaactggattacacgttccacgatatcaaggcaaaagctatttcagattttgagggtagtagctgggataagcagattttcagcagccacaaaacagaaagccaggggcttatctacgacaggaaagtacaaattagccgacacgggatcatccgtttattggggaaaggtgaatttttatttccccggcatttattgctatttttttctttatctggttgtcgataa

SEQ ID NO: 384114 - DNA, 288 bp, Salmonella enterica
atgaacatcattactgtgccacagggcatgtccctgtatccgggactagccccccactcagttctgaatattcggatgcaactcggtatgtcacgtatttcccttcactacaggcaaatccttaacttctttgctccggtgctggtcattaactgcttcagcgaccgcggcaaactttaccccctccggtatcctcttcccccggacaccgcacaacgaacggagcgccgcgtttccttgctgctccatctgttgcgtgaaagactgacggacgacgtgcccgcatga

SEQ ID NO: 384115 - DNA, 441 bp, Salmonella enterica
atgattaaagcccggcaacactggctctggtacgcctacaacaccaaaacaggcggtatttttatccagcaaggagaccggaaaaaacagattaaggtctggacaccccgccttcagcaagcgctgaaaacagcgcaggcagaatgtccaatattgacacctgacgcgctggttctctacaacaacggtcagggtcagtttatccgcaagtcgttcaatactcgctggttaaaagctgtacgcgccgcacaaagtgaaccgggccgacaactggattacacatttcacgatctcaaagcaaaagctatttcagattttgagggtagtaacagggataagcagattttcagcggccacaaaacagaaagtcaggtgcttatctacgacaggaaggcacaaatcagcccaacatggaatcgtccggttattgggaaaagatga

SEQ ID NO: 384116 - DNA, 2154 bp, Salmonella enterica
atgtctattaaaaataccgctaaattaatggctaatggcacttccgatccaaacgattctcagggatgggatgctactgacactaccaccttattaacacttatcagcgaagtgcagaccggtaaccacgctccctggattgctccggggaccaacggtcttgtgacattcatcgttcaggactacgccccaggtgaagctggagccagcatccattttaccgctcccacgggcaccacgctcgtcgatgccagcattccgggtctgagcgccagctattataccttcacacggtccgatgattatctcactggtaatcttacgttgaaaaagagcatcggcacgtggggcagttgtgaactgacgttggcagttgacggcaatacggcggcaggggcgtacctgagtgatgggatagcccaatatttcacaccgaatggccagcaaatgggggatgcctctgctatttcggtcatcgcagccacgataacaattacagaggagctggatgaccagcatattccctggattttcccgggcacgtccggcacggtaacgttcagtgttgtagctgacgctcctgacggaactggctcttacctttattttaccgccccgacttatactgatcctgctacccacgtaataagtcataatgccactatcaccggcgtgaccttcagtgacccggctctcaagggcaaatgcacatttacttccgagaataacggactcaatgcccgtctgactcttattacggatgatgtcctctggagtgactgtattgttaccctggctgttgacagcagtatgccaaagttcgctactctgaataacggtaaagttcagtatttcagctctgacagtcagcaggtaggggacgctgcgcctgtcacagtcatcgcagccagcagcaaccactgggacaacgtcgcgtccgttaaatcatgctttatcggtatgcagtctgatgatacaagcagaacgaacaaagggacattgtttatgaatggagaaaatggagaaaacaataccttttctgcacatagcatccctgtgtttgtaggcataacgtttaagcggttcagtgacgatttcgacggacctacagaggatgaggtaagaaccgcgatatctttggtcggcctcgccagtgatggacaaaccattattaatatatccgacgatttttcccttaccaacaacatggattaccggaacgcatattataaaacaactgtttcatcttcggattttgagtcaccactggagaacggagcatatgaatatgaacttaatcttggtgcctggtgtccgaaatattataacgatatacttcctggtaatattattgtgtatctgcatctggaagcacaactatcagccggcatttacaaatatacctctaacggtgaaacacccgctaatttgaccattaattttctggcccggaaaaaataccagtattctgaaaaccccgggaatagctcatatgtcctggtaaaaaaagaaacagcgtcaaattctctaagatttactgaaaatggtgaggtgagaaaagtcgggagcactcatgaaaaatcaatttatcgaattgttatcgattctactccggatcaattaaaatatgtatttaaatttaaaaagctaatgtggctgagattttcatctccgtcaccatctcatcaatactcaatgtacggcgaggctattcattctgtatatattaaaggaatgagcatttcgggtaaggcacagtggaccaattatggtcaacatatgctactccctgactataatttttccggttaccaggatcttatgagtagtcgctttattaattcatcatactatataggtatggtcggtacgcatgaggcgcatggatgggcatgtgcaggttcacttaacgttaccggaaatggtatcaccattaatcctggagaaattgcatttgccgcattgtcgatcgattttgaaagttcgagtgaaggtgttgtctgggatgcaaacaatcataaggacagttcgggtaattcgcctatctgtttagtagataattttggtaaccacgtttatatggttcctgactttaacgccagtactgactccaatggttcaacaagtatgtctgtaacggttgaagataaataa

SEQ ID NO: 384117 - DNA, 4209 bp, Salmonella enterica
atgagcctgaattactatactcaaacccctaattttatcagcgcctcctccgatgatatcgatccccgaacacgtctgtttagttttaatcattccctgacgaccctggttggcaattatgatatgggaccctcgctggatctgacactgacctattcgcccacgacaaccgataatatctgggggatgggaaccggcatgatgtttaccctcacctggtatgataaaaatgccaggacgctttatttgaactccggcgaaacctatagaattgatgagtccacagacggcagcgggacagtctattttaacatgctgcaatgtaaaattaagacttttaacgttgaaaaaatcgacaacggtacgggcgagatttggtatcgcgttaccgatcgtgacggtaacatcacagaactgtatgaacaggacaccggatattttttgccggtaacgttgtggtccccccttggccatagcatgaccctgtcatggacgcgggacccggacacgggccatctctatttgtcgcaggtgaccgatgaaaccacggatgaagccacacagcgtccgagagttttattttcggcggtttatagttcagggctgatcatgaccctgctgcctggaacggacagcgaacaaactttcacactgaataccagcggcggctacctgaaatccatgacgaactcggcactgaccgattcggcgaccccgcctgttcaggttccctggacatttacgtactgtaatgatgcggagatcggctcttccgggttgcgccctctggtctccatcactatgcctaccgggctggttaaatcagtgaagtacgacatggaagcgatggcgttcccggatgtcccgaatgctcctcaatatcgcctaccggctgtcaaatcgctgaccatcagtccagggttgggctcgccggatatcgtcactgaatggtcattcagcaccagtgacgaacagagcaatgaagcaccttctaaaaactacctcgggtatggcggtgatacagccggagttgcgtggtcagataatactgatgccagctacagtatacaggagcccgattatatctatcagagtgtttccacacagcgggctgttgatggcagtgataacgatctgataactatttaccaatataataactatcatttgctggtctccactgttactacgcaggatagtgcgcacgtatacacggtggaaacagcctggtatgccgataccacgaaaacttttgatgaacagccagccaattttcagtgcccgaaactgcagaccgaaacctggagtagtccgtcaggcagtcactcccgttatacggggtatcagtatgatgactacggtaaccagactcagttggtaagtctggcggacagccagggactggtcacttccaacagtacgctgacggaatatgaatattactctccggcaggtgaagacgaaagcgaagataaaaccaccggttgtccggcggatccgtatgggtttgtgcgccggccaaaagtcaccaaagtcaccccccctaaggtcaatggttataacgatgtgccagtcagaacaacccgttaccgttacgtttctatgaccacgctggccggtgcattttattccattgtcgtgatgccggtacaggatacgtattatggttcagatgtcccgacggatacccatacgctgctgagccgggtgaaggcgtatgaaacggatgaaacatccccgcactatggccgacagattaaacagactaccaatgtctacaatcctgaatacgatacggcaaaaccggacagtattgaatattacacccagacgctggatacagcctggcgctttgatcaggacgacaacggactgattcgggcggacaccctgacatcgcatgatgaactgagcgtggttgcgtcatcctcacactcatacctgaccggtaagctacagtcagtcacggatattctggggaacacaacgacgctgtcttatgatcctcttggccgcctgaaaatgaaaatccacaccccgggcactgactatgaaacctggcattaccatgaatattcgctgcaagggcatactgatacagcaacaggatggtatgtagtcgatgccatcatcactacccggacagataatgccggcaacaaaacacagatttatcacgacggcatgggacgccccgtcgcgcacaaggataatgccagtgatatcagtctgccggatgatttctatcagaccggtgcaactggctgggatggctggggacgtcggttcagtactacccggcaggactggactgcgtcgttctataccgacccggatgattcctcctacaaaccggatcccgactccccggatgtcaatattatgtatcaggcccagtttgacccctgggggcagcacaacctgtctgtgcctgtctccatgggggttccgctggggatgcagtacgcttcggaccaggacccggtcaccctgactgtggtgaatgagttgcaggtgcccagcaatacattgctgttaggtcgtcagaaaacacagcaggacgaaactctgatgaccgagaccctgataaccgaatcaaagcagcagacggcgggagacaacagtacaaggacggtatatagcaccaccgtcaatgaatacgatgggctgggacgcctgcgtaaaacgatctacccgcaaccaaatgctactacgcttccgtccgatactgatacggcaggctgggtgagcaccagctacacctacgatgtctttgatcgggtgagtaccaccacgcagtgggatgtcagcgataaggcgggaacaactcagccggcgacggttgcaatccagtcatggacatatgcaccgtttgcgtatgctcatctgccggtcaccgtttccgtccggaaaacgaaaaatgacccggacgtggtgatggggacgcagacctttgacggattggggcgactgaaggagagcgtctgtggcggtcggttacagagagctgagtactccggtgcaaatatggtgcctgattacacctgggacgcggccgggcagaagctgatctatagctatatccccgaactgaataacgccctgaataccatgaacaacgagacaagcagtctgagtcaaacgtttaattatttcaagaagccgacagtctctggtgctgctgataataccgggcggcttgagtctgcggctgaaaacggcagccggagtaataccttcacctggcttccgtcaggcagccccgaggcgcaggattttatatcaccatccggaactgtccgtaacacaggcaatacgtggagcctgttgggtgaaccacagacgcagaccgatgttgcgggtaacccgcttacgctggattattacagtgacgggaagctgcagacactgacggacccgctggtgacggtgactgtctattatgacgaggccgggcggctatacaaacagaacgtggaacaaaacccacactttggttccgatgagttaaccaccacactgaagctggatgattatggacgtgaaattcagcgagatatcgcaccgaacacgggggagccgttaactattgccaccacttacaccctgaatgggcaggtgcaaaatcggcttactacccaggggaatactaccctgcgaaatgaaaccttcacctacgacgtgcgcaaccggatgaccgattacgtctgtaccggcagcgctccggtgcaggatgcatacgggcatgcggtgagtgaactgcactttactttggatgtgtacaacaatattacccactgccagacggttctggccgataacgagggaacggacgaggctgaatacacgtccaacccggatgacccgtgccagttgatgacggtcacacacacgctgagcagccattaccctgccagcatcatgctggcctatgacgataacggacgcatgacgactgatgaagcaggccggactctgacatacgatgacgccggtcgcctgattagcgtcaccggagaggagggcaacagccagtatgcctatgatgcgttcaacactctggtgacacagagcctgagtggcgatactcgtgaactgtactacgccggtagccgcctgctgagcgaagtacacgtggaacagaaccagatcacccgaaatattcccggctgctggggtacctcagctgtcagcgatgagtctctgtga

SEQ ID NO: 384118 - DNA, 1188 bp, Salmonella enterica
atgactttacagttaattggcactaacaggagtggttccccggcggtttcgctgtctgggggcaacagcagcaactttgcctggagtccctttgggggcggcgcgaggcgtaagggaaatgcaacatccctgccggggtttaacggcgagcgccaggacccgctgtccggggtgacgcatctgggcaacggctaccgggcttacagcccggccctgcgacgcttcacctgcccggacagtgcaagtccgtttggtattggggggattaacccctacgtgtactgtgaccacgacccgatcaacaaaactgaccccagcggacacggcccgattacctggctgatacgtaagataatcacactagcggtgcggctgggcatagcctcagcagaaaccgcagacagtatggcatcagggttggtcacggcaggaaccgtggagacaggaactgcgctggcaacacagattgcaacaggagtagcccagtcgatagcgcgggccagaggaaataccgtggcggcctctaaacttggctgggtcacgttgggtatggggatagctggcggtctggggctgggggagggtgatattggccgaacgttaaaacaactgcgcggggcggcaaaaagttacaggctcacgaaagaggcatcatccgaagtatccactctgtttgaggcggaaggaggcttcaaaaaaataggggatgacgtaacggaagtgcaggaaagtcttatggaagagggcggtcacagggagccacggcactcccgctcctcagttcgggaatcgactacagataacgatctggttagtaacgcagagtcctctttgtcagaccgtaacggggacgtgatacaaggccggtcaggtgagcctggctcggctatagaccaggctgatgaacttgaaaatgtgcggggattacgatcaggttctggtaccagtgagactgagatggcgcagttaccagagcatattgtgcaggcacatggccgacagcacgaaaccagattgcccagcggcggcgtttttgaccccggtgaaataagttcttttagccgcagtagtggtcgttacgctccggataaagaattgaaggcaggcacggtcggttcgtgggccaggcaacccccttcaggagtgaagttaagaccgggcgcatcccgttatatttacgtagtctga

SEQ ID NO: 384119 - DNA, 1155 bp, Salmonella enterica
atgaccttacagataaccggtaataacatgaacggttctccggaactttctctggccaggggcaaaagtaccacccttgcctggagccccttcgggggcggtgcaatgcgcacaggaaatgtggctttactgccagggtttaacggcgagcgccaggacccgctgtccggggtaacgcatttgggcaacggctaccgggcgtacagcccggccctgcgccgttttacttgtccggacagtgaaagtccctttggggcagggggaataaacccgtatgtgtactgtgaccatgacccggtcaacaacatcgaccccagcggtcatgccccgatttccgagcggatacgcaaggtagcttcacagtttgaacgtcaggaaatgaaaactgcggaagagtcaatgtcgtcggccgtagccacggtaggttcggtgagctccgggacagaacttgctgctcagggggctaccggcgtaagccagaccattacccgggcgagagggaatacagagacggcccagaatttgggctgggcttcgctagggacgggagtggcgggtggaatggggctggctgaaggggataaccagcaggtggtgaatcgcttaagtaagggatggataaatcgtcgtaagaggacttacacattatcatcatatccgccttctcattcatttgatactttcgatttatatcaatcgcctaataaccctaataagagagtgataataactgcacatggtatgcaaacactgcgcggtaaaagtgcataccttccaaagggggtgagtttccgatattacagtagtgatggaaatgctctgtacgatcctgggcttatgcgtatggccttgggtcccgaatacaatacgccaagagaaacgctaaacggtccggggagaatacgtaactaccagcttgaacgatatccccacgatactccacaggaaatcacgaaggtagtgaatacaatggaggttgatattattgcaataaccaaaaatacatcattaagacatgtgttaaaagttttggatcaaaataatttaaactactccgttatagaagggtgtttttgtcgctcttcactaaaagctagtattctggattttttgaaaatagctgaggtgccagtgcagtctgttgagagacattaa

SEQ ID NO: 384120 - DNA, 960 bp, Salmonella enterica
atgttcagaatttttatgctattttttgttttttttggtggttcatttatgatttttacagccagagctgcagatggttgtgaatttgttgggggagatgtatatcttggtgtgcctcaaatgtctatccctgccgatacaccggatggtaccgtcttatatacatcatcaaaaatgaccaagaaattgagttgtcatttggataatagcgcttacgcttattatgtgaatttagcaacaactgccgatttcaatgcatttcagcgacttaaaaacggcataaaatttacgctatatattgacggagtagcttatgatagggagatgactaacagtgttggaattataggttctggtgtaaatatgtcctttagcaaaaatgtatctatttggttcgacattagggtggatagcagtagaggaaagattcctgtttcaggaacatacttgcctggaggattccaaagtgtctttcttatgttaggaaccagatacgatcttcaaagagggttgattggactctctacacctaatataacctatattccctgtactatggatatatctgtgagtcccgaaacaattgactttggggtaataaaaagtagcgatttagaaaaaggtataaaattccagcgaagatttacgaccttaatccaaaaaagcaaagcatgtaccattgctgccagtgccccttttggtattaacatgttttttgaacctaccgcttcaaccctgaatgccgatggttcattaaatcttaataatggactggggctgtctatttcagatacatcagggaaatatgtaccgtataataccgaatggaagatagatgatgtgagagtagaatctatattggaaaatcatttcactgctaatctgcagaaaatttctggtcaggatctaaaaactggtccattcagtgcagatgtggtggtgagaataaattattactaa

SEQ ID NO: 384121 - DNA, 732 bp, Salmonella enterica
gtgttatctaatcgcggttatgtatttttagcatcgttcgctgtcagtatctcactgctgaacggtaatattgcaaatgcggcagtcaatgttgatcgcaccagaataatcatggggggagaagataaatcaatcgcagtcacgttaaccaatcagagcaagagtcagccctacctggctcagtcgtggatcgatgatgccagtggtaagcgctctgagacctatttactggcgttaccgcctttacagcgtattgacgccggtaagaaaacacaggtcaggatcatggcattaccgggaactgccacactcgcaaaagacagggagacgttattctactttaatgtcagagaaatcccaccgaaaagcgacaaggaaaatgtgctgcaaatcgccttacaaagtcgtcttaaactcttctatcgcccggaaggtataaagaaaaaagccaatgatcggtcggaagaaaaggttacggtaatacgtcagaatggcaatttagtcctaaataacccaacgccatactttattacgctgggttatctgggtaatgataataaaggtaatttcccgggatttgacagcctgatgctggcgcctttctcatcgcaggattttcatgctaaatggcagggtgacacattacgtgttgggtatattgatgattttggcgggctgcatatcaatcagtaccattgtgtcggaacgttatgcagcctgaaagataaatag

SEQ ID NO: 384122 - DNA, 2472 bp, Salmonella enterica
atgagtattaaaccttcatatctcgcattgctgttggcaatttatttccctgtggtgaatgctcgtaatgttgagtttaatactcatcttttagatactgagaatcgaaataatgtagatttgtctgcatattctcgggaggggtacgttgcacctggagaatatatcctcgatattattctaaatggtaaaacgattaaagagcagcaaatagttaatttttatctgaatagcgataaaagtaatagctttgcctgtctcacaccgtcattgattgatatgatggccctaaaaaatgaagtcaaagataacctgtcattttacccaggaacgcagtgtgtcaatcttactgcacctgaccgcagtgtcgtttattctcctgataaccagactttatctgttacagtgccgcaggctgacctactgtatcaggatgatgagtggtctccaccggcccagtgggataatggagttaacggttttatttttgactataacctgctgaccagtcgttatatgcctaatcagggtgacgtaagcagcaattacagtttatatggtacgtcaggattaaatcttggcgcctggcgtttacggtcagattaccagtacaacaatacccggggaagaggctacaatcagtcttcatttacgctgcctcaaacctatctctttcgccccattccttcactgcagtccagactcgtgatggggcaaacgtatctgaactccgacatttttgattcgttccgctttgccggagtatcgcttgccagcgatgagcgtatgttacctccatcgttacggggttatgcgccacagataaccggtattgcacaaactcacgctcaggttaccgtatcgcaaaacggacgtattctctggcagtcacaggtgccgccgggtccctttgttgttcccggattaagtcaaacggttcggggaaatctcgatgttaccgtccgggaagataatggacaggttcgtacctggcaggtcaataccgccagtgttccgtttcttgcccgtaagggaaacgtgcgtttcaaaacggctataggaaaaccgttaacctgggcgagtaacagccataccgtcgagccgctgttttcttccggtgagataacgtggggagcattcaataacacctctttgtatggcggctttattgccagtgatggccgctatcgttcgctggcactgggtatcggcgaaaatatgggcgttcttggtgccgcatcatttgatgtcacacaatctgtggcccaggtgaacaaccagcctgagcagacggggtacagctaccgttttaactatgctaagacctttgacaaaacgggcagtaccatcgcgtttgccggctatcgtttttcagaaaaaagctttatgtcaatgagccagtacattgaccgtacaaatgactatggttcgtcactggcagaaaagcagaactatatccttacgttcaatcagtccatcagttcactggggcttaatgtgctcttcgccatgagtcatcagaactactggaacagtagtgcaagtgaaaactacaccgtatctttgaataaaatatttaacatcgggccgttccagggagcaagtgcctccctgtctttggggcggaatcgttctttacttaatgaacaggataatcaggtttatctctcgctaaccctgccatggagctcgcaacgacaggtcagctacagtatgcagcacgacagtaatggacgtatgaaccagacggcaacgctgtataaccggccatcagataaaacctcctggagtctgggggtgggtcagcaacgtgatgatagtcaggaaggcatgttactaaacggtaacattcagacaataacgccgtatggtcagggcaatgcaaacctcagcatgctgagtcagcagtataagaatcttggactcagctggtatggctcattcacggcgacgcgttatggggcggcctttcaccagaatatggctgaaaacgagccgcgactgatgatagataccggggatgtggcgggagtgcctgttaataatgataacggtattaccaaccgtttcggtattgccgtggtacctgcaggttcaagttatgagcgttcagatattacagtcgatattaccgccctgccttcggatatcaacatatcagggaatgtcatcagcaaggtgctgactgaaggcgccatcgggtataagaaaattgctgcaacgaaaggggagcagttgatagggacaatccgactggctgatggttcgttcccgcctctcggcacgcaggtaagaggtcataaagataaagttctgggaattatcggagaccagggttttacctatctttccggtatcagtgatgaagatcggcatgatgccaaagtcgtctggtcgcaggggcagtgtgcgttacagcttcctgacaccgctgatctaacatcaggcgtattactattgccctgccattaa

SEQ ID NO: 384123 - DNA, 588 bp, Salmonella enterica
atgaaagcaaataaatttattttatcagtagtcattgctggcggcatgacaggtagtgcgatagctgctgcaccaacaggcgccgattttggtcacggtactctgcactttacggggagcgtgattaactctccatgtagtatcgcccctggggacgaggatattgatattccgttgggtcaggttgccaacaaagttttggaagccggtgctggttattctctcacgcagccaatcactattcatctgcaaaactgtgatcttactgcgcaatcaggtattacaagcggttccggaacggtagattatcctgcattttctaaagtatctgttcagtttgcgggttctgcagatgccaaaaatgcagacttatatgccaacactggtacagcacaaggagtgggtattcgtttgatggataccatggcaggtaatgtaccgctgatggctaatgctgcctcagcggaacatggtctgacatctggtgacaatacgctgaagtttggtgcgcgtcttgagaaaaatggtgatgctgttgcgacagggacagttgctgctgatgtcacttatgcaatgaattacaaataa

SEQ ID NO: 384124 - DNA, 1629 bp, Salmonella enterica
atggctatatcactaaaaatgtcactcatttcggcctgcattctcacctcaaccaccatttgcgcattaccaacaatcgccgcagataaagataatgtaacattatattcagtacaacgaggtgacccaagcctcaaagctcatggtaagtatatagatcaaatgatctcagattttatgaataaaaatgagcttcctgggttatcgatggcaatcgtacaggcgccatatattccgagagccgctggatacggtttggcgacattaaccaatgatgagctggcatcaataaaaactatatggaacgtcggcccaataactcaaggattcacggctgttgctgtctttcagctagttgagatgggtaagctaaacattaatgatgctgtttcaaaatatattaaaaacctaccttcaagctggcaggatattacaatccttcagttgctacagcattcttcaggcattcctgacttccggagtcatggatttaacgcgtctaaaaattactcccccgatatgttgcttgatctggtgaaatcgattccacttaacttcaagcctggtacagcggttaaggatagtgcaacagattttatcattctgggtaaagtcattgagcaagcgagtggaatgtcgtatgaagaattcatcaaaaaatatcagatcgaaccattgaatttaaaaagtacaatgttctttgatgatatgcagaaaaaagctcacttagaccgtcctacaccaactaaggaacataaccagcactcaatattcaagtcacaatcagtttacattgatccaacggagccagctacagggtataaagtagttaatgggaaacgggtgcctgtaaaagctgatgagtcacaaaatatgtatgcatatggtggactctggtcatcagccgaagatataagccgatgggatatcgcactggctggaagtgtcctggttaaagaccctgcacatcgtgacataatttataaaccagctaagttgaaaaatggtactgtcgtaccagcaatggctggatgggagtttacccatcatcccggattcatggaaataaaaggaagcaacggaggtttcagtgcttatttgagccgtttcacagcaggtgatgagttggtttgtgtcactttaataacaaataaagaaaatgttgacctcactactctggcccgagacattgctgaagcttacaaaacaggtcttggttcaggattagatcctgaaaaagtcatcactcaggaaagcaaatttagtgtagatgaaactgtaaacagacttaaagagcagcttacagctaaaaaaatccctgtatttgcccagtttgatcatgatgaaaatgccaagtctaccgaaatgaagttaagaccaacaaaagtattagtatttggtaatcctgcagttggtacaaaactcatgcttgataaacaagctgttgcactggatctgcctttacgtattgccgtctggcaggatgctcgtggtcgggtctggactggatacgaaaacctggatcgattatctcaggattatggaataacagatacagaaacgctgaataaaatttccagattcatgcaggagttaaccagtagcgcagacaacgtatataaatactga

SEQ ID NO: 384125 - DNA, 867 bp, Salmonella enterica
atgaaagcaagtgaagtgatggtatcggtaaaacgatggttcagcctgcgcaattatgatgttttacaggagataacggttaatgacctgagcgatgaaatcaaccggcgagcttcactgctacgatatgattttgattacgggaatgatacccgtcgcctgcgatgtctggagtatgaagcccggatactggcgggcaatccccttctggtcagttccacgacaaaagcaccaacggcccggaaaatcaatcctctcactgatgccagtcttcatgtccggcatatcacggtcggtgatattggtcgttatgaagcccggctgcgtgaactggatatactccggcgcggtgatggctcgtcaggacccgtatcgaaagaggatggcagacgcaggctgactgatattgatgagctgaacgccgatcacccgctgtatctgtggctgaatatcgccttgctgactgatgaggaagtggtggagcatgtgaaaagaatgcttccccggtggcgaaaagagtatggcactggcgaaccggcgattaacacgttccggtttgggctcagtacggtgaaaaagctgatccacttaaggattatcccgatgctggatctgatgctgtgggaaaagcgcaatgatggtcggatctcgtatgaacagatgtcgaggctgctctatcccgatgactcgaacgtaatcaggggaggcgctcagattaaggatactgacaggccgcttgctgaaagggcactgacgcgtgaatttgaccgtctgtttaacctctggctgagcaaaaatgactaccttatggacacgaaaatcgctgatgtgatgaagatggatgagcaggaagaagaggaaaagtag

SEQ ID NO: 384126 - DNA, 333 bp, Salmonella enterica
atggtttctcgtttcgttcctgatgctggtgatttgatttggttagattttgatccggtagtggggcatgaacagggaggacatcgccccgctgttgttcttagcccattcccttataataacctgaccggaatgtgcttatgtgttccctgcacaacccaaagaaaagggtatagctttgaggccgaactatcaggagatcgcgaaagcgtggctcttgccgatcaggttacttgtgtagactggcgcaaccgtaaggcaacaaagaaaggcaaaataacagccgatgagttagaactcatcagagcaaaagccaaggctttaattggttaa

SEQ ID NO: 384127 - DNA, 252 bp, Salmonella enterica
atgatagatgtacccgtaaaaaaatgggggaattcacctgcaatccgtctttcctcatctgtcatgcaggcatttgatatgacttttaacgatagctttgacatggaaatcagggaaacagagattgcgcttatccctaagaaaaagcccaaatatcagtttacgctggatgaattactggaagggatgacgcctgaaaacgtccatgagaagatcgatttcggctctccggtcggtaaggaattactctaa

SEQ ID NO: 384128 - DNA, 210 bp, Salmonella enterica
atgaaaaacaacacaacgaagagatttatccgcgtcccggaagtattaagacgagtgggctttggtcgaaccaagctgtacgagcttatccggcagggtcgttttcctgagcaggtgaagatagggccgaggacggttgcttttgtcgaaagcgagatagatgaatggattgaaaccacgattcggaactcacgccagaacgctgcataa

SEQ ID NO: 384129 - DNA, 291 bp, Salmonella enterica
atgaaaatagaacttaatacgacagagcagtttattagtgaagccgaatgtttgtataaccattatatggataagcggctacgaaaccagcctgtgcatttttaccacctactgaagaataaggaagatatgaacgaactgattgaaaatattatcaagaaaacaaagagccgtttttatgggactgaaggtgaacaagaagtagaacggatctccgggaatgttaactatgcgaaagtaaagcaacaccttcgtcagctttggattgtctataagtgtgtatatcgctga

SEQ ID NO: 384130 - DNA, 933 bp, Salmonella enterica
atggaatggagatttttaggctctttatcagatgctaggagggctggctgtagcggagtttatcttattgttcatcaagggctttttaatcgtgttgtttatgttggggtgagttgtaatgtagggagaaggattaatgaacattatgaaggctacctgagaggaaaccgaacaatttataatgcaggccacaatgatgacgtgtatcgtcttatgtcaacttacaagattcgaaaccatataaaatactatcaatccttagcaagggattatgaaatatggggttcaactacactgcattttgatacacctaagaatattttagcaaagaaccaaacttttgatgccacatgggagagtattgcatttgaaaagtatatccctcaactggtagtgtgggcccttccaatggccaattactgttattcaaatgcaactaaaattgaaagtgtaatccagtcaaagctcattaaatcttttgatttaagtggtttttttaatgctaaatacgtaagcattttgggtaaaattgaaaagccttatttaaaaaaggttaaatgtcttattattgacgttcctgatgtagactcggcatccaaacttatttttagcaatttatattctaaaaaaattgatgaaaacttttgcagagagttccattcacagtttgaaagtgaaatttctcagagggaaaaaggaattcagagaaggcaagagattaggaaccataaaatttctctccatgaaaattatggcaaaccttggactttaaaggaaatggagaaactaagagttatgttggtagattttgatatgtccccaacagaaatatctgattaccttggaaggggacctcgctctatttcaaaaaaaataatcgaaaatgataaaattactaaccataagtggcgagagagcgtcggatggttgtga

SEQ ID NO: 384131 - DNA, 783 bp, Salmonella enterica
atgattgcaagctggtttgtctgccggataaaaagtcgttacccactctattttgttgcgttgctgttaatcattggcgtggtctgtttcttctacgtaaatgacccatctgaagtcatcaggcttatcatagggcagtttttgatgagttttggcgtggggataatgacactgttagtccccatgctgcttttcagcgctatcggcagtacacagacatttgttattttatttagcctctgtttattgttcaaatttatcatcgctaactacctgcttatatttatatactccatcccccatgagtatatatcgaccatcacaattacattatcgattatcgcactcttatttctgttaccgctccaaaaagaacttttctatgttgcgccgccaaaaaaaaactcatcaacccagcgaccggaatgcgcagaacccgttgtcgtcgcattattggcctttttcattccattttatattatttattggttcgtcagaattcaccgggaaatgcagtttgtaacgccttcgccccgactcatgaccgcatgtggcgcgggatggctgtcaacacttatgccgtttagcacagcaatattgtgtctggcgcttagcgacgaaatccgaacattgctggcgaataaaaacgaagataccggtatacagagcggctgggcgctattctgggccttgctgttcccacctgtcggcgtagccattatccaggcgaagatgaaccgatttatcgtcgccaatgcagaaaacgcatctgacgaagaataa

SEQ ID NO: 384132 - DNA, 255 bp, Salmonella enterica
atgaatgaactaaaaaaagagcctgggctggttcagggcgttatcttgttaaccacgtcattattagcgaccggcgtttttgcgcttccggagctggctgcgctggcgacaggcaacatcaccctttgggcatggccgctgctcattatgttaactttccctattgctattgtctttgctgtgccggggcggcattttccacacgctggcggcgtagcgcattttatcgggatggcatttaactcgcgtctgtaa

SEQ ID NO: 384133 - DNA, 1065 bp, Salmonella enterica
atggaaggaaagagccggtcagttcccgagaatgtagagcagcccgaagggacagagggtgatggcgaaaagtcgtttctgaatcaggcccgttaccgcgatttttattctcttaccgaccagttgcactatcgctacggcgacagggccttttcactcaggaccgaaccggaagatgaagccgtgcattttcgcgccagcgccagcctcgcattcccgctgcgcgatattgagtcactgacgaaaaatgccgccgggcaatacgtgatgacaacgacctttatggggctggcgggcagttcatccccccttccggggtattatctggacgacatggtgtggtttcaggcgcaggagggcggcagcgcaacggcggattttctgaacctgttcagccaccgctggacgcagttcctttaccatatctggcgtaaatacaactggcatgtcagtttccgcaatggtggtacagatattatttcacagcgcatgtttgcgcttatcggactgggtaatccacgcgtgcgtgaacggctggatatctgccactgtaaactgctgccttacgccggaacgctggcagggccggggcgctcaccgcaggttatctgcgatctggtgtcagactgctttgatttaccggatgtgacgctggaaggctggcaactgcgaaaggtgcccatcccgccggatcaactgacccgtctgggggaggctgagccggatacggaggggaatgtcacaggcaaatcggtgctgggggtaaatttcactctcggcacgcacgtaccggagcgcagcggcaagtttatgctgtgcatcaataatctcagtctggaacgttatctgaccttcctgccggaaggggaggaatatctgccgctgaccacgtttgtctccttcgtgttgcgtgaccagctggcatgggatttacggctggggcttgcgccgggcgaagcgggtggaatgcggcttggggataaaaggcactcactgctgggacgaacctgttttatcggaaaaccgccccgcgagccttttgtcaccatcgcggtcagggagtaa

SEQ ID NO: 384134 - DNA, 1839 bp, Salmonella enterica
atggccgttaacgaacgtcttttccgggaagaactggattatctccggcgctatggaaaactgatggcgcgggaaaatccccggctggaaaaattcctcgccactcagggcactgaccccggggtggagcgcctgctggaggggttttctttactttccgcccggctacgggagaaagtcgaggatgaataccccgaactcaccgtgccgctgattacccgcctgtggccctgttatctgcggcccattcccgccatcaccgtcattgaatataccccggaccgcagcagactgaccgcgccggtgatgatttcacgcggtgaacaggtgatgaaccgcgtgcaggacagccagccggaaaatgcccgtcccggcgaggagggggccgacggcccgcctccctgtatttttacgctctgccgggatatccggctgctgccgctgcgaactgaggcgatacacaaccgcagcagcctgtcggcaggcatcatggatatgaccttttccatcaccggtaatgcccggataagggcaaatgaccttaacggtatcagtttctggctgggaagtgaagatgaatgcagccgccatcagctttatctgtggctgtcacgttaccggacggcggctgaattgattgtcgggaaacagcattacccgcagccggaactggcactgtcacctgccggtttcagcgctcaggagtcgccgttgccggacaccgatcgtgatggctacaggatagtgcaggactggctctgttttcctgatgtgcaggacttttttatcctcagcggtatcgccttgcccagtgatgcgctgacccgttccttcactctgaggctgcattttaaccgccccctgccggaaaatcttcatctgaaccgtgaagtcctgcgtctgcactgcgccccggcagtgaatctgtttgtgcgtgatgccgtgccttttacaccggatgcctcccgtcgcgactggccgctgacggtggacgaggaatacccggagcactacgcggtttacagcgtgagaggcgtggtggggcaggatggtattccccggggcagcgacggtctgccggatatgacgtttccccgcaggcgaaacgcgccgctaccgtgggacagcccgcaccaccctctggaataccaccgcgagcggaaggttgtttactggcgacatctgacgaaaagcgcattgctgcgtgatgcgcccgaccactttattaccctgcgtcgtgccgatggcagcccgcccgatgccggacaacaggggcctgagcctctgcaggtatcgctgacctgtactaacgcagacctgcccgcccaccttgcgcccggcgatatctgcgtgcccgtggggcagaatgcctccgtggcgtcgtttcgcaacgttaccaaaccctccaggtccttgctgccagtaccggatggcccgttacactggtcgttgcttggcgccatgacccttaactatctgacgctggatgacgtggaggtgctgcgcgatatcctgcgcacctttgaccgctgtggtatccatgagcctctgatggcccggctgtcgccggaaaaactggcggcgctggagaagctggaaacccggccctcagaccgcctgtttaaggggatcccacggcgtgggctggagtccacattgtacgtcaacccgcaacccttctcctgcgagggtgaaatctaccggctggggacggtgctgtcgtactttttcgccctttacgccacgacccgttcctggcaccggctgacgctggttaacacgcagacacaggaggtctggcaatggaaggaaagagccggtcagttcccgagaatgtag

SEQ ID NO: 384135 - DNA, 2079 bp, Salmonella enterica
atgcctcagaccggaacccgttttaccgttgaaacggatggatttgacgctcagacgtttgccgtggtcagttttcatctcgttcagtcttattcctcgctgtttaccctcgacattcacgttgtcagcgacagtaccggtctgaaagccactgatttactggagcagaatgtcacgctcacggtctggcagggccggaccccacagcgccatatttccgggctgattgcaggcgttgaacgcggggaatatgacggccataaaatgaactattctctgcgggtttatcctcccttctggcgcagcagtctgcgacagaatttccgccactttcagcagcaggatatcgaaagcatcgtggctcacctgctggaggataaccaggtgatacaggcatcttatttactgaaagagcgacatccggcgcgggaattctgcgtgcagtatggcgaaacggatcatgattttctctgccgtctgctggcagaggaaggcattttcttttatgaagaacatgcccgtgaaggaaagaatcagcgtcttgtcttctgcgataacgtctattatctgccgcaggccttcaatattcccttcaatccagaaccccgtgtgacggacacttactgtatcagccgcttccaccattgtgcgcagatacgcccggcgtatgtggtgacaaaagactacaccttcaaataccccggctggcagggacgctttcgccataaggctgccgaccttaacggccagcgcagccagtatgaggtcatggactatccggggcgcttcaaggatgagcagcacggacaggattttgcccgttatcaactggaaggctggcgcaatgaggcagaaaccgccgaagggtgcagtaattcaccgggattatggcccggcgtgcgtttcacactgacagaccatccggcggacgaccttaaccggaactggcaggtagtggcgagcacgctgcacggtgagcagccgcaggcggttccgggcaaccgggggaaaggaaccacgctgaacaatgactttctggcaattccggcagataaaacctggcgccctgtcccattgccgaaaccgaaagtggacggcccgcagcctgcggtggtgactggcccgcccggagaagaaatcttctgcgacgagcatggccgggtgcgggtaaaattcctctgggacagataccacgacgccagtgaagacagttcctgctggatacgggtctcgcagccgtgggccggagccgggtttggcaacctcgccattccccgcgtgggtcaggaagtgattgtggacttccttaacggcgaccctgaccagcccatcatcatggggcgcacctatcatgagaataaccgctcaccgggcagcctgcctgccaccaaaacgcagatgaccatccggtcgaaaacttacaagggcgatggttttaacgaactgcgatttgaggatgcgacaaataacgagcaggtgtatatccacgcgcagaagaacatggacaccgaggtgctgaacaaccgcaccaccgatgtgaaggtaaaccacacagaaaccatcggcgcgaatcaggttattaccgttaaacaaaatcagacgcaaacagtagtgcagaaccagcaggaaacggtgggccagaatcagagtgtcaccgtgggcatgaatcaggcggaaacggtggggattgtccgcgccctgagcgtcggcgtggcgtatcagaccacggtgggcggagtgatgaacacctcggtggcgctgatgcagtcctcgcaggtcggcattcagaaatccctgcaggtgggcaaagggtatgacgtcagcgtcggggaagacgtcagcttcaccgtgggtaaaacccggacggaaagcacaggaaaagtggctgtgtactctgccggagaacacctcgaacttcgctgcggacaggcccggctggtgctgacgcaggaaggcggcatcttcctgaacggcacagcaattaatcttcagggcgcacagaccatcagcggcgacgggccggtgattaactggaactgcggggcggcaaaaaatccgccggatgcgccggagcagtaa

SEQ ID NO: 384136 - DNA, 4071 bp, Salmonella enterica
atgagcggaaaaccggcggcgcgtcagggtgacatgacgcaaaagggcggtagcattgtacagggctctgccggggtactgattggtgcccccacgggtgtggcctgttcagtgtgtcccggcggcagaacctccggcaacccggtgaacccgctgctgggcgctaaggtcctgcccggtgaaacagatatttccctgtccggcccgctgccgtttatcctttcccgcacctacagcagttaccggacaaaaacacccgccccggtgggcagcttcggccccggctggaaagccccttttgatatccgtctgcaaattcgtgaagaggagctgatactcaacgacagcggcgggcgcagcattcacttcgagccgctgctgcccggcgaaaccgccttcagccgcagcgagtctttctggctggcccgtggcggcgtggcgaagctgcatgagagtaatgtgctgcatgtgttgtggcagaccctgccggaagacctgcgcctgagtccgcatctttatctggcgaccaacagcgcacaggggccgtggtggatcctcggctggtctgagcgcgtgccgggagcagaggaagtgctgcctgctccgttaccgccgtaccgggtactgaccgggctggcggaccgcttcgggcgcacgcagacctttcaccgcgaggcggacggggaattttccggagaaatcaccgccgtcaccgacggtgcaggccgccgcttccggctggtgctgaccacgcaggtactgcgggcagcagaattccgacagcaggcggttccgacgggaacaaaaccaccggctgtagctgacgcactaccgggctgcacggaatatggccgggacagcggtattcgtcttgaggcggtctggctcacccgtgacccggaatacccggataaccttcctgtcctgccactggttcgctaccggtacaccccgcgcggcgaactggcggcagtgtatgaccgcagtggcacacaggtgcgtggtttcacgtatgacgataaacttccgggaaggatgaccgcgcaccagtacgccggacgtccgcagaccacctaccgctatgatgccagcgggcgggtaacggagcagcacaacccaacagggctgaactatcgctacgagtatgagaaaaacgccgtcaccattaccgacagcctgaaccgccgcgaggtgctgcacaccgaaggcgcaggcggactgaaacgggtgattaaggaagaaaaagccgacggcagtgtgattacgcgggagtttgataacgcaggccgcatggtggcaatgacagatgcggccgggcgtaaaaccgaattccggctgaatatcggctccgggaaggtgacggaaattatcacgcctgacggcaggtcagtacggttcagttacaacgaccagcgccagcttatcgccaccaccggcacggacggcctgcgcagccagcaggcgtatgatgacctgggacgtctgacacaggaaaaatcccgccacggcgatattacccgttatttttatgataacccgcacagcgaactgccctccgcactcgaagacgccaccggcagccggaaacagatgacgtggagccgctacgggcagttgctgaccctgaccgactgctccggctacctgacccgctatgaatatgaccgcttcgggcaggtcaccgccattcatcaggaagaaggcctcagccagtaccgcgcatacgacagccgcgggcgtttaatctcgataaaagatgcggcaggccacgaaacccgctatgagtacaacatcgcgggtgacctcactaccacccttcacccggacggcagcaggcagaccacagagtacaacgccgcaggacatccggtgagcaccaccggaggtggcctgacgcgacagagggaatacgacgctgccgggcgcgtcacccggcttgttaatgagaacggagccagcaccaccttcacttacgatgtactggaccggctgatacaggaaacaggcttcgacggcagaacgcagtgttatcactacagcgtcaccggacagcttatccgcagcgaggatgaaagcctcatcaccctgtggcactacgataaatcggaccgcctgacgcaccgcaccgtgaacggcgaaccggctgagcagtggcactataacgcgcgcggctggctgaccgaaatcagccatcgcagtgaaggccaccgcgtcgccatacagtatgagtacgataaccagggacgcatgagtctggagcgccagacggtgcagcatcctgaaacggaggcactgctgtggcagcatgtcaccaggcatgattatcccgaagggctggcaacccggagcacccccgatagtctgccgccggtggagtggctcacttacggctccggttatctgacaggcatgaaactcggcgacacatcgcttatcgactttacccgtgaccgcctgcaccgggaaacgcagcgcagcttcgggggttatgagcagaacagcatgtataccgccaccggtcagctacagcgccacagtttcagcgacccggtgctgaaccgggaatacggctggaacgacaacggtcagctggtgcacatccgtggcgcataccaggaagacgactaccactatgacggcgcggggcgtcttatcagcgcccggtacaacgacctgctgcggcgctatgccaccgacccggcgggcaaccgtattacagaccgggaacagcacccggcgcttcccgcgctgtggcgggataaccgcatcagcgaagacgtaccgtatttttaccaccatgacgcgcacggacggctgacagaaaaggatgaacggcagccaggcgatggcggctgcgtacaccgttatcactacgataaccagcaccggctggtgcactaccgctgtgaacagcagggtatggtactgctggaaagccgctacctttatgaccctctgggccgccgtaccggaaaacgggtatggaaaagccggcgtgagcgcgggagcctcagcggggaggcatatatttatctgaataaaaccccggaagtgacctggtacggctgggacggcgacaggctgaccaccaccgaaacggaaacacagcgcatccagaccctttatctgccgggcagcttcaccccgctggtcagaatcgaaacccagaccgcagagcttatgaaagccgcccgccgcacgctggcagagaaattccagcaggaagcgaacgtgaccttcccgccggaactggtggcactggtggatacgctggaagcagagattaagcgcggagagctcagcgcagcaaaccgggcatggctgacgcagtgcggcctgacgccggagcagatacagaaccagacagagccggaatacataccgcaaagaaaaatccatctgtaccactgcgaccaccggggcctgccgctggcgctggtcagtattgacgggaaaatcgagtggtcggcagaatatgatgcgtggggtaatgtgctgcgtgagaataatccacagaatatgaaacagcttatccgtctgccggggcagcagtatgatgaggagacggggctgtactataaccggcatcgttactatgatccgttacagggaaggtatattactcaggacccgattgggttgaatgggggatggaatttatataaatacccactgaatcctgtcacagagatagatccgctggggttgtgggctttcgctattccggccatactggaaggaattaactgggcattctggggaagtgcggcagcgggcggtgcggcgttggctacctcaggggattcagaaaagtctaaaaataaaactgagagtttaacgaattgtccaacaatgccacccaatgatccttgtgataaaaaacttgataaaggactattacggaaagcagggattgagaaaatggaacactcaattaaaatcgagtcagttggacgaaataatatatcaaaatttgatttatgtggctgtaataatgggaaaatagtaataaaagagcatgggtgtaaaggtaagtctatagttgatgaaacagaatacacgtggaaataa

SEQ ID NO: 384137 - DNA, 321 bp, Salmonella enterica
atgatcaactttattataggtttaagtggtatagatccaaaaacaggtcaggaaatctggctggcaaaaactgagaaaaaaaatgaaacagaatacagtatagattatttaattgttctaattgataaggttttaaatgaagctgctaagtttggaggagagaaggggcttgagggtttgaggaattatcacgtccaattattagttggtatatcttctgatacggaagataatgttagacccagttttcaattaagcccaagaattatcagtcgtctttgtgcggcaggcgcttcttttgatttcgatccttatgtatag

SEQ ID NO: 384138 - DNA, 600 bp, Salmonella enterica
atgcagctttatgtcaacgatgacgaatggggcaatctgctgagtgaggataacccgcagcatctgcaacagcttatccgcctgccgggccagcagtacgatgaggagtcggggctgtattataaccggcaccggtactatgacccgttgcagggacggtatatcactcaggatccgatagggctggaaggcgggtggaatttttatcaatatccgctggatccgataactgatattgacccgttggggttgtttgtccctttagtaattggaggttactatttaagtgcacaagctgttgcctggatatcaacagggctattcaccgctgctgcactatctacacctgctggtaagcaggtattgacagatgtcacctcaacaaatttaaccaattgtaaagaacaaagttgtcccccatgtaatcctcctgcaggtacaaaatttaataaaacgacacactatgatcacgatcatggtaattgcaaagtaaaaactggcatgcaaacacattggcattatcaagtttatcatcaggactcctcatgtaactgctatcttcaaaagcatgcttttggtgggtgcggtgtggcctcttaa

SEQ ID NO: 384139 - DNA, 462 bp, Salmonella enterica
atgaaaaaaatagaattaactgaggactatattacattaatccatgacaataaaatatggagcataaatttcaattttgatggtagtcagacctcaattacaccctctttagtaattgatatcgactatgtaaatggaagtgattcctcgttggatactggtgatataatttttcacatttgccctgccaaattaaattttaatggcgtaagtagttttaatatacaactatcttcagatagagaggaggaagctcattataaagctgattgtttatacatttacagaatagacagagcattaacaataaataacagattttattttaaaataatccttactgatgaaattggttatatagaactttatgccaataatgcattcttgcttattgaggaaaataaaatttataaaattaaaggttgtgactcaatacctatcttatcaagaggttcaatatga

SEQ ID NO: 384140 - DNA, 504 bp, Salmonella enterica
atgaatgagtcacaatttcagcaggcggcctgtatcagcgccgggctttctgcgcgctggtatccacatattacggcggcaatgagcgaattcggtattactgctccactggatcaggccagcactcttggacgaaaagcctgtgagaaggcgcttccgctcgagcgacagcgtgcaatagctaatctggtatacagcaagcgaatgggtaacaacgggcctggcgacggctggaactaccgcgggcgtggacttattcagatcacaggtctgaacaactaccgtgattgtggtaacgggatcaaaactgagctcgttgcccatccggatctactggcacaggatacgtatgctgcccgtagtgcagcgtggttcttcgcgactaaagggtgtctgaaatattccggcgacatggtacgcgttacacagataatcaacggagggcagaacggtattggtgacaggcgagagcgctttgaaaaagcaaaatcggtgctggtatga

SEQ ID NO: 384141 - DNA, 405 bp, Salmonella enterica
atgcctggatattataaaatcagtcacagttgggagtacaggagacgcacacactggaatgatgtccttctggaagccgttgtcacttcaaatgcaaatctaactgcagaggaaacactgactcaatggctgcatgataaaaaacagggaacagttaccgtcgattataaaaatatcacatgctggcactacggcggagtatggctacattacgttattaacaacaatgctctgtctttatatatgcactcaagtggtgaagatgcttttgattcgctcaattactgcgcctatacaatagcaaaaattttttatacaaaccaccaggatattaatatccggtggattgagcatccccacaaacgcgacaatctcaaacaaacatcaataaacagtgagttataa

SEQ ID NO: 384142 - DNA, 189 bp, Salmonella enterica
atgaaagaagggtattactggattcagcataacggtgttgttcaggtggcatactatacgaatgacacagttgacgatctggaatcaggacagcttattgttggtgtttggcatctgacaagaggtgatgatatctgccataacggtgaagcagaagtactgtcggggccgttacaagcaccagcttaa

SEQ ID NO: 384143 - DNA, 567 bp, Salmonella enterica
atgaacagtacatctgttgaaaacctcccatcacttacacacaaccatcttcctgtcataacaacagaactgctggctgagctgtacggaacagagcgccagcgcttaacaaataatttcaatagaaacaaagaacgatttatagaagggaaacacttttttctgatcgaaggcgatgaattacgggagctgaagaacagaaactctttaagagtttctgtgaaaatcgcccgtaacgttcgctccctaatcctctggacagaacgcggcgctgcccgccacgccaagatgctcgaaacagatcaggcttgggaggtgttcgaaaaactggaggattgctatttcagtcagacactaccatcgccaacacgccaggttcagcctgccgtcgacatgcttaacatcgaccttctgattaagatccgcgatggtaacgtcaaagacattcggcaggttggtccagacatgttcgttggaaaagtagagcagatattgagcggattacgcgatagcggctggatagtcattaaaagggatttgcttgctgagaagctggcgacgtggtga

SEQ ID NO: 384144 - DNA, 1104 bp, Salmonella enterica
atggaacatcaggtgaatgacttcactgaatatcgcggggataagctcaaactagccagaatggctgttgggctttcttgtgaagagttagccgaaaaaattggcaaaacgaagcaattcgttagcaaaatggagaaaggattcaggccatcagagcaaatgctggagttaatagcctcagctcttatgattaaacctgattttctttttactgaacgaaagtatgctcttgaaagtgatgtttgccattttcggagtaagaaatctaggactcaaacgctgactaatagtgtcttggctagggctgagattcttaacattataatttctgctgttgaaggtgaaatcgaatttccagatgtcaacatacctgaacacccgggatctgaattacttaccccgaatgatattgagcgagtggcagaagactgtcgccgtgtctggaatttaggtcttggccctatatcatcgatggtgaaattggctgagagtttaggggtgatagttgcacatgttacgggagttgatgatcgcgttgatgccttcactgttcacaataataggccggttatcatcaggaacaatgttaaaaaaagcatatgtagatttcgctctgatttaggtcacgaattagggcacttggtaatgcatgagggcataactactggtgacaaagtgacggagtcacaagctgatcgcttttcgagcgccttattggttccgagattatctttcattaaagaatttccgcgaattagagggaagcaatttgattggagtgctctggttgagtttaaactcagatggaaaatcagccttaaaatgtgcatttatcgagccagtgcgctggggttattgacccaggaacaggcaagaactggttatatgcatcttaactctaaagggtatactagagttgaacccggcgatgaacttttgcgccctgaagaaccaagcatgctggccgaagcaatagaaatgttggacgatgcgacttggcttaaaattcttatgaaaactggcttgagtcaggatttaattcgaaatttgttctccgtcaatagaccccttacaaatccaagaagtctttttcagattgtttga

SEQ ID NO: 384145 - DNA, 651 bp, Salmonella enterica
atgagtgataaccagttagcaccttgttgggaatttcaaccttatctcgctgaaagcaacgtccgccaattgttggcggagatcgctaacgtgcttgagcaactgtactatcataagcacgcattggacagcaactggtctgaaggtgtaagagcttatgattgggtcagaaatcatcttattcaaaatgaaggggcaattcctggtctcgaaatggtttccaaggggttggactatgtagttgctttaaataaagttccacttcaatttaccaaagattgcattaacaacccaaaaaagaaacatcgcctgcttcgaaataaagttgaacacgaacaactctccttgtttggtgatgttgaggctgagcaagatattacatggcgagttatagctgagccttttttatccgaagaggaagatggtgagttagagtccacattgcctcgttgggaggtggctcttgtcgggtttaatgcctatggtgctcaggttagtatggtttctcaccaatctacagcatcaatgccacttattcctcttgattccaacacactccctgacgaagcggaaattaacaaggcgtctcttcgccgtcgtgcgaaggaccaagatttggatgtgagcagcaatggaacatcaggtgaatga

SEQ ID NO: 384146 - DNA, 171 bp, Salmonella enterica
atggaccagctattgcaatacgcaacaaatcggatcattgagctggaaaacgtgctactggtggatgttccggaaaccgtctggccagctgttttttattttggttggttgacaaaaatagaaaaatgcgaaaatatatggtttacgaattctaaaaaaagcgaaacttga

SEQ ID NO: 384147 - DNA, 216 bp, Salmonella enterica
atgagcagaacgactcttgagcgcatgaacaataaacacggtcatcactatcagcgcgatggctcgatttatatatgccgtagctgtggaactgcggagcatcccagcggtaattattggtgggcaggccgttcttcgaaatgtgaaccgccgtgcagtgatgatgtaaccgggcaatgtgcctggtttgatgccgcggaaagaaagggggaatga

SEQ ID NO: 384148 - DNA, 369 bp, Salmonella enterica
atgacaatagacaaacaggcgctgcgtgaagcggcggagaaggctacgccggggaattggcgccgcgcgtcatcacggttcaatggcatcacggtaacgccgttttctctctgcggtgaagaagtgacgttggcccatactgttgagaaacgtgacgcggaatttatcgccgccgctaaccccgccaccgtgctggcgctgctggctgagctggaagccacgcacaggcaggtgggcgaattaaccatgtgggttaagcgattagcctattcgctaagaaactccagaccacgcaacaagttacacggcgcagcaatggactatctgagccataaagggttaatcagtgtggaggatgtattgcgatga

SEQ ID NO: 384149 - DNA, 678 bp, Salmonella enterica
gtgaaagagcgcggaatgatttttaacagcgaaatggtgcgggcaattctcgaaggcaggaagacgcagacgcggcggattatgaaagtccaaccaggcacaccagagtttggcttgcgacgcattattgagtcgtccaaagccaatgagaacggaatgtatttctggtctcaagacgacgcctgcggaatcaaagcgcgctcaaagccgtttttattcccatacggtgaggtcggcgatcgcatttgggtgcgggaaacgttccgtgtccatagccgggcaacggatgttgccacgctggtctaccgggccagtgtcagaaactcctggactgagcaaactcatcgagttcccgttgcggtttgcaataaaccggccacaccagagaagtggacgccgtctattcatatgccgcgctgggccagtcgcataacgctggaaatcaccgatgttcgcgtggagcggctgaataatatcagttatgacgacgcgattagcgagggcattaaacaggaatggacctgcatcgatcctggtctgggttcatacgcccacaaaaacgacgttcaggatgattacgagacattgtggaaatccatctacggcaccgacagttggcaggctaacccgtgggtgtgggtgattgaatttaaacgcgttgaaggcggtgcagcatga

SEQ ID NO: 384150 - DNA, 258 bp, Salmonella enterica
atgagcattctcaccattctagatgtcggtctcgccttaatggggtggctgttcatcatgttcagagcgggtcagtggtttatctccgttgcgctaaagcaatgggataggcgcagaaagcaatctcgtcggcaaaaagcagtaaacgaattttacgatgcgtttgacctgtccagcatagaacccggaacgacggttcgcctggcgactaaaggcgatctgacaatcatgatgtttcgccaggaggcagcccagtga

SEQ ID NO: 384151 - DNA, 927 bp, Salmonella enterica
atggcaaacactgccgaagtaatcaattttcctgtgcctgacgtggcacctaaggagccgcgcgtggcagatctcgatgatggctatacgcgcctggcaaatgaacttctggatgccgtgatgtgttctggtttgccggagactgagctgtgcatcctgatggccgtatggcgcaaaacgtatggatacaacaagaaaatggactggatcagcaacgagcagttagaggagatgattcagaagcatcatacccattgctcgacagcaaaaaacagtctgatcaggaagaaggtactgattcaggaaggccgcagggttggtatgaatatccatatttccgagtggcaaactaaaaataacggattctgcaaaacattagctaaacctgctaaggaaaccttagcggaagttgctaacgcacctaagcagaagttgctaaccacaaaagacaaactaacaaaagacaatattaaaagatctacgtccgagaattctgacgaatcctctgacgaccgtctgaagaggtttttatccgctcatccggaagccgcaatttacacccccagtggggctaaatgggcaaccgctgaagaccagcaatgtgcagagtggattttcgctcttgccgacaaagtaaaacccatcacgaaaaaaccacgcattgtcgcctgggctaacgacgtgcgactgatgcgtgagcttgacgggcatactcatcgcgaaatctgcgagatgtttctctgggccagcaaagatgcattctggtatatcaacatccgatcgccggcaaagctccgcgccaagtgggacacactagcccttcatcgcgaagacacaactcgcaagccacgcgcagatttcagcgcaagaaaatccgaaactggcccgcactggaacagtgctgaagcatgggagaaatttatatga

SEQ ID NO: 384152 - DNA, 321 bp, Salmonella enterica
atggagaacgcaattgcacgaaagttagacccaccagaaatcaacccgattgagatagagagtgtcctgctcaaccggcttgcatcagtagggcagaaatcatacgccgagcatatgggcatcagcgagtcgacagtcagcaggcgtaaagctgagggatatttctgcaacatggcgaaagagctggcttttcttgggattcaggccgcgccaccggaagcggtactggtatccagaaactatctcacagccgtagagattctcgctgatgccgggctaaaggctgaacgagccagaccggatgcgctggggtgggactga

SEQ ID NO: 384153 - DNA, 138 bp, Salmonella enterica
atggaagacttcaaagagatggttgcaaaacttctggaagacgcccgccgactccagcaaatagagcctaatgctggaacacaggcccgtattcaggaagctgaaaatttactggcgcgggagacaacacatgattga

SEQ ID NO: 384154 - DNA, 150 bp, Salmonella enterica
atgattgatcactacaaacttcaggtcgcccagagtgaactggctatcgcagcctgtctcggtgatggcgaactatgggaacgggcaatgaaaaaaatgagcattgccatcggccttccctggtatcgcaggaataccggcacacactga

SEQ ID NO: 384155 - DNA, 681 bp, Salmonella enterica
atgacaccagaaattatcctggctcgtacaggtattgacgttagcaacatcgagcaaggtgatgacgcgtggcaccgtctacgcctcggtgtcatcactgcttccgaagttcacaacgtcatttccaagccaaagtcgggcaagaagtggactgatatgaagatgtcctactttctcacccttcttgccgaagtttgcaccggcgtggcaccggaagttaacgccagggcgctggcctgggggaaacagtatgaagatgatgcccgcaccctgtttgagttcaccactgacgtgaaagtcaccgggtcgccgatccttttccgtgacgaggacatgcgtaccgcctgttctcctgacggcctgtgcagtgatggccgcggtcttgagttgaaatgccctttcacctctcgcgactttatgaaattcaggcttggcggcttcgaggctatcaaatccgcctatatggcccaggtgcaattcagcatgtgggtaaccgggatagatgcctggtatttcgcgaattatgacccgcgcatgaagcgagaaggcattcaccacgtggttgttgagcgcgacgacaattacatgtccctcttcaacgaaatggtaccggaatttatcgaaaagatggacgaagcgctaaaggagattggcttcacgttcggggagcagtggcgatga

SEQ ID NO: 384156 - DNA, 942 bp, Salmonella enterica
atgttttcgcatcctgggttcgataatttcgatgggttggtgcggatggatttacgtcgctttattacgttaaaaacggtggtggaagagggttcatttctgcgggcgtcacaaaaactttgctgtacgcaatcaaccgtgacgtttcatattcaacagcttgagcaagagctttcggtacggttgttcgaaaaaattggccgcagaatgtgtctcaccagtgagggcaaacggttgatgccgcatatacacgacctgacccgcgtgatggcatcgattcgccagtcagcgctgcaggatgcgcagccgagcggcgatctacgcgttgcgaccggcgaaacgctgctggcgtataaaatgccgcaggttttacagcgatttaaactacgcgcgcctcatgttcggttgtccttacagtcgctcaactgctatgttattcgcgatgcgttgcttggtgatgaggttgatctgggcgtgttttatcaggttggtaatgacgatgcgcttgagatgatgccgctgggcgatcagtcactggcgctggttgcgtcgcctctgcttcagcacgtcgatttcacccggcatcaccagcacattccctgcagctttatcattaatgagccgcaatgtattttcagacaacgcttcgaggggctactgcgtaaacgtcagattacgctggaaaatactattgagttatggagtattgagagcatcaagcactgcgtatcggcaaatcttggcgttagctttttgccgcgttttgccgtcgagaaggagctacgttcaggggaattggttgagttaccgttcagcgaacagccggagttaattacggcattatgcggctaccatgctggaaaagtcgttagcccggcgatgcgggtgtttattgagtgtattgaagagagctttgcgacgcatgaaaaaatgccgggctaa

SEQ ID NO: 384157 - DNA, 264 bp, Salmonella enterica
atgaaacgttatgaaatgacaaatctcattccgccagtggatacgctgatgaagaaaatcagccagactggtgatgaagccattaaagcgattattgatcaggggtattactctgatgcgatgccgtctatacctgaaatgtcatatttatggtcaccaatgacaaatgctattttagctacctgggttgagaataaatcatcgaaagaggccttaattcatgctcgtggaattattgaagaacaactttcgcttcaggagtaa

SEQ ID NO: 384158 - DNA, 1290 bp, Salmonella enterica
gtggatacgcaatctgttaaaatgaagagtgcgtcagtgctcccggtttcttgtttgattatgggtgggactcaactatcccgacattattacgtaaaaggaggaatattctttgtcatccaggtttgctttttactctatctgtcagatatagtccatacattaacaggactattcactttaggtgatgtcgcgcagattcgaaaagggctgactgttatccagggtgacaattctattttcatgctggtagagggggtgatagccacgataattgttgggttgtttattgctatctacattcttaatgttattgatgcccggcaatcttcaatgtgtcatctcagcattaaacaacagttttataaactctatgaagataaatttgcgtttatcgtattaacaccggcctttctggccagtgtggcattcattattttacctattgtcatcactatactggtatcatttactaactacgctgcgccaaaccatattccgcctaaaaatttagtcgattgggtcggcattaagaattttatgatgttgtttaagttcaaaatttggtcggatacatttttgggtgtcgctctctggacattcctctgggcagtttgcgcaacttttttcacatttagttttggcttcatattggctcttgcactggcaaataagaatatccggttcaaaaaaacatggcgtttgatatttattctgccttatgcgatacccactttcgtcacgctgcttatttttcgcctgcttttgaatgggattggcccggttaactcattccttaatagtcttgggatgagttcagttgatttcttatcggttccattaaatgcaaaaataaccgttattgcggtttgtgtctgggtaggagcaccttacttcatgttactgattgccggtgccttaacaaacatttcacgtgatttgtatgaagccagcgaggtggatggcgccagcaagtggcaacagtttagagaaattaccctgccgatgatattacatcaggtcgcgccaacgttggtcatgacgtttgcatacaactttaataattttggcgctatttatctattaactgaggggggcccgacaaaccctgaatatcgattcgccggtcatacagatatttttattacctggatttataaacttacattaaacttccagcagtatcatattgcatcagtgatttctatcattatttttattttcctgtctgttattgctatatggcaattcagaaggatgaaatcatttaaagatgacgtagggatgtaa

SEQ ID NO: 384159 - DNA, 738 bp, Salmonella enterica
atggcgtcctttaaaaaaggtaataatctctttagttctacttttggtggtatcgagtttacgtttgatcattatataacgttattctctaatacaccttatatgaaatggtatttcaacacttttatccttgcgacagccaatatgctgatatctctggttgtggtcacgatgacagcttatgttttttcaagatatcggtttcgtggtaagcgtaacactttgatgactattcttgtactgcaaatgtttcctgcattcttatcaatgacggctatttatatcctgctttccaaagccaatttgattgatacttatacaggattgctcctggtttacgtcacaggttcattgcctttcatgacatggttagtaaaaggttattttgacgctattccaacctctctggatgaggcagctaaaatagatggagcagggcatctgactatttttattcagattatattaccacttgctaaaccgattttagtttttgtggctttagtctcgtttacgggcccgtggatggatttcattttgcctacgttaattcttagaagtgaagaaaaaatgacgctggcgattggcatatttagttggattgcttccaattcagcagagaattataccctctttgcagcagggtcacttttagttgcagtacccatcaccctgttgtttgttttcacgcagaaacatataacaacaggtcttgttagcggcgccgttaaggaataa

SEQ ID NO: 384160 - DNA, 1794 bp, Salmonella enterica
atgattacagtgagttcattaaaacattcagcaaaaagtgaagatagttatgcttatgacaacgaaaccttacatgtgcgcttgcgtacattaaaaggagaagtcaataaagttattctctggattggcgacccctataattgggcagaaggtggccttgacggtggaaatatggcaggcaccgaagcttttggttggattggcggcaatgagatccagatggttcgagaagccgttacagagtttcatgatcactggtttgcggtgttcaaacctcaaaagcgccgttgccgctatggttttatccttttcggtaatgatggtgagaaattcctctttggcgagaaaaaatgtgtcgatattagttcaccagatcttgaagagcgtgaattaagtcgtttaaataattttttctgttttccctatcttaaccggattgatgttctcaacactcccggttgggtgaaaaataccatctggtatcaaatctttccagaccgcttttgcaacggcaggccggaaatatccccagaaggagtagaaccctggggaagcacgccgacttcttttaactttatgggtggagatctgtggggcgttattgataaacttgattatctggaggatcttggtatcaatggtctttatttttgtcccatatttacttccgcatctaaccataagtatgacaccattgaccattttagtgtagatccgcattttggcggcaatattgcatttcatacattaattaaagaagcacataagcgcggcatgaaagtcatgttggatgcggtattcaatcacttaggtgcagactctccaatatggctagatgtggtgcgtaatggcgctaactcgcgctacgctgattggttctggattcataaatttcctgtttatcccgaaacgccaaaaagtgaatgggattttaaaaactttaattatgaaacctttggcaatgtgattgaaatgcctaagctcaatactgagaatgatgagtgccgggaatatttacttagtatcgttcgttactggactcagaattttgatattgatggctggcgccttgatgtggcaaatgaggtggatcatcatttctggcgcgatttcagaaaagtcattaaggatattaatcctgactgttacattttaggtgagatctggcacgaaggcattccctggcttcgtggagatcagtttgattcattaatgaactacccattaacctatgggattatagattattttgctttgcaggataccactaaagaagaatttatgacatccgtcactcgttcttatttgtgctatcccaaaaatataaccgaagtgatgtttaatctgctggatagccatgacactgcacgaattttaagtgtatgtgaaaatgataaaagaaaagtcaaactggcctatttattcatgttaactcaatcaggaagtccttgtatctactatggtagtgaaataggcattgatggttataaggcactgacgcttgagaataacagaaagtgtatggtgtgggatgaagataaacaagatcttgaattgcgccaatttattcgttggttgataagtttacggaaaaaacatccacaatggaacgaggcgtcaatcgaatggacgcaaattgaacatcctaccgtggtcgcttatcaacgcggaaatattacgttctttctgaataacagcgatgacactgcttattttgaatataaaggcagaaaaatggaacttcccggattcggttacgaaattgaaggtttatccgcatctgaacgtatgtaa

SEQ ID NO: 384161 - DNA, 798 bp, Salmonella enterica
atgataattgacgcgcatactcacatcggcgactttgtaaaaatacatatgcctgaagacgtttttatgaactcactggataagtacggcattgattttgccttatgctcttgtggttcagccgtagaagttgatcatgaccaaaaccccattccggatgaagagcaagtcagtcagcatgataataatgcgcgtatgttaaggcttgttcgccaacattctgaccgcatcggcgcgtttatgtggataaaaccacgtctggaatattgtgatcatgactttgaggatactattgtcaataatagagatattatctatggtattaaagttcatccctatcattctaaaattgcgttcaattctgataaagttcaggcttatatacgcctggctgaaaagtataaccttccggtcgttacccatacatcaaatgattacgagtccagccctcaattagtgtatgagatggcgcttaaatatccgaatgtcaatttcgtcatgtgtcatatggggctcgctacgaacaatcaggaagctatcgaactgattgctaaacttcctaatctgtatggcgacaccgcctgggttagggctgacatagtttatcaggcgatcaaagtatgcggtagcgataagattttattcggcacagataatcctattaatggattggacacatacaatgatgatgacttctataatcaatattttactgaactcaggagtcaattgacgcaaagtgaatatgaacaacttatgtttgctaatgcgaaaaagctatttaagcttaaaatatag

SEQ ID NO: 384162 - DNA, 489 bp, Salmonella enterica
atgctggcgctgattgccgcctttgccagcgcaccgcagctactcgaccagtttttacaggagcgggaaggaaatacactggtggccgttcgtgataacggcggcgtctggtcagtatgccgtggcgtgacagtcaggggcggacggatcttaaatacctcgctaagaccagaacggtggcgatattccggaaaagccgcagtttgtacaaaatatcggagcgctccttgcatcaggtacggctgttgcagcgaacagactggcatcacgcgttgcgctatcggcactgacgtgagtgatagaggtttgataatgggcggggtttacaataacggttatccaacgcaatacggggatgttttgcgtctgaccggaaccgatgatggagagatatcaatcggatggagtggggttaatggtgctcctgcgccagcatatattcgtagccacagaagctcagaccatcgtgatatgctggcggtggtctga

SEQ ID NO: 384163 - DNA, 1143 bp, Salmonella enterica
atgatcgataaattagtgcttacggttacaccaattttctccataccaccgcgtggtgcagccgcagtagagacatggatgtaccaagttgcacagcgaacaaaaatacaaaacagaatcgcttgtattaagaatgaaggttatagcgattttttaaaggtcaatgaccattgttctgttcatcgcataggtttcagcagactctataagcgcctctttcagaagtggactcgtctggacccgctcccttactcacagcgcattctgaatattgcaaaagactttaacgttaccgatgatagtgtaatcatcgtgcataacagcataaagctgtaccgccagatccgcaaaagagccccaaaggcaaaaatggttatgcatatgcacaatgctttcgaacctgatgggctagatcaaaacgttaaaatgatcgtcctcagcctgtttttgaagaagcattatcagacgtacctgccggatgctgatatagctatcgtccctaatggtattgacctggaggcctatcagaaaaacactgtaccgctgcaaaagtctgacctgggaataactcaggagaaaaaaacgattttctttgctggccgtatatcaccggataagggagtgactttgcttttacaggcattcgaacaactcctcaaggaacgcaacgatatagagttagttgtcgttggcgactatatgagtaaaagtaaaggtaataaagcagcctatcagcgtgaagtgcgggaattagcagaacggctaaaaccacactgtcgtatggttggaggcgtaacgccagaagagatatacaactactattcattagcagatctggttgttattccctctcaattccaggaaccgttctgcatggttgcaattgaaacaatgggggccggaaaacctgtactggtcagtacacgcggcgggatgactgagttcgtaaaagagggggataccggcttctatttgcaggagccaatgaccccggagactattgccagggacattaataaagcgctggcatcccccgatttaaacgatgttgccttacgtggacaacgttgtgtggaagagaaattcccgtgggaaaaagtaacccagcggtttgagaaagtagttaataactggtttaaataa

SEQ ID NO: 384164 - DNA, 1356 bp, Salmonella enterica
gtgcagtatttttaccaccacgacgcgcacggacggctgacggaaaaggacgagcgccagatacgcgatggcggcggcctggtacacggttatcactacgataaccagcaccggctggtgcactaccgctgtgagcaacagggcgctgcgctgctggaaagtcgttacctctatgacccactgggccgccgcatcgggaaacgggtgcggacaggcaggcgcgagcgcgggagcctcagcggggaggaatatatttatctggataaaaccccggaagtgacatggtacggctgggacggcgacagactgaccaccaccgaaacagccacacagcgcgtgcagacgatttacctgccgggcagcttcacgccgctggtgcgcgtggagacagacatggaggaactggctaaagcagcccgccgcacgctggcggagaaattccagcaggaggcgaacatgaccttcccgccggaactggtggcactggtggatactctggaagcagagttacagcacggagaactcagcgaaaccaaccgggcgtggctggcacagtgcgggctgacgccggaacagatacaaaaccagatggagccggaatacacgccgcagagaaaaatccatgtttaccactgcgaccaccggggcctgccgctggcgctggtcaacgcggaagggaaagcggaatggtcagcggaatatgatgcgtggggtaacgtgctgcgtgagaataatccgcataatctgaaacaactcatccgcctgccggggcagcagtacgataaggagacggggctgtactataaccggcatcgttactatgatccgttacaggggcggtatatcactcaggatccgattgggctaaaaggtgggtggaatttttatcaatatccgctggatccaatcatagatacagacccattggggttggttgtgccactcgttgttggcgtgggagttatatgtgcttttggcgttttatcttcagctacgattatccaaaacgctcaacaatcacagactgattcatatggacgccgcgtaaaccctgagtctgatcagttaactactgaacataaaaccggtattaatcccggaggtaactgtactccagatgagttaagttatctccaatctgaaaaaaacagattatgcaaccaatccagagcatgtgcgccccctcccagaatgcaaaaagaagaaatttttagacgttatcaacttaatcttgcttgcgccagtgtgagaaaaacgataaataactcttgctttggtggaggagataaagttcacatggacgaagaaaataaagcgtacaaaacggctgcggattgtagtggactgctcaaatga

SEQ ID NO: 384165 - DNA, 486 bp, Salmonella enterica
atgaaaagaattgatttcacgaataaagagatggtatttaacaagcttattgatatattccctatcaaaccaacaccgttagtacctgtggatattaggggaatggatgatgaagatattgtgcattcatttttttctgataagacatggaccaatatagcatccaagttaaatttgcaagatgattcatatgcgctagaacttggtgtgtcatttcttcctgaaaatgttttttcctattacattcccctttacatttatgccgcgctatataataaagatgaactttgggtatttgagtctgatttcattcagcattatttatgtcctgaatatcaaagttgcgaggattttttctctttcattcttaacttctctgattctcagatgtacataatagcacaattcatgtcctatgagtcagaagtattaggatttggttatgcaagtagagcctgtcaagatttttgggatctttatttataa

SEQ ID NO: 384166 - DNA, 177 bp, Salmonella enterica
atgaattcgattctttatcacagtaacaattccgtcatgccggtctgggtaacgattgatgaagctgttaatattataaaaagtaagcgagtgtggagattacagccagtgagaactgatgtcgttatgcactctatgggcaccctacactctccatctattttcagtctccggtaa

SEQ ID NO: 384167 - DNA, 201 bp, Salmonella enterica
atgaatggcacgattatgcgggatacttgcaccgcagtatatatttaccgctttgtatgccctttcctaaccgagatcgttaatatttatctcaaagataaaacttatcacaaattaacatcagatattatacctcaggctaactacctccatgaaattaaagaactatcctctaaagagttaagtgcaattattacttaa

SEQ ID NO: 384168 - DNA, 252 bp, Salmonella enterica
atggaaatcaaaaatatattcgccatctcattggctgcctcatcatttagttgcctggcgtttaaagcgccgcctaatatagcctcgacaactcctgataacgttaacgctctcgaaagtaagattttgggcagcttttacacccaacatggcactctatcgcaggtagctggccctggaatgtgtgacatctcacccgttcctggttgctcatgtccattctgcacaatgctccgtagccatatccgctaa

SEQ ID NO: 384169 - DNA, 204 bp, Salmonella enterica
atgataaaagaaggtatcaaaggtgatcaatattgtatgcctgtcctgtatgttttgattcggtatctggttgatgatgaaagtatcgttgtcctgtcaaaatttgaaatccaggtggaacaagaaaaacgctcaaaacagacttacaaattcaaccccagtaagatatgccatacaattggcaataaaaagaaacacatttaa

SEQ ID NO: 384170 - DNA, 489 bp, Salmonella enterica
atgaagaacaaaacaccctgcctgaaaatgctgaatcaaagcaaaaatgaacaaataattattcccgaaagtgtttctcaataccatcaacaaccactttatattattattgcactgtggtgtcagaaacaagaccgatggattaaccgtaacgatattgctgaggctttttctatcccggtaagacgagcatcctttcagttatcatatattactcgccggccacaaaatatacatttccgctcacgacagaacatacccggtgaagcaggcaaacgtcacaggtgtaatgaaatatgggtagaaaaagtcattattgataccgtgagacaagattcagaaagagcactaccgatagataacaaaagtgagcgaggcgttatgggggcttatcgttcccgtgtgggaaacggtatgtccggtaatggaaatgtctgggacattctgatcatgatgaggcgtgagaatgaggagggcgaagatgaataa

SEQ ID NO: 384171 - DNA, 834 bp, Salmonella enterica
atgaataatccagataaaaataaatgcattatagtttattcccggcactggtcagaaacctttaccatacagggaatgtatactctgatttcacctgacacaagggttataacctgtttttcacctgatagattggttgagtcgttgtcagtatattcaaccgcacctgtcattcttggaatacttccgcacgaaagtattttcttactatcccgactcagtccttatctgcagcaacgacacatactattgtttggggatgagtttaattttgtggatcgaatggcgccattttacttttttaaaggtgatattactttccatgcgtggaaggataaaaccatcatgaagacacgtacaatcttatatgattttcttatcaataaacctcttaacagagtacctattcaacatattcctgttcaacccggagttcccgataaagatgaactgatttatcatgttaacatatatctttgccagatgtttttacaccatggcgttggagaaaacgcagggaaagtgttactcatgctggcatatggtttttcaacaaaagaaatcgccagagaattagggatttgcactaagactgttagcgtgtataaatataatggattagcgctgctggggatggaaacaggcagctttaatatttaccgtggaattatagtcagaccagttcttcagaaatataattatggagagaaatcagtcaaaaccggatgttcttataatgaaaaagaaataaataagagtgttatattccataaggagattaaaccgataacatttcccttaagttcaaatatcgctgaaaatgacaaaatataa

SEQ ID NO: 384172 - DNA, 339 bp, Salmonella enterica
atgaaaaatggtgtgtatcacgttgcattcaacagtaaaagcggtgcgattggagaaggtgtactggtggtttgttgtggggtgattaatggcggagatattggttttgtctatcaggggcaactggaccgtcctgagatgatattacgaataacccgatatcaggacgatattccttcagtattgggtatggagaacgactatgaactggttatgcgatactcaaatgaaaacgaaggacaatacatgctacatggttatgtcatggcatgtccgcaactgacgatcgaagcatgcgccacctttctggtgcctttgcttaagagtaagcacacgtaa

SEQ ID NO: 384173 - DNA, 774 bp, Salmonella enterica
atgagatatttattgttattttttgtaatatttaatgtgtcagcgcaagaaacatgcaatacttctaatataaaaagcgatgaggtaagttatattgtctccacaagcactgttgttggaagcgaaagatcttacttctattcttctcctgctcagagatgtaaaggtaagttatttcttattccaggggacaaagttgtatcatataaaaaatacaatggatatagatttattcactatgtatcaaaaaaaggtgataatgttagtgggtggatgaaacaagataatataacggattatacttctagccgaaatgagcttaataattctgattttattttgtattttattgatgccggtatttatttgggggagccaatatctcatgtgatgaactttctcaagaaaaataacgaaccagtctcgtataatcttgtgggaaatactgattatggcgatgttttttcacttgattttccagcggataattcggcttcaatatatttttcatcatttaatagtaaaatcagaggggataatgagggggagatcatttctcagataacattgtatacacaaaaatataaaactaaaaggggtattgctgttgggagtggatttaatgacgttattcgtatgtacggtgcgggggagaaggacgatgacaaaactattttatattcatatgcagatatgatgctgtcatttcaatttgatgaaaaaaataaagtgaaaatgataatgtattctattaaaccatgctcaaagtgttaa

SEQ ID NO: 384174 - DNA, 1062 bp, Salmonella enterica
ttgtcagatattctactattaactatttgtgccgtcatttctggtgcagaaggttgggaagatatagctgattttagtgaaacacatctcgattttttgaaacaatatagtgattttgaaaatggtattcttgttcacgacaccattgccagagttgtatcctgtatcagtcctgcaaaatttcatgagtgctttattaactggatgcgtgactgccattcctcaaatgataaagacgtcattgctattgatggaaaaacacttcggcactcttatgataaaagtcgccgcaggggagcaattcacattattagtgcgttctcgacagtgcacagtctggtcctcgggcagatcaagacggatgaaagatccaatgagattacagctattccggaaatccttaagatcttgaatgttaaaggaaaaatcatcgcaactgatgctatgggttgccagaaagatatggcagagaagatacaaaaacagggaggtgattatttattcgctgtaaaaggaaatcaggggcggcttaataaagcctttgaggaaaaattcccgctgaaagaattaaataatccaggacgtgacagttatgcaataagtgaaaaaagtcacggcagagaagaaacccgtcttcatattgtttgcgatatccctgatgaacttatcgattttacatttgaatggaaaggcctgaagaaattatgcatggcagtctcattccgctcaataatagcagaacaaaagaaagaacccgaaatgacggtcagatattctatcagttctgctgatttaagcgcagagaagttcgcgacagcaatccgaaatcactggcacgtggagaataaactgcactggcggttagatgtggtgatgaataaagatgattgcagaataagaagagggaatgttgcggaattgctttcagggattaggcacatcgcgattaatattttggcgaatgataagttattcaaagcagggttaaggcgtaaaatgagaaaagcagctatggacagagactacctcgcgtcagtccttgcggggtgcgggctttcgtaa

SEQ ID NO: 384175 - DNA, 417 bp, Salmonella enterica
atgcttggctttgtttctgcattatcctcagctgtcgcggtaatgatattattgatgtccgtcttattagctaacttactatcagcggcaatttctaaagatgctaaattggactttgctacactctcttttacttctgtcgaaggggaagataaaaagaattctataattccggaacctgggcaaggtttttctttgtcggctacagatcttatgtcattagcttcctccaatactactgtcagagtttattgtacgtatggtaataacttaagtcttgacgttgctaaaaaatatactacatacaattatattgttgctaaatcaattttagcaaattcaaaaattattgtagagcaaccagtctatgagcctaagaacaagaataattgtattgcagaagaaataaaaaaatga

SEQ ID NO: 384176 - DNA, 906 bp, Salmonella enterica
atggaggaactggctaaagcagcccgccgcacgctggcggagaaatttcagcaggaagcgaacgtgaccttcccgccggagctggtggcactggtggatactctggaagcagagttacagcacggagaactcagcgaaaccaaccgggcgtggctggcacagtgcgggctgacgccggaacagatacaaaaccagatagaaccggaatatataccgcagagaaaaatccatctgtaccactgcgaccaccgggggctgccgctggcgcttgtcaacgcggagggaaaaacggactggtcggcagaatatgatgcgtggggtaatgtacagcgtgagaataatccacataacatgaaacaactcatccgtctgccggggcagcagtatgatgaagagacggggctgtactataaccgacatcgttactatgatccgttacaggggcggtatatcactcaggacccgatagggctaaaaggtgggtggaatttttatcaatatccgctggatccgataactgatattgacccgttggggctgtttgtacccttagttattggaggttactatttaagtgctcaagctgttgcctggatatcaacgggattatttgcagcagcagcgttgtctacgccagcagctaaaaaagctttaacagatacaacaagcagtttaggtaactgtaaaagcgatccaccagaagacccatgcgacaaaaaacttgataagagtttactatcaaaagcaagcatatttgatcctcatcaagtgaagagagattggatgggagataaagctcaaatatcgagatttgatctttgtggttgtaaagatggtagagtagtaattaaagctcaaggctgtaaagggacaattgcttcctctacagaatttaattggaaataa

SEQ ID NO: 384177 - DNA, 303 bp, Salmonella enterica
atgaaattaactgttgagttacacggtatagatcctattaaaggtgaatgggtcagtatatctaaacatgttgctgaccagtacgatcacgattttttactctatatgattaataaagttttggatgaaggtgccgcatatactagtaacggtttggaaggtttaagaccattacatgttgaattatcaattgcaattatttctgatgaagacggtttcaggcctgcgtttgatattgatgcgcggacaataagtcgacttagttcagcaggagcatcacttgattttgatccatatgtctga

SEQ ID NO: 384178 - DNA, 267 bp, Salmonella enterica
atgaatcgctccccggcgacggctcttgtcataagaacgccgaagcgtttttccatcaatcgcaataatatcgttatcatccgttgtatgacaatctcgcatccagttaataaagcattcatgaaatttcttagggttaatgcaggacaccactcgggcaatagtatcatgaactggaataccgttttcaaagtcaccatattgcttcagaaaatcaatatgagtctcgccaaaatcttcaatatcttcccagccttctgcacctga

SEQ ID NO: 384179 - DNA, 372 bp, Salmonella enterica
atgaaaagaatgattttttttcttgtgtctatttttattctattagttgtatattttatgacagtgaaatttttagcatataagaatgcaattaaaaaagattttctgtggaatggttctcaaacatgtcagttagtgacgtatttgcctaactataccccttatggaatagttggaaagatcttgggtttgttttctaatcagtcattttttattgttcttgacgatcgtgggagggagttaagaagttctgcgtggcgtttttgggagtatcagttttctgatgatatggccccagaatggcatggtatttatgttacctatccgacgaatgatggctggagtggttggaggatccctgaatgtaaatga

SEQ ID NO: 384180 - DNA, 174 bp, Salmonella enterica
atgtttggtatcccgaacgatatcgcgatgcaggtagtagcggtcggctttattatcggcgtattgcaggattcgtgtgaaacggcgctgaactcatctaccgatgttctgttcactgcggcagcctgccaggcagaggacgaacgtctggcgaataacgccttgcgtagctaa

SEQ ID NO: 384181 - DNA, 999 bp, Salmonella enterica
atgatacgtttcgctgtaattgggactaactggatcacgcgccagtttgtcgacgccgcccatgaaaccggcaaattcaggctcgccgccgtttactcccgtagtcttgaacaggcgcagtctttcgcaaatgattatcccgtcgagcatctgtttacctcgctggaagcgatggcgcaaagcgacgcgattgaggcggtttatatcgccagcccgaattccctgcatttctcccagacgcagcgctttttgcagcataaaaaacatgtcatgtgcgaaaagccgctggcttctaacctggcggaggttgatgccgctatcgcctgcgcgcgcgataatcagcgggtactgtttgaagcctttaaaaccgcctgcctgcccaatttcctgctgctgcgggaatcgttgccgaaaatcggcagaatgcataaagcattactaaattactgccagtactcttcacgttatcagcgctatctgaacggcgaaaacccgaatacgtttaatccggccttctccaatggttcgattatggatatcgggtattactgtctggcgtcggcgatcgcgctatggggcgagccgcgcagcgttcaggcgtcggcgaatttattggaaagcggagtagatgcgcacggcgtcgtggttatggattacggcgattttagcgtcacgctacagcattccaaagtcagcgactcggtactggccagtgaaattcagggcgagaagggatcgctggtcattgaaaagctgtcggaatgccagaaagtgtgttttgcgccgcgcggcgcgctgatgcaggatctgacccagcctcagcatattaataccatgctgtatgaagccggggcgtttgcccagcttattgaaaaccacgccgtggaacatccggggttgtcgctaagtcgcgccacggcaaaatggctgacagaaatacgccgtcaaaccggggtcatcttcccggcggacgatctgacccatccccttactgcgtaa

SEQ ID NO: 384182 - DNA, 633 bp, Salmonella enterica
atggggcggcgttgctgcggctggcgtaaacccaaccggcgctgtcagtctgcaggaagtcttaccgggatcaatattccaggttgtccgccaaacccgcataacttcctggcgaccgtcgcgcatatcatcacttacggcacgccgccgaagctggatgcgaaaaatcgtccaacctttgcctatggccgtctgattcatgagcattgcgaacgtcgtccacacttcgacgcaggccgttttgccaaagaatttggcgacgaaggccaccgtcagggctggtgtctctaccatcttggctgtaaagggccggaaacctggggcaactgttctacgttacagttctgtgacgttggcggcgtctggccagtggcgatcggtcatccttgctatggctgtaacgaagaaggtatcggcttccataagggcattcaccagcttgctcatgtcgaaaaccaaactccgcgttcagagaaacctgacgtcaatatgaaagaaggcggcaatatctctgcgggcgctgtcggtctgcttggcggcgtagtcggtctggttgccggcgtcagcgtgatggcggtacgtgaactggggcgtcagcaaaagaaagataacgctgactcacggggagaataa

SEQ ID NO: 384183 - DNA, 552 bp, Salmonella enterica
atggcaacgcgccgtcagccgttaattcccggctggctgattccggggctgtgcgccgccgcgctgatgataaccgtctcgctggcggcctttctggcgctttggctgaacgcgccgtcgggcgcgtggtcgacaatctggcgggatagctacctgtggcatgtggtgcgcttctcattctggcaggcgtttctgtccgcagtgctgtctgtggtcccggcggtttttctcgcccgcgcgctttatcgacgccgttttcctggacgtctggcgctgctgcgtctgtgcgccatgacgctgattctgccggtactggttgccgtgttcggcattcttagcgtgtatggccgtcagggctggctggcctcgctgtggcagatgctggggcttcagtggacattctccccctacggcttgcagggcattttactggcgcacgtcttttttaacctgccaatggcgagccgtttgttgctgcaatctttggaaagcattcccggcgagcagcgccagctcgccgcccagctcggtatgcgcggctggcatttttaa

SEQ ID NO: 384184 - DNA, 216 bp, Salmonella enterica
atgaaagaaataagtgccaaaattcaatttaatacaaagaatcaaaacctgaaggaagtagctgacgaaatgaatgatattaaaatgatccttctaagcgtagctctgaagttagacagtgaaggacgtcagcaaatcatcaaggagttatctgacattaaatccccttctgtgcagcaatgggttagtaacctgaaggagttacatcaggcttaa

SEQ ID NO: 384185 - DNA, 207 bp, Salmonella enterica
atgactttagaacagcgagttgaagcgctggaaaaaacggtaaaggtgttagcagggagggattttgctgtcgatggggggcgggtgttcatcaatgaggcatttatccaagagggggcgactaaagcggcccggaaacaggccgccatttgcttttatatgttaagtttgggaattaagcctgatgtaactccttcaggttactaa

SEQ ID NO: 384186 - DNA, 831 bp, Salmonella enterica
atgtggggggatagggatgtgacgaacagcgaactagaagcgctttacaaatcggctataaatttcgtttttgctataggtaagtttgattctgaatacctaaaaaaaggtatgcaaatcactgatgatgatgttaatcagttgatagaaaagatgatatctcatggcgctattagtgatatggatgagagtgggaactataccccgctcaaaacttacatacatagcgaatatttattgcaacaagagcgggaagatgatgcgataaaagaggagacattaaaaaccaagaaagcaaataaaaacattggattggtgattttctctctggccgtggttgtttttcttgtgacgtgcttctttgcttttagagagccaatggctcttcccctcgtaattccgttagttttgctttgtttttggtgggctgataaatggaaatggaacattggtatcccgtcgactctttctataatcgtgtgcgcattatcattgtcatgggttaactcaatttctcctttgtggggggaaaggtatgagtcaaaaatggaatatgagcgtttaaaatcagccgtgaatgaagatgagcacgcaaagataaggaaaatatctataggtcaggtagcagtaaaggaattgttaaaagatccatcatcggccaagttttctggtgactacgtgggaaaatcaggcgctgtttgcggatacgttaacgcaaaaaacagttttggtgcctactcagggaaggatagatatatctacaatggtggtgcgtacattgatgatggaggaaaggacttttcatccctctggagaaagctttgtagataa

SEQ ID NO: 384187 - DNA, 855 bp, Salmonella enterica
atgactaaccaaatcatcatctccgatatatccattcgtcaggattctgaaggtcgttacagcatcaacgacctgcataaagcctctggctcagagcaaaaggataagcctgttcactggctcgcattgcagaaaacaactgatttgattgaaacaattgaaaaggtaggaaaccttacctttcccccaatccgcaccacgcgcggttgcaagggcggaacctacgtctgcaaagagctggtttacgcctatgccacatggatcagcgctgagttcttccttaaggtcatccgagcctacgacgctctcgtttctggtgatactgcaaaggctgtcgctattgctaaaacaaccgttgacgatcgcacgccactacgcagcctcgttaatcgtattatggcgaagtacggaaccacttatcagtcagtttacaagcttgttcatcgcgagttcggcgttcaacatatcgatgaattatcaccaaagcagactgtagaagctatggagtatcttgcggccaaagcaattgaaggtgaattcctcggcaagcagaaaacattatccacaacatctttgtcggcacgagaggctgattatctaatttggctttgggattatgctaatcgctcccagcacttgtatcgagaactttatccatcaatgaagcaaataaggtctgaatttgcgggtaaattttacgattatggtagtgaattctcgccactcataaaagaagcaagaaaagtgttaataagaatcactcgcgatgtagacataaatgaaccaggtggacctatgaatttatcggcttggatcaggttgaaagataattccatcccgtcatcacttagataa

SEQ ID NO: 384188 - DNA, 1530 bp, Salmonella enterica
atggtttgggggctacttggttgcattctgctgcttttaattattctgctaatctgttttatcaaactcaaatcacagaaaaagaaacatgatgctgatatggagagattcagcaagattgtagatcttgaggcagaggaattaaggttacgcaatcaacttaatgaagaggaaaaatcattcagaaaaaaattatctgatgatgaggagagtgccagacaaagcattcagcaagaaattgaagggaagcgtaaagcattcgacaaagagtttaacgaaaaaagctccgcccttgacaagaaagaaaaggcagtgcaggaggctctttctatccatgaagcagaactggctgctttgaagtcagagtacagagaaaaacgggctcttctcgtaaagctaactgaaaagctatccagtgttagtgatgctgctgcaatgattgattatggtgtatatgagccaaccttcgattatcatgattcagtcgcttatcaggaagccattaccaaaaataaagaaaggcaaaagatcctgttgagacaagaggctgcatgtgatttcagcaccgactggcaggtcaatggcagtaaagctgaaggcaaaaaaatggttaagcgctacgtgaagctgcttgtcagggcgttcaatagcgagtgcgatgcagcgattgctaaaataaaagccggtaatgttgaacaactacagaagcgaattgagagcgctttcgatgctataaataagttcggcgagtccatgaatattagaatcacgtatgattatcttaacctccgccttgaagagcttctgctctgtcatgaaaaggagctgaagctgcaagatgagcgagaaatactaagagaagaacgtgagttgcagcgtgaagaagaaaaagcccaaagagaatatgaaaaggccatccgcgaggagcagaaggcagaacgtgacttcgaaaaagcgatggatcgggctcgcaaggaacttgagaaagcaacaagtgcagaaaaagaacaaattgaacaaagaatcgctgagcttgagcggcaacttgaagaggccaggaagctttcagaacgagcaaaatctcaggctcaactcacccgcagtggtcatgtatacgttatctcaaatgtgggtgcatttggcgaaggtgtatataagattggattaaccagaaggctggtgcctgaagagagagtcaatgagcttggctcagcatctgtgccgttcaagttcgatattcatgcacttatctattctgatgatgctcctgctctggaggctagtctgcataatgagttctcagctcatcgagtaaacctcattaataaccgcaaggagtttttccgcgtaccactgaagtctattgagcagaaggttaagagtcttggctttgatgctgcgtttgtagaatttgccaaagcaccagagtacagacaaactctggccttgcttgatgagaagagcaaacgagaaagtcttcatgaagcgattgagcacaaagttgaagaagaattcccagaaatggcttag

SEQ ID NO: 384189 - DNA, 174 bp, Salmonella enterica
atgattatgtcttttgccgcgccagtagcagacagcaagcaagaaaaaaactcttatacttgcaccatgacatatagcaaagaggatatggagtggttcagggaggcgatgtcttcaaaattggaaaacatcgaaaaaacattatatatcctgactaaggaaaagaaagcttag

SEQ ID NO: 384190 - DNA, 522 bp, Salmonella enterica; identical to SEQ ID NO: 380423

SEQ ID NO: 384191 - DNA, 297 bp, Salmonella enterica
gtggaaaaagccgctgagcagtgcatacaacagcgacagacggtagtgatgcttgtgccagaggatatgtcagtcggatggttcagcaaggctctggagagtgtcgacgaagttcgcattatcactgatggacggattaattttatcgaaccatcgacagggctggagaagaagggaaacagcaaaggctccatgctgctgatttggcgaccgttcatcagtcctcgacggatgtttactaccgtatccaaagcgacattgatggcgatcgggcagggcgtcaggagggcggcatga

SEQ ID NO: 384192 - DNA, 249 bp, Salmonella enterica
atgactatcaaatcaaatacgccagcacacgacaaggactgctggcaaacgccgctttggctttttgatgcactggatattgagtttggattctggctggattcggcagcgagcgacaaaaacactctgtgcgctcactggctaactgaggccgacgacgcgctcaattctgagtggttaagccacggtgcaatctggaataacccaccgtacagcaatatcaggccgtggggtggaaaaagccgctga

SEQ ID NO: 384193 - DNA, 447 bp, Salmonella enterica
atgaaacaaaccatcttccttcgaagtaagcagcaacagcagtcagcaataaacgccatcctcgcaatacccctagacgaaaagtcaccacacgaagtccacatcaaagagcccaagagaaccaaagcgcagaacgaccgtttatggccgatgctgcatgacgtgtctcaacaggtgctatggcatggaaatcgttacgacgaggcggactggaaagacatcttcaccgcgctatggctgaagacgaaaaagcagaatcagagaagtgctccgggcattgatggcggagtcgttatgtttggtgtgcgtaccagcaaaatgcgaaaggccagcatgacagaacttatcgaaatcatgttctggttcggctcagagcgcaacgtgcggtggagtgatgactcccggcgagagtatgaatggtcacaacgaaaagggaaggctgcatga

SEQ ID NO: 384194 - DNA, 216 bp, Salmonella enterica
atgagcacactcgcagaccttattcatgccgatatggcggaagatggagcaaggcgtaataggtactggaaatcatcaagccttccagtttgtgaaagattcaaccacaggccaaaaccaaaacgtagtcgaagagacaaggtgttgaaaaaactcatgcaaattaacatggctggttttgtcagattcgtgagtgaaacgattaacggggattga

SEQ ID NO: 384195 - DNA, 183 bp, Salmonella enterica
atgaatctggacgagcaagatgcacaaactattagctcatacataagggcatcaagaccagattacaaaggtccggtgttcgtagatttatctcgccttgaagagatttacatgtgggaagcaaggctacttacgcatctttttattcgcaagatgactagcaacattacaaaaccaatgtaa

SEQ ID NO: 384196 - DNA, 678 bp, Salmonella enterica
atgagcatgaacttgatggcgaaggccatgagcataaaggttggcaacccattgagaaaactggttcttataaagcttgccgataacgccaatgatgaaggagagtgctggccttcatatcaacatatcgctgaccaatgtgaggtgagcagatcaaccgtaaaaagccacattagagcacttgaagatatggggctcctgaaaagggagttcagaagaaaaggagagcttaaccagtcaaacgttttttatctgacgctggataatgcacaacaaattccaccagaatcaggtggggcaggagctgaccggggtggggcaggagctgacctagggggtggggcaggagatgaccccagaacctatcactcttttgaaccagtcaaggaacctttagaacgcaagaaaaaaccatcttcgatgccggaaggattttcaccatcggcctcacatcagaaaatggcagaagagttcgggatatccttacaggatgagtttgataaatttaccgaccatcacctcagcaaggggagcaaattcattgactggagtcgcgccttaaatacctggctcagaaatgccaggggattccaaaaatctcgagcttgtaactctttctcaaggccatcatccgcaatcaccgtatcgaaaactggctacgtgtttttcgacaggtga

SEQ ID NO: 384197 - DNA, 144 bp, Salmonella enterica
atgcgaaaaactccggaaaataaacgcgttaatcaccaaaaagatttactgcgtgaccagttttatcagggcgttaatcctgcaatagccgcgccactgagagaaatacttaacaagtacaaaacttcggagaagtcaaaatga

SEQ ID NO: 384198 - DNA, 141 bp, Salmonella enterica
atgaaaaccagaaccgcaagcctcaaccttcccttcatggtggaaggttttgccaatttcaaactggaaatcacggcacttgagttctttattgaatcccttgaaagtcacaatttcttttgtcatgttgttattccttaa

SEQ ID NO: 384199 - DNA, 360 bp, Salmonella enterica
atgagcaacatcgacaaactcaatgaccatgaactggttgatctgaaaaacgctatcgaaagagagcttaaacgacgcgctgatgggccaaaagtcaccacgtattatgtcgtatcctgcatcactgattctcagaattttactgatttggactgcgctttacgttgcttaaaaagtgtcaccgaagaccttatggagtgggtagcggaatccctagaaaaccgggattatgccaatcgatgcacaggcattgttggggcaaaactccaagtggaggagatgaatctcgatcacttcaacatgtgcgtcgcagaaaaatatttcgacgatatttggtatccaccggagacagcccaatga

SEQ ID NO: 384200 - DNA, 522 bp, Salmonella enterica
atgcctgtgaaatttactaaagagcagcttcatcaggtaatccgctacaaccccgacacggggaaatttcttcgactgacgacgacaagcagtaacgcaattgctggagaagagtgcggaaacttagattcacaaggttatttaagatttcgcgttttgggtcaagagttcagagcgcatagactcgccgtgttttatatgacaggtaaatggccgctcgtaaccgatcacatcaatggaaatagagcagataacagatggtcaaacatcagggttacagatagtaaaggtaacgcaagaaatctctctactagacatgacaacaaatcagggcacaaaggcgttacttgggatagcaggcgcgagaaatggcttgtccagctcggcagggatggagagaaaataacaatagggagatacagggacaggggacttgcagtcgctatggcaaaagctgcttatgagtatctagctccagatgtaacacaccgcgccgccatgctcaacggaggtaaatcgtga

SEQ ID NO: 384201 - DNA, 822 bp, Salmonella enterica
gtgaaagagaatcaaatccgggaactggtaaacgatctgcgtgatattgctgttgagtatcacggcacacagcagttacgtgaacgaattgcacgcacagttcgcgccgcctggcatcatgacttagaaaaaccaaaccaacctgtaagccaaacttacgagttgccacaaacgcagtttgaacaggttgctgaactctacgaaatgcaatttgatgatgggcgcacctgcgcattccacacagatggtgcaaaagctgctcagtggttgctcgcatgcgatggtaataaggtgcaggaatacgtcaggattgagcgctatcaggaggctgtaattggcaactctccggcaatcggcattggcatggcatctgaacctgatcgctcggtggaagttcgctaccttgcgcctcctggctacgtgatggttcctaaggtggtgacgccggaaataggtaacgcaataaacgaagttggtcagcgctgcacatgcggtaattgctctcaaagattatggtatttattgctcgcagcagcaccaaaaccacaaaatgcgccacaaaatattccggaaaatattcctgctggaaaatcaacgttaactcaggatggctggataagctgtagcgaacggatgccggatagcaaaacaggagttcttgttgccagggagtttgataggaaaggtgactggcgaatgaaatgggcgacttacatcccaggacatcctgacgctaatgatgggtggataattcctggtgcgtcgtggataccatcacactggatgccgctgccagaaccgccgcagcaggaggtgaagtag

SEQ ID NO: 384202 - DNA, 360 bp, Salmonella enterica
atggtggcaagttactcgcaggctaagctgcaaattgacgattttttgattaaaacgcgttataacattgattcacaactttcaagatacgccgctgcaaaagagacttactcagtggcggaacgttcacatacaaacgcgttacagcttactgaattatatgagcaggagtttcagttagggcaaaaaagtttgcttgatttaatttcaagccgtaatgaagcatttcaggcatatgtaagcatgatcgacagcaaatatagcctgtatattttaaagttacagcaactctcattgatttttcatttaatggattatttaaaaggaaatactgaaagtgagttaaatgtaatgaaatga

SEQ ID NO: 384203 - DNA, 273 bp, Salmonella enterica
gtggactggctgatcgccgagcgtcccggcaaggtaaaaaccttgaagcagcatccgcgcaagaacaaaacggccatcaacatcgaatacatgaaagccagcatccgtgccaaggtggagcacccgtttcgcatcatcaagcggcagttcggcttcgtgaaagccagatacaaggggctgctgaaaaacgataaccaactggcgatgttattcaccctggccaacctgtttcgggtggaccaaatgatacgtcagtgggagagatctcagtaa

SEQ ID NO: 384204 - DNA, 258 bp, Salmonella enterica; identical to SEQ ID NO: 144505

SEQ ID NO: 384205 - DNA, 1641 bp, Salmonella enterica
atgagcagattttatgatttcaatgcgttagaactaatggaaatggcccccatatctatcttcagtcgtaacaaaaatactgagattttcctggatgatcaattattagagcaggaacgtcgccattgcctgtcggttcatattttttgcagaaagctcgaaagatttgaagaagaatttaacagcaataaaagttccagaaatcgcttggttaagttccttgaatcacaagaatgcgattttatctatgatatagctaaagagtggtcatcttacaatttacaaaaagttcctcaaagcacaacttatacgtacttgaaaacacttgtcgaacacatcaacgaactcaaaagtaagtttggcattatgagttatgccacttatcacaacaattacattcataacttaattacgacaatcaatgaaaacctcgtaaatattaattatgatttatcccttattacatcaacaaagcgaaattggaatctttatcgaactgaattcggactaattctagcgaacgggattaggaaagtattacttattgataaattagaacatttgaaaaacaaagatcttaagccgggacttattttcttcattacaacgccagtgtcacaagatgtcttgcaggatttattttcacgtcaccagccttacattatgatttataggaatgaaaaaggcattataaaaacagttgaaccacttcatctgcttaccgatgctctttatgaaatcatttcactggcttcaaatattaaaaataaagactcaatgttctttgaacctaaaaataagttaacctctattattgaagaattgtttgagctccagaacctttttgaagaatacatgcgccagagttttatgcaggtcagattaagtgaaagaaacacacaatatatatataataaaatcagatcacttaaacatcaagccaatcatcttgagtttggaaatacagaaaaaatacggacgctcgcttttaaactaggtgtattagctgattcatttaataattacgatgttaaaagcaagacaatcgaccttctgcctaatactattttcactggcattcagaacattaccagcaacagtaatttgtatcgtgtgaaaaacgacattctgttttatgaaaataaccttacagcatcattattaacctggttgaaagcaagccttgaacttaaaaagtttatggtggtccaggaagatcagatcgcaaacgggcgaagtgatatttctattttctcttcaggtgtgagagtttgcattatcgaatccaagttaatacaagaacattccaccgaagtgccaataaaatctgtaataacaaaaggaatatttcaactttatacaaagtattcagactctgttgctcagtcatttatcgttccgcctgacctatatctggtgttattctgctttgaccataaatttgtgaatattcgtaaacacactgaatcagcgcttgaagactaccaaaaagaaaacagaaatattaaacttgaaatgatgcacagcacccatcatcaaaccatacgctttagcttgcgagagtctggcggaatatttgcggataaagtcgtttatattaacttaactatagcaaatctcaggacaaaggataaaaattga

SEQ ID NO: 384206 - DNA, 462 bp, Salmonella enterica; identical to SEQ ID NO: 158969

SEQ ID NO: 384207 - DNA, 531 bp, Salmonella enterica; identical to SEQ ID NO: 158970

SEQ ID NO: 384208 - DNA, 426 bp, Salmonella enterica
gtgactgacaagacatctattttagttcttacgccaatcctggagcttgcagaagaagcccataagtccttaaaagagaaccttaaggaaattggaacaagtgacacaaccggaacatgcatgttcgcatgtatattggtttgtaaatttgcacgactcagaggcatggtcgcaagtatacgcggcgggaatggtacagataatggaggtcttttcaatgagtatggaggacatggccactactggtgtgagctgagtgctggaggaatgactttttatatcgatattgctgccgagcagtttggatacccttctttcattgtcaaaaatgccaatgacgtgtcggactttccgcgatatatccccggcaaccaagctacagtagatgaacacgtgaggcttgcgtacactgaagggattcaatag

SEQ ID NO: 384209 - DNA, 3342 bp, Salmonella enterica
atgggtggcctggtcagcaaaactaacattgatcgccttgaacgttttcattctctgctggcggggcaatactggtccgccctcgtcgatattccggcagaggcgattgcggccggggatacactcctcatcaactcgttgcggtacgtggatgacaatctgcataccgtcatccttcgtgcccaccctcggcactacggggaatgggtaaacgttgaagtcgttgctgagaacggctcaaaatcaacgaaagacaagaaactgaatgaacatcggtttctgacggccgattttctcgccttgtttgaatatcagcccgaccatgaatcgatccgtcagtcagagctcaaaggcattcaggacgaggttgctgacctgcaaatgcgtctcaccgaaacactgaaaaatccctcagatctccgggaactggctatgaaaaggatcgaagacgaagaggccagtaaaagggggggcgagtcagacgacagaatgcttccggtcgtcagaaatgcagaagatgccgcagttaccatggcgctgggtacggtgcagaatgccctttctcagggaatttccgaagctcaggtttctctgatggcgaaagtcgcggaacgggaagggaagattgccggtgccgtagctaacattattacgtcgcgtaccggtgctattacccgggcgctggagaaaatgcatccgtattatgcggagctggccgctgccaagttggccggaacgcaggagggcattgagcaggctaacaaaattcaggccggtgttctcacgctggaattattcgtcggcaaaaacgtgacggtagtcgatattgctgaaggcgagccagctgacagcagcattccgctgacgctgtgtcagaagaagctcgtagtggatgaggaactttcagcctggtgtgacatcgacgaacactttgatttcaggagtctttccgcattccacaaggcgctaaaagataaccctgggctggtggagcaaatttttccgactgagcgatgtgtactcgtcatggtaaccacccgcagatttattgactatggtgatacctgggcgaattcagaatacaatgaaaagaacagcatcgtgtttctgatggtccgcaacgggcaaaacatcaaacaaatctattccccggtggaaagccatcttggagcatcacggttatttccgtctgaagatgagcagcagggccactttcgtgggtttgacggtaccaccatcaaatttgaagatgtggcctataccgatcgtctcaaatcccatgacctgatggctctgcattaccgacgtctgcttatcatgctgtttggtcttgaccagcggctggctctctttggtcagttctatcccaagcatgaaaaggctaatttcctgaatctgagcttccaggagcggtacttccattttctgcacgatgaagacggcacagggctgctggcatcaccagactcgcagacgctcgatgaatttattagtgaaaaaaactcctatatgcaaccgggctcgcggctgctctgcaactggcgtgagcttatgacccccagaacagcacctggtgccgtcaaagaggacagcagctattcagggtactccttcatcgctgaaccagagaataatgtctctgctgcggttgtgtatcgtcagggagatagtctggcagttgatgtggcggtgaagcgctacagaacagataagatgtttaactgtaaggtaaacgtttctggctacaggccgtggcgccggggagaagcagagcttgcatatctgtgcctggatgcagtgggcccggaggaactgaaccgttttatccagcagcgcaaattccggagtaaccaccttttttacattcgattttttaaggccgcaatcaaattcctggagcaggaacgtgaaagagaattgccgcaccggcaatatctgctgactgcaatgcaggattcggggttgcgcctgccggtgaacattcatgaactgattcatcagtgcattgcttcatggaagaccggtaaccgtggcgtttcgcttgatgatggaatgcgtttcgaaaaagggcgccaggccctgctgaatcaactttacaggctcactcagggtgcaagcgaaatggcatcggtcattcaggagcaggtaactgcgtccggatcgcaactgcttcgggccggggtcaactcgtcagggaattacgtcgcgtttatcgcgcctaaaccctatgagtgtgataacagacttgaagctcatgcgtgggtccatcgtgttgtctatgcaaccggaaaacgaaacattcgggaaaccagcagatcctgggtctctatgccggagcgttcggcatccgaaattaccctttgggaagatgaggagcagtctaggaaatggtactccatgaaaccggtattcagttcgtgggccgaaaaacaaaagctatttgaaatgtgcgaaaaaggtgcggaattactgaaaggggccatgggcaagtcgggacatgaggaatatagcgatctttttgagatgtggggagatgcttatattgcatgcaactccaactctggcgcggaatacgtaacaaccccggatatgttcctcccggttggcttgattaagtcacgaaactcattacagctaattgcattagggacatgctcaacggagcaatggatgtatgcccgggcaggggatgatgacacacgggagctgttgctggagttgtataccagttggtatgaatgcccggataaagcgcgagcaagggtcctgtcgatggcagagaaaaactcaggtctgaggtttgtgttgcttgaaggaaaggcaaagaaactggagcggtttgttgtcaaacggccagaagagattgttaactggcatgccggtgatttaaaggaattcccgacaatgctgaatgatcaatgggcatgtcacatggcaatggtcagtcggaatgataaagtttatctgacgccggatttgctggatgatgatggcctaccaaattttaatgaagtcacaaggcaggagcccggagacggttatcaacccgtcaatgtctatgaatttgagagtgattattttaacgcgatctatgatgcagacggtaagaaagtggtactttgtcactggtatgatgtgacgggtgattcatatactgctgaagatcttacagggaatatgcctcatgacgcatttaaattccttcagtataggctggataatatcgagcaggctgaggcatttatcaaatacagaaaccgtaattatcagtcccgagaaaattcagattggcccgaaccgcctgaaggtgtaaagcgttacgtcatcagagcccgaagctaa

SEQ ID NO: 384210 - DNA, 630 bp, Salmonella enterica; identical to SEQ ID NO: 144507

SEQ ID NO: 384211 - DNA, 789 bp, Salmonella enterica; identical to SEQ ID NO: 199537

SEQ ID NO: 384212 - DNA, 1242 bp, Salmonella enterica; identical to SEQ ID NO: 199538

SEQ ID NO: 384213 - DNA, 651 bp, Salmonella enterica
atggcaaagaaaaaagatgatggttcagcagtaatactactttttattgtggctttttttgtgttcctgccgtttctgatattcgggatgtttttctaccgaaagctaaaaagaaaatattcagctatccccaacattcaacgtgtatatgatattggcgtcctttttaaaacgttaagtgcctctatcgcagttattgtggtttcagcagtgctcgttctgcaactcagtgcgcttcccgtcaaatttgtatcgccagaaatatcacattatatagcaagagttatgttcgttctctatccacttgtaatgatctggccaatgaaaaaaatggcggaacgcatcgccatagaatatttcggtataatttttaacgacaatgacagaacgataattcttccagcagatttaggcaatatgggattgggtgactggcttcgtctcaagtttctgagcaggatgggtgagcaagacagcattgagattcgaaaaatatcgaatatcacacgcgagaaaggtgtcaacttctatatccatggtgatttcggatcccgacgcatcaacttttcgaacaagcaaaagcgcgatgagtgtatttcagcacttcaggccagaacccgggtaaagggtggcagagactacggttactaa

SEQ ID NO: 384214 - DNA, 810 bp, Salmonella enterica
atgactaaattaaattatttaaaaccagtggcgtctgttttaatttctgcggtgattgcggcggttggttctgtgtatatcacgtcgaattattttaaaccccagactctcagcagcgatgaaattggtaaactagccgccaattatctggtaaaaaaccccaactatctggtcgaagctggtaaggcgctagaaaatcagaacaccagtgcatccctggagagtatcattccttacgccccggcactctttgagacgaaagagacaccaaacattggtcccgataatgcggccgttgctgtcatcgaattcttcgactatcaatgccatttctgtatgcaggtagctccggttgtggaatcagtgttgagtcagagcagtgatgtaaaattcttcttcaaagaatttccgatcttcgccggttcgaaacaagtttctgcgatgggagctgcgactggtctccatgtttaccagacatatggggctgaggcgtatcgaaagtaccacaataatgtgatgaatagcgcatatgtgtttttcaaaagtcagcgtgaatttcagatccgggatttagacatggtggtgaataaatctgggttcaacagttcatttggtgacggggagaaaaaccggtatgagaatgtcatctcgggaaacatgcagctgggtgaagcactcgggatcaacggaacacctgggttcattattatgaacatgcaaaaacctgaggctgcaacgacatcattcatcccgggggctgtcgacgaagctaccctgaaatacgcaatccagaaggcccgtggtggttaa

SEQ ID NO: 384215 - DNA, 612 bp, Salmonella enterica
atgttacggcatattttcttacttaccgccacaacgctgttatgtggatgtggatatcatttcggaaatgacgtggatgcctacgatttattgccccgcccggtaggaggtaagaaatttttaattgtcgcgccggatgacaatattcagtcacggatgtttgcagcccggtttgcgagtggattagcgggtaagggttttaaaatttccagtcatcagcccgactatatcctcagattcagttacagcatgccccaggaaaatatgcaatacagtgaacagctggtgacgggcataaccggatatgtcgtcgagaagaagacaacgaaaaaagataaacacgggcagactcagacggactatgactataaacccgtcagcgggatcgtggggtcagagacgatatcacagaggcatttctggcgccgccttgatgtggaagtctaccctgcggggaaaggggcacaacaggttcttaaagtcagtatgcagagcaatgcgccaatcccatcggacagcattgcgtattccgcaatgatcgacgctctggccgggaaactggatgccccgctacgctccggaaactatgtcgcatcggttccctggaactaa

SEQ ID NO: 384216 - DNA, 393 bp, Salmonella enterica
atgaaatctgcaatactgacaacgttaatgctcgtggcggttggcactcaacccgtctttgcggcccaatgccagttcgggtcctgcaacgcagacattgaggccagcagtgaactgctggtctctgcggctcagacggataaagacgcggttttaaaaaaacttaatgacgcatcatcccccagcgacgccatgtctaagcgggttgaatcgtatctgaataatgacaggctaaaggtgaacaccgacagtacccggaaaggtccgggcaatggaatcgtgaagccgacggatgagctagcgccggtaaggcagctgaaagccattcgccccgagcttgtacaaaaccccatcacccagccattggttgccttttatgaacgtatggcctga

SEQ ID NO: 384217 - DNA, 567 bp, Salmonella enterica; identical to SEQ ID NO: 199547

SEQ ID NO: 384218 - DNA, 2967 bp, Salmonella enterica
gtggctgagttaatgatgaaggatgtttcgagtctttcaccatttgctcagattataggggatcagaaatacactgtaccggatcagccgaatcttgaagtcctgaaattcattgagtacccaactcggccagctgggatacaaacgtttaatgagcagtctattctttctctttacagagataaactgcactcaatctctatgatgctggcaataagtgatggagacatccgtgaggatgcctttaccttcaccaatctggttttaaaaccattgattgaatacatccgttggattcatttacttcctgcttcagaaaaccaccaccataatggtattggcggattgttgtcacatagcctggaagttgcaatgatttctttaaaaaatgccaatcattctgaattgcgcccaattgggtatcaggatgaagaagtcattcgccgaaaagtatatctctatgccgcttttatctgtggccttgtgcatgatgccggaaaggtatatgacctcgatatagtaagtctgaatctgaatgaaactttaacatgggcgccaagctcgcaaagcctgcttgactgggcacgtgaaaacaatgttgtcgaatatgaaatacattggcgaaaacgcactcataaccaacataatatatggtcaagcgttttccttgagagaatattagatccggtctgtatgtcattcctcgaccgtgtcaaaaaggagcgcgtctatgcaaaaatggttacggcactgaatgtctataacgatggcaatgactttctgtccaaatgtgtaagaacctcagattattattcaacgggaactgaccttaatgtattgagggacccgataatgggtctgcggtcgaatgatgctgcggcaagagcaataggtaccattaagcataacttcaccagtattaatattaataactataaatccaaacccatgcacatcattattgtaaacggtgaagtttacctcaatgaaaacgccttcctcgactttgtacttagtgattttgcggcccacaagttcaacttcccacagggggatgcaggtaaaactgtactagtagagtcgctggttcaacggggttatgttgagccttacgatgatgagcgtgtggttcattattttattcccgggacatactcggaaaatgaaatagccagcatcttccgaaacggtatcggtaagctggaattttataatctcctgaaacttcgctggatcgggttaatttttgactcatataaaatcccggattctgttccgggcctcttcagcgttaatgcaaataaagatttcatctatattgatgaacagaaaactgtaacagaatacagaaggccggtcccgggtcgtgagtctgttaccagagtaacggacaccgtaagcgacgccattgaagatactccacaatacggactcaaactcgtgaacggccctgatgccgacagtgtcaacggtaaaagcagtgaaaatactgaagccatcacagaaagtgtggaggcggctggcacggataaagcaaccgatattattgatccgcaggttactacgccaacagatacagccggaacaggcggcgtggatgaaaaggaacgggtagaggaacatgaagagcagagtcagatgcgtctggtcgagcagctgcatgaaatgcttctgagcgccccactgccccacaacgcagtcattaatattgattccgtaccttaccttaatctcgatgctgctattgcgttaatccctggtattgatgaggcggcattttgtgatgggccctttttccagctgacgtaccgtgatggatcactggatggtttgtggatagtccgtgacgtaaacaatctacgcctgatacaactgggggataactgtgctggtattcaggtgagcacctcggaaccccgaaccacttctacgctgaagtcgctttttgatacgtcaatgtaccagccgttggaaatccctgaaagtccatcattaaacgaagcggtttcgcccccacaaacaccgcttgatctccctccggcgcgactgaataccccccaggctgtagaggccaattcggtagctgaacagattaacgcccactccgaaccggagaccgtcactgcttctgagtatgagcaatatggccacctgctggaagaaaccctagatagcgatagtgaggcatattctgactttattgtcgccgacaactctgtggttgaacccccccagcctgaggctaaaaatagcgatgtcgccgaattccatgatgaaacagaccaggtcgttgcgcccggtaaattgaatgatcctgaggataccagtgagccaccagctcccaatacaaccgggaaagaagtaattttaacaagtcctgtgtcatcacaggaccctataaaatcggaacccgccggggagaaagcgaaccatctatctccggccctggctcgtctgtttgcggtaaacactcaagcagagaagaagcatgaaaatccgccggtaacgactccagtgaaagaagcctttaatcgatccaactctgccacagttcaggctcctattgccgttgaccaacctggtgcagaagagaaggagacactggaagattttaccctgctaagtggcggtgaagttacagaacttgaatacgtcgaaattgccacaatgcttcaccacattctgactaagttatctgggtcgtttaaaagaaagcggaaaaaccgattcatggttttgacccagaacaccttttttctgacccagtcatgtgttgaaaaatacgggacgcagttaaatgcgcctgagctttttaaccagcttcctcaataccaggtcacctccggcgccatagtcaatacaaaatgtttcgcattcaacatgccaactctggtagccgcatccgaccgggcaaaggtcgatattgagttaatcattaacacacttaaagatgtagggaatctataa

SEQ ID NO: 384219 - DNA, 360 bp, Salmonella enterica; identical to SEQ ID NO: 144460

SEQ ID NO: 384220 - DNA, 315 bp, Salmonella enterica; identical to SEQ ID NO: 144461

SEQ ID NO: 384221 - DNA, 237 bp, Salmonella enterica; identical to SEQ ID NO: 144462

SEQ ID NO: 384222 - DNA, 546 bp, Salmonella enterica; identical to SEQ ID NO: 144463

SEQ ID NO: 384223 - DNA, 438 bp, Salmonella enterica
atgtacagatatgacaggaaccggcagtcgttcaacctggtcaatgcgcttcagccggtctatcgcaacaacggtggcggtttgtttgagttcgaccgcaggaagcaacatgaaacggctgatctcatcttcgaggcactgacgttttcccaggcgcccgaactggagctggcgaaatttgtccgtcttaaatctgtgcgccgaattgcacagtttgacgacggtgaagtgcgctatggcgttcacgttgaactggccgacgctgttgataataattccttcagaattttcaaagatgataatacaggtggatttgatttttatttattttctacttcaaataatgaagcagagcttgtccgctttaatctggatgtctgtggtattcatttacaggacatttttgaacggtcaaccggcttgtgtctgtcgtactga

SEQ ID NO: 384224 - DNA, 297 bp, Salmonella enterica; identical to SEQ ID NO: 144465

SEQ ID NO: 384225 - DNA, 282 bp, Salmonella enterica; identical to SEQ ID NO: 144466

SEQ ID NO: 384226 - DNA, 195 bp, Salmonella enterica; identical to SEQ ID NO: 144468

SEQ ID NO: 384227 - DNA, 255 bp, Salmonella enterica; identical to SEQ ID NO: 199404

SEQ ID NO: 384228 - DNA, 408 bp, Salmonella enterica; identical to SEQ ID NO: 199403

SEQ ID NO: 384229 - DNA, 312 bp, Salmonella enterica; identical to SEQ ID NO: 144475

SEQ ID NO: 384230 - DNA, 333 bp, Salmonella enterica; identical to SEQ ID NO: 144476

SEQ ID NO: 384231 - DNA, 570 bp, Salmonella enterica
atgaccgaacaactatcggatgaaaaactgcaccagctggaaggtgctgccgcaaattaccgtacgacataccaggcgcacctcgctaatccactggatggctccgcagtacaggactgggatgaagcgacccgtcaactaatggcggtcatcaattacgatgaagccaatattatcgcgcacctactggctcgccgggatgcagatcttgccaggcatgaaagcgacatgacccgggctatcgcagcttggcagacggcatccgcgaagctgtccgagcaggccagccagcaaccagaattccacctccgccgtgttggtggggacgaggagctctatgccccttgtggaaaagattatccacggggaagagcgtactacgttaagccggtagtgagcctggttaccgtaaattgtccgccctgcgaccaatgctttgattctgccgacgccgcaacggcctaccgggatgagcagtggagacatgtgctgagtgaagctggtgtgctggttacgccgggggagacagccccggttcagcccactgaagacaagccgctttccaaatag

SEQ ID NO: 384232 - DNA, 363 bp, Salmonella enterica; identical to SEQ ID NO: 144478

SEQ ID NO: 384233 - DNA, 207 bp, Salmonella enterica; identical to SEQ ID NO: 144479

SEQ ID NO: 384234 - DNA, 216 bp, Salmonella enterica; identical to SEQ ID NO: 199397

SEQ ID NO: 384235 - DNA, 606 bp, Salmonella enterica; identical to SEQ ID NO: 144481

SEQ ID NO: 384236 - DNA, 282 bp, Salmonella enterica; identical to SEQ ID NO: 144482

SEQ ID NO: 384237 - DNA, 354 bp, Salmonella enterica; identical to SEQ ID NO: 144483

SEQ ID NO: 384238 - DNA, 204 bp, Salmonella enterica; identical to SEQ ID NO: 144486

SEQ ID NO: 384239 - DNA, 294 bp, Salmonella enterica; identical to SEQ ID NO: 199389

SEQ ID NO: 384240 - DNA, 528 bp, Salmonella enterica
atgctttttggtgaaattcagctatcgaatcccattaagagaggtactttcagtccaaaggcaccttttcaggtcgattcatccaaatgctttccggtcaaagacaccgttacggcgccattcatgcaaatgcctgtcaaccaaaagcaccttttactatcccattcatgcaaatgcttttcgaccaatgccccgtttgctgcaccattcatgcaaatgcttttcgaccaatgccaccgtttgcggccccattcatgcaaatgctttcagctaaaggcacctttttactgtcccattcatgcaaatgcttttcagctaaaggcatcttcccgcctcattcatgccaggggtttccaacgtaggcaccttacacaaactcattcaagcaaatgcttttatacaaaaggcacttttctgtcgccattgaagcaagtgcttttcacaaaggtcacttttctccccccattgaagcaaatgcttttcaccaccactatgggatttttaaacgattttcttttattttcatga

SEQ ID NO: 384241 - DNA, 390 bp, Salmonella enterica
ttgggtaccagttattactaccaaactgagtacattccaaaaggaacagtgaatatagttcccgatgaccaccgaccgggtgagacagttgacgatgcgtttgaagaacatacgataattataagcgaccctacccttgcgcaaaaattcgttggaagctcaaccgagtttgaaagtcggcgcggagttaaggaaattaaagaagttggttcgcttaataatggtaaggattttgcccctgttgaatccgataattcaggattgaattttaaagataaatggcccagggcgggtgaaccttatatcgtgcctcagatgacagaaaacgaacgaaatttgaaagttaagcgcttccagcaaccaaagagtggagttaataatggacattaa

SEQ ID NO: 384242 - DNA, 507 bp, Salmonella enterica; identical to SEQ ID NO: 144612

SEQ ID NO: 384243 - DNA, 2682 bp, Salmonella enterica; identical to SEQ ID NO: 199513

SEQ ID NO: 384244 - DNA, 549 bp, Salmonella enterica
atgtggcaactaacgtcaattccccggtattcaaaagcatctctttttgggctggcgattaacggggttaaatgttccggcactcaaacagcgtccctcccttggctggcgattaagggggttaaatgttccgacacccggacagcgtccctcccttggctggcgattaagggggttaaatgttcccgcacccaaacagcatcccgccctgggctggcgattaaggaggttgaatgctccggcacccggacagaattcggccttgagctggcgattaagagggttcaatgtaccgccgctccgacagtatcccgcgctgggctggcgattaaaggggttaaatgttccggcacctggacagtatccgccttgagctggcgattaagggggttaaatattcaggcacccgaacagtatcccgccctgagctggcgattaagggggttaaatatacaggcacccgaacagcatcccgccctgggctggcgattaagggggttaaatgtgttccggcacccggacagtatcccgcctagagctggcgattaa

SEQ ID NO: 384245 - DNA, 1005 bp, Salmonella enterica
atgagtgatgagcagcatatcgggaatgacaaatcccgttatattaatgcacctaagcgtactgaagtcagccatcgctccgggcttccaggcctgaaatcacagcctcgactgaggaagctgtttgctttacataatggacgtaagctggaagctgaacacatcattgtaccggctgagaaggtggaactggaaaccgcagtacaccctatgaacccacgaaaccaggaagctctcactgtaaatgcagttcgagatatcctggaacaaattaaggtacgtggtgttgatacagaaggcgttgctgtcaaacgaaatggggtgtatctgcttatagagggcagtcgtaggcgtttctgttgtattcaatctgcgaaggatttgccactatgggtgttgccggatgaattatccccggaagatattaattccatcattacagcagcacagacatcacggagattttcttaccgtgaagttggattccagtatttacagaaaatgaaagaccttggatttgcaactaatgaagagcttgctaattatctcggaatcagccatgtatctgtttctaagcgtatccaggcggcgaagatagataattctcttattgctctctttcctgactatgaaggtattcctaactcgtattacaatcgcttatcccgactacagaagtacgtcgaaaagaatttattctctcttgaggaagttgtagataatgttcgggaggaaataaggagcttggatgtaaccgatatttccgaagcacagaagacagtaatagataaaattactacagtagttgaacagcttgacataaaacctcctagcaaggggtgggaaactcgtgaattagccgtgtttgataataaagataaatatgcaaggattagcaaaaatgcgtctggaagaaaaattaggtttgaatttaatagaatgaatagcgaattgatcgcagaaattgaggagtttataaaatcgaagttgaaagaaaaagaataa

SEQ ID NO: 384246 - DNA, 393 bp, Salmonella enterica; identical to SEQ ID NO: 199517

SEQ ID NO: 384247 - DNA, 522 bp, Salmonella enterica
atgattaaagcagccggagtgatttttatctgtcttttgactggctgtcagtcggttggaagcaaaattgcagacctcccctcagtaggtttcgaccctgtgatgagcaacaaaagtgaatcctataccgacggaaaagttacttttctgattgagagttcaggcactgatgtctggctgctcgccaagaatggtaccaaggaatttattgagttatcggatctaaatctagccggaagccgttgcacctattcatcccgtgggaaactgttattaacacctggttcagtttcattgtttactgttccgactgttggtttactcggcctttgctacgacaacactgaccaattaacgtttattaataacgcatttaccaaaatttcacaaaagtcgagtgatggacccacattgccattgttgttcagtattagatatgaatttcccggctcgggtgaaacaaacacaacgctagttacgcaatcattaagtcttgcatttttggaacaggagcaatcatga

SEQ ID NO: 384248 - DNA, 840 bp, Salmonella enterica; identical to SEQ ID NO: 144589

SEQ ID NO: 384249 - DNA, 678 bp, Salmonella enterica; identical to SEQ ID NO: 144592

SEQ ID NO: 384250 - DNA, 435 bp, Salmonella enterica
atgaaagttaattacaagaaactattacctcttgcagtgctcggtttaacatttgcgggggcttactcgcttttcaacgcaagaccggcggagcccgacttgtacgattttactggcaaagttcttaaagccacgtctgttttccaaccctgtgataaagaatccacaccttcgttaaacgttaaaattgcagataacggaaacatacatatcaatggtgttgcatcaaaagttacttttgttgaaaaacttacgcctgatgaaatttctgttaagtgtgctgggttaccaatcaaaaatgctcggcttgtgcatacgagctcttacaccatgataatttcggaaggaaaaggtggttttgttatttcggatttgatacgcatccaggataatgaagtcatctccggtatatggttctttaagaagagagcatag

SEQ ID NO: 384251 - DNA, 558 bp, Salmonella enterica
atgaaagaactggaagctattggaacgaagactcagcggtttagggtgttcagccagtcagtggcgatggcatttgaagtgaacgtcgacaaaagtcggcctgctgataattcagccttcataagcgaggctgaaaaatattaccttactctccaattcgcccctccggctgacaatagagaatatgggtggaattcagagggaagtattctcatgaaactatcccaaaacgaagccatggcgctggcttctgtcttcctgagaattaaacctacacttaaaattgaaaagagaaaaaccacgcatcgcacacaccaggcttacaaaaatatcactatcggcccaaatgaccgtgggggcttgttagtcacgtcaggcattgttccggtcgaaaggggttcatttaaacccataaattataatcttcccgtaacgcaaatggattgtgtttcaacaggactttttttgcttggattcttgacgcttaagatgccatgggtatcctcagaatcgataataactgctctgcgcctttcggagtcgaaaagctgtcagtga

SEQ ID NO: 384252 - DNA, 132 bp, Salmonella enterica; identical to SEQ ID NO: 144599

SEQ ID NO: 384253 - DNA, 816 bp, Salmonella enterica
ttgggtgcggttgaacacgctccacaggtcggggcggcggtcgtcgaagcggcgcggcatcaggatttgcgattccgtgatgggcgcgggcttgtcggggtcgtcgtacttgagggcgagcgcggcgcgggcgaacacttcggattcgccatcgtccaaggtgatgccgcgcatggcatcgcgcgattccttcacccgatcgaaaccgctcaagacttcgtaagccccctcaatgaccagaccggccacgtcgcctttatggggcactcgcacatcggccacggtgttgccgcagacaaggccattgctgcacacgaaccggaacattccggccagcatctgatagctgctggtgccgtcgtgcgagttcagcagcacgatttcgttggcctccgcgccgttgatctggctggcatggcgcaagcgaatcatgtgtttggtgtgctcgcgcttgccttcgtcgcgcacgcgggtttgcgtcaccatgaaaggctggaagccttctttgcgaagctcggtcagcacggcggcggtggggatataggcgtaccgctgcgaacggctctcgtgcggggcatccgcgaagatggacggggccacgcggtgaatctggtcgtcggacagcgggtaatcgctgcgcagcgagggggagcggaaagcgaaacgggatgcgagttgcatggtctttctcctgacaaaagaggtttgctgttcacaccgcacaccggatttctagattcggagcccagcctttcggctgtttggtgcggtcggcacgaggaacccggttggccctgttgccaccgtctttcctga

SEQ ID NO: 384254 - DNA, 2298 bp, Salmonella enterica
atgattgtctgcatcaaccgcctcaaacagttcggaatcttcagcgacttcaatggaacgaagatccaaaagttcggccggtacaacctggtctatggttggaatggaacaggcaagtcaacgttatcgaatctattctcttgctttgagcttcgctcgatggttccccgcttcagcacgggccaattttcagtagttctggaggatggctcaacgatcacggaatccacactccactcatcccaattgaatattcatgttttcaatcaacgcttcgtgcatgagaacattgattgggacaaatccgtaaagagcatccttcttattgcgaaagagaagattgatgacttgcagaagctggagaagctgaagagcgagcttcagtcgaaaaagaaggctcacgacgacaagcaaagcgatatcaagaagcagcgtgaggcattagagaagttcctgaccaatgctgccaagaaaatgaagcttggacttcaggcgattgatacgagcgacagttattacttgaattacgaccgccgcaagctcttcaacttcatacagaataacggcgagacaattatcaaggcggagtcggttcttccagatgagagggttatcgaccttacgaatgccgccaagccagatcagcttccaagcattgctttcgcctcaacggccattgagccggactactttaagaaagcggcgggccgcatcagagatttgattgggactacggcggtcaatcaagcaatccagcggctgaccgataacccggaaatccgcgaatgggttcaagcaggcttggaaatccataaaaaccacgactcgcaatcctgcgagttctgcggctctccgttcgcccagcttcgtgccgaggcgcttgctgcccacttcagcaaggagttcacggagtttcagagccgacttcagaacgcggcgacatggattgaatctcaaggcgctccagctaatcagtttcccgcatcgaccgagtttgaactatcggccgaggcagagaagcttcaaaaggactacgcaactgctgctgaaaagatcgaccagcaaatcgacgcctggcgggaagccctgaaggccaagatcacagaccctgggaagacagacattcagatctcggatgtggttgaagacgatgtcaccaatttcaatgacatcctgaaatcgattgttgctctcgttggaaagcacaacaataagacttcaaatttcaaatctgagacctcaaaaagcaaggtggcactggagcttcactttgctgcggctgaggtgcaagagtttgactatgctggaagtgagaagaagtgcaatgaccttgagtcagaagcaaagaacgaccataaggaaattgaaaaaattagtctagaggtcggagccatagaagcggcgctctcgaatgaaacggtcggggcaaaggagttcaatgacatcctgcatcgcttcattggccgctctgagctttgcctgaacttcaatcagaagaagaaaggctatgagatcatcagaaacggggttggtgagcacgatgggaatttgagcgaaggtgagaaaactgcgattgcatttgtctatttcatcacgaagctcaaagaaaatggaaataacatcaaggatacgatcgtcgtcgttgacgatccggtctcaagctttgattctaatcacttgtttcacgcctactcgtttttgagaacgcaatgcactgaagccaagcaactttttgtgctgactcacaacttcacttactttaagctagtgagagactggttcactggcaccaataggaatcgagtcaaaaaaggcaacgccgagaattgcttcttttatcgcctggatgcgccacctggctcccctcgtcactccctacttgtggatgccgacgactcactcaagaactacggttccgagtaccactatatcttcaagaagctctacgaatatagggcgcacacaacactcaatcgagatgaggcgttcttgaccgccaacctcgcccgaaagcttgttgaatcgtttttcaccttcaaatatccaaggcgtcgaagcgacattagtcaattgatggaggctggcctaaaagattgcaccatcacgacaccagagcttaaagaaaaaatctaccgctttatcaataagtattcacatagcgacgttattgagataacagaggaatccgcagaaaacttggcaggcgaaagccacagcgtcatcgggaacatcttccagtggctggaagaggtggacaagaaacattacgacgagatgattcaggttgcgacggcctga

SEQ ID NO: 384255 - DNA, 510 bp, Salmonella enterica; identical to SEQ ID NO: 117481

SEQ ID NO: 384256 - DNA, 1065 bp, Salmonella enterica; identical to SEQ ID NO: 117480

SEQ ID NO: 384257 - DNA, 1200 bp, Salmonella enterica; identical to SEQ ID NO: 117479

SEQ ID NO: 384258 - DNA, 642 bp, Salmonella enterica; identical to SEQ ID NO: 144581

SEQ ID NO: 384259 - DNA, 1074 bp, Salmonella enterica; identical to SEQ ID NO: 144582

SEQ ID NO: 384260 - DNA, 393 bp, Salmonella enterica; identical to SEQ ID NO: 144583

SEQ ID NO: 384261 - DNA, 231 bp, Salmonella enterica; identical to SEQ ID NO: 159003

SEQ ID NO: 384262 - DNA, 1206 bp, Salmonella enterica; identical to SEQ ID NO: 159002

SEQ ID NO: 384263 - DNA, 408 bp, Salmonella enterica; identical to SEQ ID NO: 159000

SEQ ID NO: 384264 - DNA, 204 bp, Salmonella enterica; identical to SEQ ID NO: 158999

SEQ ID NO: 384265 - DNA, 255 bp, Salmonella enterica; identical to SEQ ID NO: 158997

SEQ ID NO: 384266 - DNA, 285 bp, Salmonella enterica; identical to SEQ ID NO: 158996

SEQ ID NO: 384267 - DNA, 159 bp, Salmonella enterica
atggaatctcaggttaaagaccagaatgcaaccatacggcgcgcgatgaaggatctgaagagcattggttatcttgattacaacgagaccaaaaaaggtcgggaaatcatgttcattgttcataaccgctcggcgcgactcgcgttgaccgtcgcatga

SEQ ID NO: 384268 - DNA, 486 bp, Salmonella enterica
gtggtggtccgtacggccaaacaacgccgcacagctggcggtcgcccgaaaaaggaaaaaagtgcgaaccgggtgatcccgctgtcagaccccggatacgtggatgaaatgcgtcggctatttgcgagcacgcgggaaagattcgaggacgacaagctaataggtgaacatcgggccatgccggtctggggagttaccgaccggacagtacgcaactggcttgagcgtgccgtcgacgcagcggaacgggacggcgtgagattcagtattccggtcagcccgcatacgttcagacacagcttcgcaatgcaccttttatatggccatgttcacccgaaggttctgcaggtcctgatggggcacaagaagtttgaatcaacggaagtgtacacaaagatatttgcgctcgatgtggccgccagtcagcaggtccggttctcactcgatacgcaggatgcgctgcagcttctgcgcggcaatcgttag

SEQ ID NO: 384269 - DNA, 273 bp, Salmonella enterica
atgaatctgcccgcttttgttcatcactcccctgccctgcaggtgactgccacttctgcaccgtttgactacggccgggctctctcgctgcgggaaatggccaggcactataacgagatgcctaaataccttctggcaccggaagtggctggtctgctgcattacttacccgactggaatcaacacgcctttattaacacgctgtggaacaccggcgcacgcctcaacgaaacactggcactcagaagaagggactttcacctcaatgattag

SEQ ID NO: 384270 - DNA, 819 bp, Salmonella enterica
atgggaagcgtgaaagaccagttgctggatattgaagctgaacgatttgataaatggcttgaggagaatcatccggatgtggtccccggttcagaagaatgggagcacgccgcgaacctgtactgctgggagcaggaggcgctggccgatcaggctcagtgggatcatgaacacgggttgtttgaggcttccctgaacaacgttcatcagcgttacctgcacgcccgtcaggaactgacgaagctgtatgccctgctcgatgcagagcagcctgaactggtatacagaatgtctttcgttcatgccgtgacggttatggaggcatacctgatgtactgtgcgagggcaatgctggagcatgactggccgctcaaaagatacttcgaagagttttacttgccttttgccagggcagacaaaaaagtgaagcaggctgcccgtgagatgccactttccaagttccgccctgttgcaaggaatgttgttgcgagtatgacgtttcataacgtgaaaaccattgagcgctatttcgggaccgtgctccatatcccgcccgtctggccaactgagccgctgggtatcatcgctgactggcgaaatgacctggtacaccgtaacggtgtggacgaacatgatgtgccaagaaagatatcatcgctgcaattgcggaatgcccttcagagagtgactgaccttatagaggccgcacatcagtccctgcgtctggaagtggactattttggaaactggcgtaatgaagaaaaccgggaaatcatcgcatcggcactgaatatacctccagccggagagtcatcctga

SEQ ID NO: 384271 - DNA, 321 bp, Salmonella enterica
atgagtaacacaacgacatacatcaatcagggcaacagcgtttcaccttcttcaattctggaaatgctttcaggttatggctgccagaaagtatggctataccgtacgataaatacgcagggggaaactcttcttgtgcttctcgatgaggagaatgggatatacgaggaaatggccagccgcctcgatgctccggatatgaaagagtgggcctttcagtattctgacggcggttataaatcccgtacgcttcctgaaggagcgtttgagctcgatttgagctgccctgatgaagcggcatggtatatggatcttttatag

SEQ ID NO: 384272 - DNA, 135 bp, Salmonella enterica
atgcgttttgtcatccgggatccgaaaaaaggcagtcccggatcacggcgattttctgcgcatatttttgaaaaaaagattaaatatgtgctatattataataagttagtaacactcctccctcccaattcctga

SEQ ID NO: 384273 - DNA, 135 bp, Salmonella enterica; identical to SEQ ID NO: 97399

SEQ ID NO: 384274 - DNA, 909 bp, Salmonella enterica; identical to SEQ ID NO: 244235

SEQ ID NO: 384275 - DNA, 432 bp, Salmonella enterica
atgaaaaatatcgtcttagcatcagtgttaggtttgagcttaatttctacggcctgggccactgaaaccgtaaatatccatgagcgtgtcaataatgctcaggctccggcccatcagatgcagtcttcttcaactccagccgccatccagggggcagccccacggatggccggtatggatcagcatgaacaggctattattgttcatgaaaccatgaacaatagttcagcagatgcacataaaaaaatggcggaaagtcatcagaagatgatgggaactggcaccgttaacgcttcccgtccggcgacttcgtttgcggcgatgaatgaacatgaaagagcagctgttgcccatgaatttacgaataacggtcagtccggcccccatcaggctatggctgatgcacaccgccgcatgatcaatgcgggctga

SEQ ID NO: 384276 - DNA, 2004 bp, Salmonella enterica
atgaccgaccgcggcgaccatgatttctgggtgcgccctggcgcgccgaagaaccgaggcaaaggccagggccagagcttcgtttccaaggtgctcaagcaggctggcaaggccagcggcggcaagtcggcggtgcgccgtcctaccgctggcgggagcggccagcacgccggccagcggcccggctcacggcttggacgcggccatacggcggcgcgcttcgcaggcgcaaagctgacccctatgtcacggcgcgtgaccatcaagacgctgctggtcaaccagcgcaacgccagtccgcagtcgctcgccaagcacctgcgctacatcgagcgcgacggcgcgggtcgcgatggcgagccgggccgtgcctacgggccgcagaccgacgaagccgacctcgatgccttcaaggaacgctgccaggacgaccgacatcatttccgcttcatcgtctcacctgaagacagtgcggagctggacgacctgcgcacctacacccggcacctgatgaaccggatggaggccgacctggggacgcggctggattgggtggcggtcgatcactggaacaccgacaacccgcacacgcacctgatcgtgcgcggacgcgacgataccggcaaagacctcatcatcgcgggcgactacatcgcccacggcttccgccatcgcgccgccgagctggcgacggaatggctggggccgcgcaccgaactggagatccagcagaccttgcagcgcgaggtggagcaagagcggtggacgagcctcgaccgcacgttgcagcgcgaggccggcgaggatggccgggtgcagatcgaacgcttcaacgaaccccggctgcaacgccagcgcctgctgctgatcggccgcctgcaacacttgcagcgcctgggcctggccgacgaggtgcagcccggcacctgggccgtccatgcggacgcggagaagaccttgcgtgccctgggcgagcgtggcgacatcatccgaacgatgcagcgggccatgagcggcaagcctcgcgagctggcggtgttcgagccgggcgacgacggccgcactatcgtcggtcgcgtggctgctaagggtctggccgacgagctgcacgaccgcggctatctggtcatcgacgggttggacggcaaagcccactacgtcgcgttggacgcccgcgacgagctggcgaactatcccatcggcgcggtggtggaggtacgcggttccgccgaggtgcgggcggccgacaagaacatcgccacgctggcgagcaatggcctgtaccgcaccgatcaccacctggcgatcgagcaaggccgagccaagcccggccgcgacccgcaagaggctgtggcggcccatatccgccggctggaagccctacggcgggccggcatcgtggagcgcgtggccgaggggttatggaaggtgccggacgacttggccgagcgtggccgccagtacgacgcgcagcggctgggcggcgtggcggtcgaactgaaatcgcatctgccgattgaacggcaggcccgcgtcatcggcgcgacctggctggatcagcagttgatcggcggcggcaagggactgggcgacctgggctttggcggcgatgctaggcaagccttgcagcagcgcgccgacttcctcgaagaacaggggctggcccagcggcgcgggcagcggctgattctctcccggaatctgctggaaacgctgcgcaatcgggagctggcgcaggccgcccagcacattgccgccgatagcggattggagcatcggcacgtcacagacgggcagcgcgtagccggcatctaccggcgctcggtcatgctcgccagcggtcgctatgcgctgctcgatgacggcatgggattcagtctggtgccttggcggccgataatcgagccacgactggggcagcagatcgccgcgactgtacgcggcggcggtgtgtcatgggaggttggacggcaaagaggtcctgggattggatcggggccgtag

SEQ ID NO: 384277 - DNA, 696 bp, Salmonella enterica; identical to SEQ ID NO: 199431

SEQ ID NO: 384278 - DNA, 930 bp, Salmonella enterica; identical to SEQ ID NO: 199432

SEQ ID NO: 384279 - DNA, 822 bp, Salmonella enterica; identical to SEQ ID NO: 199433

SEQ ID NO: 384280 - DNA, 1158 bp, Salmonella enterica; identical to SEQ ID NO: 199434

SEQ ID NO: 384281 - DNA, 621 bp, Salmonella enterica; identical to SEQ ID NO: 199435

SEQ ID NO: 384282 - DNA, 432 bp, Salmonella enterica; identical to SEQ ID NO: 247995

SEQ ID NO: 384283 - DNA, 3105 bp, Salmonella enterica; identical to SEQ ID NO: 247994

SEQ ID NO: 384284 - DNA, 1167 bp, Salmonella enterica; identical to SEQ ID NO: 247993

SEQ ID NO: 384285 - DNA, 642 bp, Salmonella enterica; identical to SEQ ID NO: 247992

SEQ ID NO: 384286 - DNA, 1404 bp, Salmonella enterica; identical to SEQ ID NO: 199437

SEQ ID NO: 384287 - DNA, 921 bp, Salmonella enterica; identical to SEQ ID NO: 199438

SEQ ID NO: 384288 - DNA, 318 bp, Salmonella enterica; identical to SEQ ID NO: 199439

SEQ ID NO: 384289 - DNA, 237 bp, Salmonella enterica; identical to SEQ ID NO: 149275

SEQ ID NO: 384290 - DNA, 531 bp, Salmonella enterica; identical to SEQ ID NO: 199441

SEQ ID NO: 384291 - DNA, 906 bp, Salmonella enterica; identical to SEQ ID NO: 199442

SEQ ID NO: 384292 - DNA, 1998 bp, Salmonella enterica; identical to SEQ ID NO: 199443

SEQ ID NO: 384293 - DNA, 477 bp, Salmonella enterica; identical to SEQ ID NO: 199444

SEQ ID NO: 384294 - DNA, 1071 bp, Salmonella enterica
atgagtgccgttccgcagattccgcctgaatctcgctcatccgccgcggcgtcccaggatcgccgcatccagatgctgcgcacggcgatggggccgctgatcgccgctgcgctcgaagatccggatgttgtggaaatcatgctcaaccccgatcgcaccctgtgggtggatcggctgtcgtcgggtcgctcgccgctgggcgtggagatgcccgaggccgatggtgaacgcatcatccgcctggtcgccgcgcatgtcggcgcggaggtgcatcgcggccagccgctcttgaccgccgagttgccggaaaccggcgagcgtttcgagggcatcctgcctccggccgccccggggccagccttcgcgctacgcaagcgggccgtgagcatcatcggcctggatcgctacgtggccgacggcatcctgaccgccgggcaggccgagttcctgcgccgcgccgtgcgcgagcggcagaacatcctgatcgccggggcgacgagcagcggcaaaaccacactcgccaatgccttgcttgcggagatcgccgccacaggcgaccgcgtgctggtgctcgaagacaccatcgagctgcaatgcgcggcccgcgaccatgtgccgctgcgcacccgcgccggcgtcgtcacaatgaccgagctggtgcgggccacgatgcgcctgcggcctgaccgcgtgatcgtcggcgaagtgcgtggcggcgaagccctggacttggtgaaggtctggggcaccggccaccccggcggcattgccaccatccatgccggctccgccttgggcgcactgctgcgtctggagcaactgatcctcgaagtggcagtgaatccgccccgcgccctgatcgccgaggcggtcaacgtggtgattcacatcgcaggccgtggccgcaaacgtcacgtcgaaaccatctcccgtgtcgtcggcttcgacggtgcgggctatcgcctgacagatgcgctggaaacgccgtttcccgagctgccgccggttcctcttgcagccgctgccgctgcgccttcctcgacccctgaccaacctggagaactgccatga

SEQ ID NO: 384295 - DNA, 387 bp, Salmonella enterica; identical to SEQ ID NO: 117516

SEQ ID NO: 384296 - DNA, 270 bp, Salmonella enterica; identical to SEQ ID NO: 117517

SEQ ID NO: 384297 - DNA, 2451 bp, Salmonella enterica; identical to SEQ ID NO: 199448

SEQ ID NO: 384298 - DNA, 831 bp, Salmonella enterica; identical to SEQ ID NO: 199577

SEQ ID NO: 384299 - DNA, 564 bp, Salmonella enterica; identical to SEQ ID NO: 199576

SEQ ID NO: 384300 - DNA, 192 bp, Salmonella enterica; identical to SEQ ID NO: 159005

SEQ ID NO: 384301 - DNA, 1410 bp, Salmonella enterica; identical to SEQ ID NO: 199574

SEQ ID NO: 384302 - DNA, 2139 bp, Salmonella enterica; identical to SEQ ID NO: 159008

SEQ ID NO: 384303 - DNA, 1800 bp, Salmonella enterica; identical to SEQ ID NO: 159009

SEQ ID NO: 384304 - DNA, 1248 bp, Salmonella enterica; identical to SEQ ID NO: 199571

SEQ ID NO: 384305 - DNA, 1068 bp, Salmonella enterica; identical to SEQ ID NO: 159012

SEQ ID NO: 384306 - DNA, 1200 bp, Salmonella enterica; identical to SEQ ID NO: 199569

SEQ ID NO: 384307 - DNA, 2457 bp, Salmonella enterica
atgcgtaaaacactggcaggctgcataattggtatggccatagcttcagcttttccggcggcggctcagattttcagctattcgtataccgacaccaatcagctggcaaagacgcttaagccttccacgctgagctatctcaatccggcaagcacactgaacctgaatctaatctccggcctcgaccggtacgaacgagtgagtgtgaccagagacagtgacaaaaaggtcatgtattccgcactgacgacaaagataagcgtcgccgaccgcatagtggcagcagacggcacggagtattacggtaaggacatgatgttacctgctctcggggaaggggcttttacaatcgtcaacgatacgctggatctccagcaagccgtcgtcagttcctctacgtatcatttcaccatcgataccacggcaccgaagtacacccgcatttacccgagccaggacgcaggctatgacatggtactgagtggtcccctctgggagctcgggcgcggaggatctggacagttttctatctttgctgatggagtggatgatgcaaatggtatagaaaagatccggctggtcatcaagcgcagtaatggggcagtcgtatccgacaataaactcagttacgactcggcggcaaaacgcgccttttacccttggatcatgggtgcggtcactcaacctggcatgcccaccagcgatcttaatgaagagttcaccttcaattttatcatcacggataaagccggaaacacgctgaatattcctccgcagcgctttttatttgatgaccagataggtgaatatacgccctttgcggtccatgactcacgagtcagtacgagtgtggttccagggatctcttcagggtacgtaccgtttgtgcgggggctctctgtactcgaaaacccgtaccggatggtcattcgtattccccgaactaactggcagccataccgtaacggcggcatcaccattcttaacaattatggcggctctaaggttatttcagaagacacgacctatgtgtacgtagaagtgaagctcccacagggtactctggatggaaactactatcgccctgtgaacaggtaccaatgggccggtggcggtctgactcagtacgcctcctggctgaactgggacccggcggcggtaaaaagtcctgcgtgggggagtcctgcgattgagcgacagaagtctgacggcacttggttcaatagcgtcgactggaaaaattttctggcttcagatatgccggtgaacctaaccaagatccgtttcactgtgcaagcacgcccctacgaacaagcaattaccggcagtgccacctgcaagatccctgccgggtcaacgtcgtgtactgtcgacctgacacaggcgattacaaacggtaccaccggctatatacatactgcctatgaagtgcgttcgacaaccgagtccaccttcttcatgccgctctgggaaaacatcgcctggcatacaaaggggcccacagttactggctacaactacaatgatgcgaccaacattcttcaggtattcgtcaacgagccaggagacggatggtatttcgatgccgttaaactgagccgggtgtggttgtctgacaaatcccgcaataacgcggatatcaacgtgacaggaaaacaaacggggcgtaacacagcaaccgggaattatacttacgacttcaacctgaaacagatcccggagggcagctataacgtgcagctcaacgcccaggattctttcagcaacacgggaagcttagcctacaaaaccgtgacggtcgataactcgccgccgtccatcagtatcaactacgaaaacaaacctatcaccagcaacgtgacagtgttcggcttggaaaacgtccgaattcagctcgcagatactctgaccaaaccctcgttaactcgcatgacgcttcgaggtggaccggtatctgatgctgttgagttgtcctgggtaaatctcggaaatgatctctatacaccgaattacccgaagatcttcccgtcacttaatgacggtgaaacctacacgttgaccgtgtatgccaaagacgagatgaacaacgttaaagaaagcgccgtcgaatttaactacctgccgaacaacctggtacgtctggagaaccttaagaccatctccgtcagtaccgccctgaaaacgtccgacaacacgccgctggctgtactgtatgccagccagctgcgcaagaaggacggttctatcgcaacagggaaacaggacgcgatactgacggtacgtaaggatgcggccttcggcgttacggtgaatggggtttccgcagcaccaggggagagcaaaaacgttcagctggatctgggtctgggtgacagccgcagcttcccgattttcccatcgatttccggcgtcagcggaacgtcagaatttatgctgaatatcgaggaactgaagtaa

SEQ ID NO: 384308 - DNA, 2388 bp, Salmonella enterica
atgaaatgcagggcgatacttttagcaccactcatagctttttcgtttacggcacaagctgagattgcagagttaagattcaatgacactcagaatcaaccaaagattgttgttccatctgtgcagtggattaatccagcaacctcattcgaggctgatgtaatctccggcttagaccggtacgtccagttgtcgttacttaatgtcaacggtgcaagcttgtggagcacgaaaagtagcaaagttacggttgatgaccgtatgacctccagtagcgggtatgactattatggaaaaaggttaagtgtccctgcgtttggtgaagataattacaccctgagggaagtgatcacagatctccaaaataatgaaatttctcgccgggactacgttatatctatcgaccgcactccccctaaaactagcacaattggatatacgcgaaatggatggcaatatggtagcgaagccatctttaccagcgttccttcaggtatgcagtatgcctctgttcaggctctcgtcttttcaggcctttcagacagtcgctctggtctcgaccgggctgagtactttcttgtcgattcgaacggcgttgaacgaaagagaggggctgtaattaacctggtcgataattcagtaaccgtccaaaatactactgcgagcgatccagccctggcgccagcttctcagtctgaataccgtatgggcctttatgtttatgacaaggcaggaaataaagcatcagtaagcagacaaagtgtgattgatcgggtcaaccctccttctgttctacaggtgcttaataccaggacaaatacctgggaaaactactcagctgggataactgtttacagtaatccaatatcattgcgggtactcaggaataaaagtaactttactgctgctaataaaacaagctttgggtgggcagatgccaattatcaaagttctgacagcacatataatatttattcgttcaattttgttttccccagtaccggtgatatttatcacgaattccagacacttgcgggaggcgttcgtcggtaccatcactctgagttatctttcactccttccccaaccatggaacttgcaccaaaggtcacaagcaaagaaatttttcgtagtgataccggtaaatggagcagtgctactgggaatgtaagaactgccaaatttacccaaatacgcgtgactaccgaacctcgtaactatgtacaacgggttgcagctaattcgaaccgtaactggtactgccttatcccggtaggaagcactggttgtaccatgaacgtggattatacctttacttccgataaggggatgcaatacatccatctggtctcaggtaaagacggtacagctatttatgataatctggctggggcattcgtagttatttgggataacaacccaccggttattaacgccgtaaaaattaaccgtatggataaaaatgtaaccatgacggttactgatgatgaccggataaatggatggcaaataggagcatgggatacccgagaatttggcgtggtgcttaaaaccgaaacggggaatgtgattgacctacccgccaggacatggacagagagtgattttaaaacaaaaaacgcggtcatttcctatgctgatctgccggacggcaaatataccgttctgtccgcctatgcaagagatcttgtgggcaacacggcaaactacgtgataaatgatttgcttaccattgactccactgcccctctaatatcctaccggtatctgaatgatgatcctgaaggcaaactgattaagggactagaaaacctcagaattagtgtagctgacccttcaggtgacgcctcgcttgaatcactggtgttgagcggtggaccaaacagtgaacaggtgacattagcttattccagtcagggctcaggagtttatacgccagagtacccgcgtatctttcccgtaatagcaaaagaggatggcatttatacaattgaagctcacgcagtcgatgcctctggaaaccggtcctcgaaaaagctcaatttcctctatcaaccagcaaacatgatcactctggacaggctacgtacccttgctactgcggctgcactaaagaccacggataaccagccactggcttttatccggacaagcgtacttcgccgaaaagatggttctgtcattaccgggcagttaaacggtacgctgtccgtgcggaaagatgctgacttcccggtaagtgtagctggcgtaaccgttgcgccaggagagacaaaggcaatcatttttgatatggggcagggtgaagaacgtatttattctgtcacaccaggaaagagtggcgtttctggtacatctgaatttgccgttgaattcccgcagttttga

SEQ ID NO: 384309 - DNA, 177 bp, Salmonella enterica; identical to SEQ ID NO: 144515

SEQ ID NO: 384310 - DNA, 846 bp, Salmonella enterica
atgcttaaaggagaatacgcgttgcgaaaacatacaccaatcatcaaatgggcggggggtaaaaccaaactgatgccattcatcagtcagcatttcccacatgatcagagccgtcggtgggtcgaaccatttatcggcgggggcgctgtgttccttaacatgtttgccaccgatgcactcttggcagacagtaatccggatctaatcaatctgtaccgcaacatccagcggaataaatcggcattcatcagagaagtgaatcttctggcggaaagggaatttgataaagaggattacttaaagctgaggaacacgtttaacagcaccagtttggatgatgccccgctgcaacgagcagtccttttctacgcaatgaaccgactcggatataacggcctgtgtcgttacaatctgaaacgtaagtactcagttccgtgggggaatcgatccaagttaactctggacccccagaaagtcgattatctctcattcagactttctggcgttgagctgacaaccgcagattttggtctgacgttggagagtgctggtggttgtgaccaaatttattgcgatccgccttatgataaaatcagcaaaaccagctttgtcagttatgacggcataccgttcaataagagcgcacatgttaaactggcggatatgctggtggcagctcatcgtaaaggggcttcagtggccatatccaacagcttgactccctttacgctggagctctatgaagaacgcggttttgaaattcatactctcaatgcttaccgttctgtcggcagtcaatcaaaatcgcgaaaaaaggaaaaagagatcctggctgtccttcgttaa

SEQ ID NO: 384311 - DNA, 822 bp, Salmonella enterica; identical to SEQ ID NO: 144511

SEQ ID NO: 384312 - DNA, 1128 bp, Salmonella enterica
atgactttcaatacttctaaacttaataaagtttccgctaagcaaatctgtgataactttgtaaaagcacatcctgatttgttggaaggtgctgttataacaaaaatcgaaatcagtggttgtcagggctctcggcgtaccgataaaatcgaactgtcctatggcggcgatgatataacggaccagaagagcgtgtctaaaagtgaagttcgctggatagacataaaggcactgagtttcaaaagcactatcactagtcgaatttcaacactctgttcacggttgtgtatccgctatagcaatatgtggattttgcctgtcgaaagaatggaggagtttctggaagaggcacaagaaattgaacgtgagtttcaagccggtatccagaatgtggttgataactatgacactcatattcaggctgagaaagatcgcagtccgttgatgtcagatttaatcgaccagttgaaattaacgaaagatgattttattaaatcattccggtttaatctggcgcatttcattccgttttcaccgattagtgtggagggggatgaaacacaggacttttatcaggaacaactgataatcgatttggccgatgaagctatgaaggtttatgcaaaaatcagtaaaaatgataatttgcgttccagcacgattgaccgattaaaacagatgcaagataaaatcattagctttatgttcattcataaagaggcggttgttcttgcagaagctatcaagcacgtcatgaataatttacccaaaggcgccatttcttctccccgtgatgttgcggtgttaaagcaatggttctatttcatgagtgatgcgtcaatgctgaaacgtattatttctggtgagcagaaagtaacagattggctggattccattacccggtcattcaatattgattcacaggataatacggctaactctcagaatgcttttgaggatgatgttttttcttcagcaaatgtgttcagagaagatccgcttgaagaagttgagaaaaacgcagtaactgcacctttgtctgctgttgtccctgaagaagatgtttcccttcaggccagtggtagtaatagtgcttttaacagcgaactcgaactgaacggctggtga

SEQ ID NO: 384313 - DNA, 222 bp, Salmonella enterica; identical to SEQ ID NO: 144562

SEQ ID NO: 384314 - DNA, 879 bp, Salmonella enterica; identical to SEQ ID NO: 144565

SEQ ID NO: 384315 - DNA, 936 bp, Salmonella enterica
atgaaaattatcgagaaaatcattaatgcatttctgatgtcacgcaatcacgctgtgaaggtcagcaatgttatctgcttaactggttgtgacggtaaatttactggtatacgttgtgacgccgatgtttcatttgattttcttcattcgtatgctaacgcatacagttcaatatttttagatatcccgttccctgggttcgaagaccagaacattacggattgtgttaaacgtcagttagatgtagtgaaaaataaacagaatcggtctttctttattgaccatattagattcccggttactgtcaaggaaggattcactctacagcgcggtggtagttacgacgtgactgatagtgaatataacaagcaacgattgctgcatttaactcgacatggacgttttggtgaagactatctcacgtacaaagaaggactgagtcccttcttttcatttgtgaatgtagaattacatgaaactatgaaggaaggtattcgtttagcacttgatgttttaaataagataacaactgaccaacctgaccgtcttataaaggactttaaatatcatgactgttacaatagttataatgttcaaatattttgtaaggggttgccagttgatattctggaaacgatgatcgcacctgactttttgtcatccgacatgtctggtagtcgtcagatcatcaaaaatgcacgccgctatcttaaaggctttgcccacagtaatcgtgtttacatgaagtacggttggcgcttagcggatatcgacacgtctgattatgctaaagtcatgtcagataaagaaatgcatgccagagatgatcttaaaatgttttgcggtgtctttgttaaagagtgcttcgcatccggaaaagatgaatacgaagcctaccttcaagaaagacaacacgctattcgttacgggtattaa

SEQ ID NO: 384316 - DNA, 936 bp, Salmonella enterica; identical to SEQ ID NO: 144568

SEQ ID NO: 384317 - DNA, 957 bp, Salmonella enterica; identical to SEQ ID NO: 144569

SEQ ID NO: 384318 - DNA, 270 bp, Salmonella enterica; identical to SEQ ID NO: 144570

SEQ ID NO: 384319 - DNA, 591 bp, Salmonella enterica; identical to SEQ ID NO: 144571

SEQ ID NO: 384320 - DNA, 537 bp, Salmonella enterica; identical to SEQ ID NO: 144573

SEQ ID NO: 384321 - DNA, 447 bp, Salmonella enterica; identical to SEQ ID NO: 144574

SEQ ID NO: 384322 - DNA, 609 bp, Salmonella enterica; identical to SEQ ID NO: 144575

SEQ ID NO: 384323 - DNA, 960 bp, Salmonella enterica; identical to SEQ ID NO: 199459

SEQ ID NO: 384324 - DNA, 909 bp, Salmonella enterica; identical to SEQ ID NO: 199458

SEQ ID NO: 384325 - DNA, 1182 bp, Salmonella enterica; identical to SEQ ID NO: 199456

SEQ ID NO: 384326 - DNA, 246 bp, Salmonella enterica; identical to SEQ ID NO: 199455

SEQ ID NO: 384327 - DNA, 1281 bp, Salmonella enterica; identical to SEQ ID NO: 247974

SEQ ID NO: 384328 - DNA, 993 bp, Salmonella enterica; identical to SEQ ID NO: 247975

SEQ ID NO: 384329 - DNA, 705 bp, Salmonella enterica; identical to SEQ ID NO: 199452

SEQ ID NO: 384330 - DNA, 1368 bp, Salmonella enterica; identical to SEQ ID NO: 328458

SEQ ID NO: 384331 - DNA, 327 bp, Salmonella enterica; identical to SEQ ID NO: 199450

SEQ ID NO: 384332 - DNA, 186 bp, Salmonella enterica
atgcatcggctgggtgaaatcagagatcgggggctggagaatcagagctatcgagccagcggtctgacgttgctgactgcggcgatctcactgtggaatacggtatatatagaaagagcgatagattctttgagacgaaaagggatcccgattaatgagcaactgatggcactgttgcaaagttag

SEQ ID NO: 384333 - DNA, 981 bp, Salmonella enterica
atgagtcatcaacttaccttcgccgacagtgaattcagcagtaagcgccgtcagaccagaaaagagattttcttgtcccgcatggagcagattctgccatggcaaaacatggtggaagtcatcgagccgttttaccccaaggctggtaatggccggcgaccttatccgctggaaaccatgctacgcattcactgcatgcagcattggtacaacctgagcgatggcgcgatggaagatgctctgtacgaaatcgcctccatgcgtctgtttgcccggttatccctggatagcgccttgccggaccgcaccaccatcatgaatttccgccacctgctggagcagcatcaactggcccgccaattgttcaagaccatcaatcgctggctggccgaagcaggcgtcatgatgactcaaggcaccttggtcgatgccaccatcattgaggcacccagctcgaccaagaacaaagagcagcaacgcgatccggagatgcatcagaccaagaaaggcaatcagtggcactttggcatgaaggcccacattggtgtcgatgccaagagtggcctgacccacagcctagtcaccaccgcggccaacgagcatgacctcaatcagctgggtaatctgctgcatggagaggagcaatttgtctcagccgatgccggctaccaaggggcgccacagcgcgaggagctggccgaggtggatgtggactggctgatcgccgagcgccccggcaaggtaagaaccttgaaacagcatccacgcaagaacaaaacggccatcaacatcgaatacatgaaagccagcatccgggccaaggtggagcacccgtttcgcatcatcaagcgacagttcggcttcgtgaaagccagatacaaggggttgctgaaaaacgataaccaactggcgatgttattcacgctggccaacctgtttcgggcggaccaaatgatacgtcagtgggagagatctcactaa

SEQ ID NO: 384334 - DNA, 141 bp, Salmonella enterica; identical to SEQ ID NO: 144531

SEQ ID NO: 384335 - DNA, 300 bp, Salmonella enterica
atgaaagaactgatttcggtagctcaggcggctctggactatatcgatgccttacccagcgacatggtggcatcactccatacgatgcctggctttgatcgcgattgggcaacagaagtcattgccgatgctatcgtcgaaagtaacgagtcccgggaacagatacagcagcagtcgcaggcaattcagttgcccgagacctgtttctttgatggcccgggcaacacaacagaaacgtatttcctggcagacgatgtcagagagttactccggtcagcgggcgtccaatttagcgagtga

SEQ ID NO: 384336 - DNA, 699 bp, Salmonella enterica
atggaaaacacagtaataccgacggtaacagaaaacgagatggaagaggtgatcacccgtcacacggcatacgggcaggtatcggtaagccgcacgacaacgacggggcagcgcttgtatgcctccgacctcattcataaagaggtgattacgctgaccttcagtgaatcagagcaggttgagcgcgatggagtgatccgtcatcggctggcggaaggcagacgccgttccccacttctgaaagtcagtctgtctccggctcagtgggcctcaatgatcacatcgttcggaatgagtgacggcgtgccgtgtaccattaacagtttgattcgcggcgactatgagcgccagccggagattggctatattgagtcgacacgcgaacgttatgagcgtcagatccgggaagcctctgagcgcgagatggcgaaagtgaatgaaaagctgaaagcactggctttgctggtggcaaaaggcaaggcaggaaagcgcgagcttgaagaagtatatcagtctctgtccggcgcaatcgccaacctgccggttaatctggccttcagcacccagttgatgcaggaatccatggacaaaatagtctcacacggcaaggccgaactcgaagcctccgccatgggcgtggccgctcgtctcggtatgaaagaaattagccgcttggcctcgttggaagacaagaagtaa

SEQ ID NO: 384337 - DNA, 423 bp, Salmonella enterica
atgtcagagattgctgagaaaacgtttatcacgcatttcgctccactggagagaatttgctatcgcgctccccgggtgcagggtctcacgcccgatcgccatcaaattcaaatgcagctccaatttttgcgtcttggcgtcacctggttaccacccgcactcgccatggcagaactggaacaccttcttaaggggtatgacgccgaccactgtcggctactggaaaacgtcctggatacagcccaccggcattacctggagtcctgtggaccgctaaagagagaagggggccgcgtcgggaaccgcatatcaggcacccgccacgacgaagcacatttgtgtgtacggtttatgtcaacacgctatgaattggccactgagctttgtgccgcttatgtgtgcagcaggtatgcttatgggtga

SEQ ID NO: 384338 - DNA, 468 bp, Salmonella enterica
atgaaattttacagaggtccgttgatcgccgccgtctatgcggcactgctgttcccattttgcggccaggctcagctgtacaactattcgtacaccgacacacgtggtacgaaagtgaatgctgaaccctccagagcgtatctcaacccaggtagcgcaattacgctgaacttgatatctggtctcgaccgctacgagcgcgttaccgtgacacgatcatcagataatgtgcagatgttccagagtgtcaccggcctggtgacagtggccgacaggatcactgccgctgatggtagtgagtactacggcaaatccatggcactgccggtactgggcgaggggacttttgcccttaaatccgaaaccctcgacaataagtcgaatgtcgtggccacaaccagctactccttcagcattgatacccgcgtatcttccccgcaacagatgatgcagattcctacgtgctga

SEQ ID NO: 384339 - DNA, 597 bp, Salmonella enterica
atgaaatatcagactataactttggctatggttttgctcggcgtctcagttccggtaacagctcagatttatgaatccagctttacagataccaatggcattgaagtacacgcgccttcaacccggatgctactcaatccggcttctaccgtaacgctgacgcttatttctggattggatcgctttgtaaacgttaaagtgacccgggaaaccggggcgcagttgtacaataccaccactacccgtaccggtgtggctgatcggctaaaagcagccgacagcagtgaattttacgggaagaaagtaactttacccgctctcggggaaggaaaactgatcgtccaggtcaacattttggatctgaatcagtcagtggtagctacgtataactacaactggacaatagacaccacacctccggctgcaaatgcccttacagcaaccacatcactgggcactggaactggagcggtatttaaattaggtcttgaagctgtggcgcaatacagctttttatcaacgggcatcgctgatgcggttggaatagataaaggcatatttgaaatctatcgcgctaatggaacccttttcagctaa

SEQ ID NO: 384340 - DNA, 1818 bp, Salmonella enterica
atgaaatacaacgtcggtgacaagacgatgtacctgccctacaccttcgcaagtgtgaagcaaccgggcatccctgatagcaaccttgacgaagaatttcaggcaaaagccaaaatttacgacaccgccgggaatatccgcacgttaccgacccaaaaatttcggtttgataatacaattggtgagatatcccttttcgctgttcatgatccaaatgatgcaaccagcgtcgttcccggcgtgaaaaactacccggcctataaagccggtatggtggttaacgaaaaccctatcaggctggtgtataaaatcccgagatctaactaccgggcatatgcagagggtggactggaatttattaacctttattcggctgcaaaagaaatcgcttctgatgccacctacagctatgtcgaaatgacgctgccatttggtgccttcaatggggatatggctcgtatggccaactttggacagtgggcaggatacttcccgacctacacgatgacgctcaacccgaacgcaaacaagacgcctgcttttactggcacctgggaggattttcaggatagcaatggcacctggtataagtcgaaggacttcgagacagttctgtcttccagattgccgattaaaatcgtccgggcaagatttaatgtagaagccagaccgtttgagcaggaagttgggggacgcctaacctgccgcattccggttggccagacaagttgcgaagctcctgagaattttgatatggcggtagggactcagggttataaccgtacactttattatgtacgcagtgtcgcgaaccctattcttcgttccgagcagtgggttatgacacgctggaacaatcaaatcgtcccagaaattggtgagatcacctacagcccgacatctaagatactgactgttgaagctcatctcaacagagataatgattggttcgacggattcagactcctcggattctatcttaccgataagaactccaaacagcgcatgacgcctgtgggagtcgaaaagtccagaaacgcgggtaactacacgattgagtatgacctttcccggcagtctgaagggcaatacaacgttgaagtgaatattcaggatcgtttcggtaaccagacaaacaaaacctatggcgtgatagctctcgatgccacacccccaacggttgctattaccttcgaagggaagccggtaaaggatgacaccgtcgtctatggtctggaaaatctgcgcattgcactgagcgataacctgaccacacctcgcattactcgtctccagctaactggcggaccgacatcagacaatgttgaactcagttggtcacctgctggtaaagacatatactcgccggaatatccgcgcatattcccgaatttcgagccctctgaaaactatgctctcagtgtgacagtgtcggacagccagtccaacacaaaaacttacacacagaagttcagttatctcccgaacaacttggtacagctgcataaccttcgaacccttgcagtaaagtcggcgctcaaaacctctgataacgtgccacttgcctatctgtctacaaacatgctccgcaagactaacggtgaaatagccaaaggcttacagaacgcgaccctctcagtacgtaaggatgccaacttcgggatagtgtttaatggagcggaggcagctcctggggagtctgtaaatgttaatatcgacatgggtatgggtgataatcttctcatgccggtttatccatcagagaacggcaagaccggagccgctgagtttatgatccaaattgatgagctgaagtaa

SEQ ID NO: 384341 - DNA, 516 bp, Salmonella enterica; identical to SEQ ID NO: 144522

SEQ ID NO: 384342 - DNA, 204 bp, Salmonella enterica
atgtcacacaatatttttatagctgagtttgatgatggacttcggatgtacggtatcaatgacggtacagcctgccatatgcatgcttttttgtttcagacccaggcgcaagtagaacactggctgggaagcggtgatcgtgatacccgcaagttacctgtaatgtgtagtggtcaagtaatattggccacggttttacagtaa

SEQ ID NO: 384343 - DNA, 207 bp, Salmonella enterica
atggaacgcttcttccgcagtctgaaaacagaatgggtgccaacgaatggttacgcaggcaaggacgaggcccggcagcaaattaatgattacatattgaactactacaacagcgtcagacctcaccattataacggtgggctgacgccggaagagtcagagaacagataccatttttactgtaaaaccgtggccaatattacttga

SEQ ID NO: 384344 - DNA, 936 bp, Salmonella enterica; identical to SEQ ID NO: 224676

SEQ ID NO: 384345 - DNA, 1593 bp, Salmonella enterica; identical to SEQ ID NO: 234695

SEQ ID NO: 384346 - DNA, 408 bp, Salmonella enterica; identical to SEQ ID NO: 15278

SEQ ID NO: 384347 - DNA, 525 bp, Salmonella enterica
atggttaatccggtacacgtcaggttgtgcagcgaaatacgtcgggcgtggaaccagagccggggctctgcgggggcacgcactttggctgacatgctgacccaaaacggcgtcccgatgagccgttaccgtgccggacgcctgatgaaatacctgaacctgagcagttgccagcccggaaaacatcagtataaaaatgcccgtcaggagcacacctgcctgccgaatctgctcgggcgtcagttcgctgtgcccgagccagaccgggtgtggtgcggagacattacgtatctctgggcaggaaatcgctggtgctatctggcggttgttatggatctttttgcccgcagggttatcggctggagtctgtcagcgcatgccgataccgcactgataagcagtgccctgcggatggcctatgagacgcgtggccaaccccgggatgtcatgttccatagcgacagtaataatgccgatgtcagtctttaccaccacttagtttgccgtttaaccagattggtgtga

SEQ ID NO: 384348 - DNA, 312 bp, Salmonella enterica
atgaacaagaaaaccaaacgaaccttcccccctgagttcaggctggaatgtgcacagctgattgttgataagggctactcatatcgacaggccagtgaagcgatgaatgtcggttcaaccacgcttgagagctgggtacgccagctcaggagagagcgccaggggattacgccctctgccacacccattactccagaccagcaacgtatccgcgagctggaaaagcaagttcgccgtctggaggaacaaaatacgatattaaaaaaggctaccgcgctcttaatgtccgactcgctgaacggttcacgatag

SEQ ID NO: 384349 - DNA, 159 bp, Salmonella enterica; identical to SEQ ID NO: 144520

SEQ ID NO: 384350 - DNA, 273 bp, Salmonella enterica; identical to SEQ ID NO: 144519

SEQ ID NO: 384351 - DNA, 393 bp, Salmonella enterica; identical to SEQ ID NO: 144518

SEQ ID NO: 384352 - DNA, 243 bp, Salmonella enterica; identical to SEQ ID NO: 158940

SEQ ID NO: 384353 - DNA, 1281 bp, Salmonella enterica; identical to SEQ ID NO: 158941

SEQ ID NO: 384354 - DNA, 993 bp, Salmonella enterica; identical to SEQ ID NO: 158942

SEQ ID NO: 384355 - DNA, 705 bp, Salmonella enterica; identical to SEQ ID NO: 158943

SEQ ID NO: 384356 - DNA, 1365 bp, Salmonella enterica; identical to SEQ ID NO: 199339

SEQ ID NO: 384357 - DNA, 327 bp, Salmonella enterica; identical to SEQ ID NO: 158945

SEQ ID NO: 384358 - DNA, 1983 bp, Salmonella enterica; identical to SEQ ID NO: 158961

SEQ ID NO: 384359 - DNA, 1389 bp, Salmonella enterica; identical to SEQ ID NO: 158960

SEQ ID NO: 384360 - DNA, 618 bp, Salmonella enterica; identical to SEQ ID NO: 158959

SEQ ID NO: 384361 - DNA, 336 bp, Salmonella enterica; identical to SEQ ID NO: 158958

SEQ ID NO: 384362 - DNA, 3117 bp, Salmonella enterica; identical to SEQ ID NO: 280994

SEQ ID NO: 384363 - DNA, 1167 bp, Salmonella enterica; identical to SEQ ID NO: 158956

SEQ ID NO: 384364 - DNA, 717 bp, Salmonella enterica
ttgacgggcatagttcatggcgtgtactataccgtctaccgtccagacggttcaaaaatcaagcatctttggagtttcaccatggcaactcgtatgaaatcaagcccagaggagtcgcattcggcggacaacggcgctgaagccccctccatctctaagaaagcgcaacaaacacgggagcgcatccttcaagctgcgcgtgacgtagtcatggagggaggtgccgggcacctaacgcttgacgcggtcgttgcacgggcaggaatgagcaaaggtgcgttcctgtaccacttcaagaccaagcgcgatctgctcctcacgatgattgatgaccaggtctcggcgtttgatggcgggcaggaagagcgagagctgccattcgtcggcgatccagacccttggctatccagccaggtctcggctatgcctgacggcgggatgcaaaagatgagcgctgcattgctggtggccgtggctgaagaccccacgctgcttgagcctgtgcgcggctggtaccgcaggcagtacgagaacgcgagcaaatctccacgcggcaccgatatcgccggaatcgttctatttgccttggacggagtcttcctcgccgaaatgatgggttttccgacgtttgctgccgaagacctttctcgactcatgcacaccctccaggcgctcgcccgcggcgaactggaactcacccctattgataaacgctga

SEQ ID NO: 384365 - DNA, 1299 bp, Salmonella enterica
atgaacgaagcgggtctggctgtgcagcaggtgccagcacaagcactcccggccgagtggtggacggcgtacggtgatccgctgattgacgcgctggtgcgcaacgcgctggagcacaacaccgatctcgctattgcaagagcgcggattgatgaagctgtggcgatcacccgacgtacacgcgcttcaatgttccctagcttggcgctcacgccccaagcaacgcgcgcgcgcgacttttctttggcaccgaccatcagcagcgatgccaggcttccgctgtcggcttcatgggaagttgatctagcgggccgcctctcgcatgccgctgatggcgcacggatggacgcagttgctgtcgaacagaactggttcgcgacacgttggcagatcgcctttgagacagtgtccgctgcactgcagcagcggcaggcggcagagctggaagatctggcaaaagagcgacttcaagtcgccgagcgccttgagcgtctgacagagcagaagttcaaggcaggtcaagctacgggctttgacattgaacgcacgcgttccgaggtcatcgccctccgggtggagcaagagcagttgcgacgcgtacgcggcgaagcaacgcatgccttggatgtgctcgttggccggattccgggggcgcttggcagcggtcctgcgcttgcctctctcaccatgcccgattggactcccagaagcgtgccaggcgaattgctgcagcagcgccccgacgtcagagccgcgcaggcgcgtcttgcagcggcgacggcgcgatggaacgcagcagaaggcgagcggctccccaaacttgtgctcgatttgagtggtgggcgccaacgcttcgagaacaacggaacacgtgtggcagggaacattttctctctgggcttgggtgtgacgcttccgatctttgacggtggagcaatacaagcgggaatcgacgagggctcagcacgcagtcgcggcgcacaggctgacctggaacgcacggttttgcttgcgcttcaggatgtggagaacgcttatctgggctggcagacccagcggacttctctgcagcatcaggtcgatggtcttgtcgtcgctgatcgactccttgaccgcagtcgacgcctctttgaggcgggacaggtggatgcgaccgttgttgcagaagcggagcgtggcaccttgtcccagcgagcggctctggtccgtgctcgcgccgacgcagccgtgcaatggggtgttctcgctaaagcgctttctggttcgccagagcatgtgaatctgcaatcttcaccctga

SEQ ID NO: 384366 - DNA, 945 bp, Salmonella enterica; identical to SEQ ID NO: 158953

SEQ ID NO: 384367 - DNA, 276 bp, Salmonella enterica; identical to SEQ ID NO: 158952

SEQ ID NO: 384368 - DNA, 2016 bp, Salmonella enterica; identical to SEQ ID NO: 158951

SEQ ID NO: 384369 - DNA, 465 bp, Salmonella enterica; identical to SEQ ID NO: 199332

SEQ ID NO: 384370 - DNA, 1068 bp, Salmonella enterica; identical to SEQ ID NO: 158950

SEQ ID NO: 384371 - DNA, 384 bp, Salmonella enterica; identical to SEQ ID NO: 158949

SEQ ID NO: 384372 - DNA, 273 bp, Salmonella enterica; identical to SEQ ID NO: 158948

SEQ ID NO: 384373 - DNA, 2451 bp, Salmonella enterica; identical to SEQ ID NO: 199336

SEQ ID NO: 384374 - DNA, 309 bp, Salmonella enterica
ttgcgcctcggcaatcaggcgttcagtcgtggcgagcgtcgagcgcagccggttgacgatgttgaagtcgagattcgccaggttgcgcgcctggttcatcaacatctgcgcttcgttctggagctggttgatctggttgttgatctgctccagcgtgcggatggcagtcagcgtgttctgcaccaagttgacgggatcaacgaaagtgagcgccgccgctggctgagcgagcatcagcgagccggccagcgcggcggcgagcgaaacggaaagtacacgggtcttcatggcgaaatctccaggggttga

SEQ ID NO: 384375 - DNA, 357 bp, Salmonella enterica
ttgaaagcgattatccatgttaattcgacaaatgacagtattactatccagctatgcggagttggcgctactgaggtacaggccagagagaaagcatttggcaacgtaaatcgcgttgttaatgtctccagtcagcagtatcagggcggacagtgtgtcacagcatctcaagaatttatagatgcctacaatgtagaacctgtttgggactcacgatttgatgagactggtaaggttgtaaatagccttaatgaagactcacatcagtttattgttgattttttggaaagtctgtttattgatgaaaatggcgaactgaattgccgtgtgaaatctgtacagaatgaaacttggtaa

SEQ ID NO: 384376 - DNA, 774 bp, Salmonella enterica; identical to SEQ ID NO: 159024

SEQ ID NO: 384377 - DNA, 168 bp, Salmonella enterica; identical to SEQ ID NO: 144498

SEQ ID NO: 384378 - DNA, 939 bp, Salmonella enterica
atgacaagacaacatcctttattgaaaattgcgcttaataacgatggacatctttcgtggccaattttacccggacaaactcagcgctgcccaacgtgtctgcgagacgttattccgggtccggatggggatttagtacatcaagtggaggagggcgttaacccctgcacgccatctgtagatgttgtcatttcaaagtcgatcattgaactcctcagcgcaggtgagcgcctatatgttaacccagttaagaacgcgaatagaacactggccccatcgtttatctttctgcacaaagaccagcaacttcgaccatttataaatacggactatcaaccagcaggggccacctggagaagtgataaagggaacagacttggtcttttctatatggatgagcgagcgtctaaaattaataaggaccagttcgattttattgctgtaatagacccatctacttttcaagcagaatttgagaccttatggtccatgggcgaatttgataacccccttaccgcgttacagcactcactggtttcagagaatatgtcatctgtctgggtgaaatggcctgttaaaaacctgcaatcgaggaaagaatcggtgaagtccgattactggtatgactattatacacctcactacccagaggagcaggcagcttgcacggcaaccgtgattggaatagacggaaatgtatccggggaaactatttacatgctccagatcgccctagaccggtcgacagttgagtaccagcttgtaaaatcgctaggggtcatattgctactggataatacgggaaatttcgtatcggaggcgcagcctcactttgatataatcatcaaagcttgcatctcgggcgtcagagactttgtacgtcaaaatcctcgaatgcggagtgtggagcatcagattaccagtgcaatgcctggttag

SEQ ID NO: 384379 - DNA, 300 bp, Salmonella enterica
atggaaaatctggatgttgtatcagcggtagatttttacttagaaaaagcattttatttatttggattcataatgttaggtatggcatggcttactttccgtgctggttcaacttatcagcattttaaaaatgctgataagttagtcagtgaaggtagaggatctttctcaagcggtgaagaacctgaaatgatccggcgacttaagttccaaacattgatctggtacattgctaattgtgtggtgttagcactatccactattgtttttgggtatctattttatctacttcacagttaa

SEQ ID NO: 384380 - DNA, 294 bp, Salmonella enterica; identical to SEQ ID NO: 144502

SEQ ID NO: 384381 - DNA, 1479 bp, Salmonella enterica
atgttgctgtcctcgacgcgtaaggactggctgggtaacgtccgtggtgacgttctggccggtattgttgtcgcgctcgcactcattccagaagcgatcgccttttccattatcgccggtgttgatccccaggtgggcctctactcggcgttctgtattcctctcgttatggccttctttggcggacgtccggcgatgatttcgtcctccaccggtgcaatggctctcctgatggtgacgctggtgaaagatcatggcttacagtatttactggctgcctccatactgaccggggtattccagctgatagccggatatctgaagcttggcgggctgatgcgttttgtttcacgctcagtggtcacggggtttgttaatgcactggcaatactgatttttatggcccagttgcctgagctgaccaatgtgacatggcatgtttatgccatgactgcggcagggctggggatcatctatctcttcccttatatcaacaaaaccattccttcaccgcttgtgtgcatcgtggtgctgactgggattgccatgtggctgcatctggatgtgcgaaccgtcggggatatggggaaacttcccgacagtctgccggtcttcctgctcccggacgtgcctttaaatcttcagacgctgctcatcatcctgccatattctgcggggcttgcggtggttggcctgcttgagtcgatgatgaccgccactatcgtggatgacatgaccgacacgccaagcgacaaaaacagggagtgcaaagctcagggcatcgcgaacatctgcacatcctttatcggaggaatggcaggctgcgcgatgattgggcaatctgttatcaacgtaaaatccggtggacgcggacgactttcaaccctcacggcgggcgtggtgctgctttgcctgattgtgttcctgcgcaactgggtctcccaaattccgatggcagcgctggtcgcggtgatgattatggtttccatcgggacattctcctggcgctccattgccaacctgcggacacaccccctttcaaccagcgtggtcatgcttgccaccgtagcggttgtggtggcaacacataatctggccttcggtgtgctgaccggtgtactgattgcttcgctcaattttgccactaaagtatcccggttcatgcgtgtaacctcagttctggaggggacgagccggacgtataccgtcaccggccaggtattctttgcatcagcagaccgctttacgagccactttgatttccgtgaagcgattgagaatgtggtgatagacgtttcacatgcccatttctgggacatcacgtccgtcagcgccctggataaggtggtcattaagttccgcagagagggcgccggggttgaaatacgtgggatgaatgaagccacccgcaccatcgttgaccggtttggtgttcacgataaacctgaagaagtcgaaaaactgatgggcggtcattaa

SEQ ID NO: 384382 - DNA, 828 bp, Salmonella enterica
atgaataatactgttacagcttgtgtggacggttcactttcaacgcggtcagtgtgtgaatatgcggcgtgggcagcccgcactttgcaatcacagctagcactgttgcacgttatcgaaaaagacagcaccccggtagtgtcagacctgaccggcactctcggcatagacagtcagcaattgctgaccgatgagctggtagaaattgaagggcaacgtaatcgcctgctgatggcccaggggaaagcaatactggaaagttgtgctgaactgcttcaaaaacagggaagcccggatgtgcttttgatgcaaaaacacggtacaccggatgaagttctggcagagctgagcgaccttcgtctcatggtgctggggcgtcggggtagccagcatccggtaggctctcatctggaaagcgttattcgtctgcaaaagaaacccctactggttgttccggagaactactcagtgccttccagagtcatgctggcttatgatggcagtgaagaaagcaggagtaacctggaacgtctgacgatgagtcccttactcagggggctggagtgccaccttgtcatggtaaacggtaagaaggaagagctgctgaccgcacagcaaattttacgtgacgcggatatagaaaacagcacaacacatcttaccgggcaatcagtcggggacgcgcttattcgttacgccgaggaaaatgctgtcgatctgatagtgatgggggcctacggtcattccaggttgcggcagttctttatcggtagtcatacctccgaaatgctgcaaaagacgcaacaaccgcttcttatcctccgttag

SEQ ID NO: 384383 - DNA, 426 bp, Salmonella enterica; identical to SEQ ID NO: 23459

SEQ ID NO: 384384 - DNA, 1290 bp, Salmonella enterica
atgttactggctggtgctatctttttattcacgctcgtcctggttatctggcaacccagagggctggggattggctggagtgcctcactgggcgcaattctggcattgctgactggcgtcgttcatctgggggatattccggtggtctggcagatagtgtggaatgcgaccgccacctttatcgccgtgatcatcatcagtcttctgctcgacgaatccggcttctttgaatgggccgcgctgcacgttgcccgttgggggaatggccgggggcggctgctcttcacctggatcgtcctgcttggtgcgatggttgcggcactgtttgccaacgacggtgcggcactgatcctgacacctatcgttatcgcgatgctgctggcgctgggattcagccggggggcaaccttagcgtttatcatggccgcagggtttatcgctgacacggcaagcctgccactgattgtctcaaacctggtgaatatcgtctcggcggatttctttaagcttggtttctcagaatatgccgccgtgatggtcccggttaacctggccgcgattgcggctacgctggtgatgctgcatctgtttttccgtaaggacattcccgccgtttacgacgtttctctgttgaaagaaccgaaagacgctatacgtgatgtgaatacctttaaaaccggctggctggttctggtgttgcttctggtgggattcttcggactggagccgctgggcgtaccggtcagtttggtcgcagccgctggtgcattgcttctgtttgctgttgcgaaaaaagggcatgccattaacaccggtaaggtgctgcgtggtgcgccctggcaaatcgttatcttctcgctggggatgtacctggtggtctacggcttacgaaatgccggtctgacccactatctctcttccttgctgaatcagctggcagagcagggattgtgggcggcaacgctgggtacgggcttcctgacggccttcctgtcatcagtgatgaacaatatgccgaccgtgctggtcggggcgctgtcgattgatggcagcactgcgaccggtgttatcaaagaagcgatgatttacgccaacgtcatcggcagcgacctggggccaaaaattacccctatcggcagtctggcaacgttactgtggctgcacgttctgtcgcagaaaaatatcaaaattacctggggatattacttccgggtgggcattgtcatgacaatccccgtgctgtttgtcacgcttgcagcactggcgcttcgtctgtctttcactttgtaa

SEQ ID NO: 384385 - DNA, 321 bp, Salmonella enterica; identical to SEQ ID NO: 105723

SEQ ID NO: 384386 - DNA, 705 bp, Salmonella enterica; identical to SEQ ID NO: 105724

SEQ ID NO: 384387 - DNA, 246 bp, Salmonella enterica
atgaaagaacagcatacttatacaggcctctggattaccaaagatggattcatttgccatgagctattacctaatgggcgttacgacgaagctcgaggtacaaaacctaatgcttatcagggcgactacgacattcgtgaaaacaggatctactatcaggacgataccggttttacagctgatgggacttttgtcagtaatgacgaacttcatcacgcgggtatggtgcttttccggcgtaaataa

SEQ ID NO: 384388 - DNA, 723 bp, Salmonella enterica
atggataaagttatattaattaccggcgcgtcaagtggcattggggaaggcattgccagagagcttggaaaagcaggtgcgagagtgctattaggggcgcgcagactggatcgtatcgaagccattgcagcagaaatccgcagcgccggcggtatggctgaagcgcgtgagctggatgtcacaaacagactgtccatggctcatttcgtgcagtcagcgcttgataactgggggcgtgttgacgttctgattaacaatgcgggcatcatgccactttcaccgcttgcggccggcaaacaggatgaatgggaacgtacgattgacgttaacatcaagggcgtgctgtggggaattggggctgtgcttccagtgatggaagctcagggttctggccagataattaaccttggttctatcggtgccctttctgttgtgccaacagccgccgtctattgcgcctctaagttcgcagtacgggctatttcagatggtttacgtcaggaaagctcgaaaatccgtgtgacctgcgttaatcccggcgttgtggaaagtgaacttgcctcaaccatcactcatgcggaaaccatggcggtgatggatgcataccgttctgttgcacttaaaccagcggatattgcccgcgccgtacgacatgtaattgaggctccggaaagtgttgatacaacagaaataaccatcagaccgacagcatccgcaaactga

SEQ ID NO: 384389 - DNA, 900 bp, Salmonella enterica
atgaaaattgatctcaatcttttacctgtttttatcgcggttgctgaagagcgtaatttcaccatagccgcagcccggctgggggttacgcgctcggcggttagtcagggaatacggcggcttgaggatactttcggcacaatgctggtaatgcggacaacacgttcagtaaacctgactgaagcgggagaacgactgcgtacatccctgtcattatctttatccagcattgacgctgcgttcgaagatattgcatccgacagcacgccacgtggacttctgaggatcgcggtgacctccatagctgaagagtttctttcaggtccgctgatcgcctcgtttgcggctgctaatccagccgtgacgatcgatattgtcgtgatagatgaggaatttgatattgtggccgctggttatgatgctggcgtaaggctcggagatgtgatcgagaaggatatgattgccgtcccgcttacagaaaagcaacgtgaaatggtggttgcgtccccatcctatctcactgcttgtagcgcccctcttcatccgcgtgagcttgtacatcatcagtgtatcggctggcgtccttccccggatgttgctccttatcgctgggaatttgaggagaacgggagagctttcgacgtggcggtagaaccgcgaataacaactaatgacctgcgtctcatgctgaggctggctcttgccggtggaggtataacatttgcccctgaggaaacattcaggccgtatattgaaaatggtcaacttgtttcaatgcttgatgattttcttccccattttcctggcttttatctgtactttcctcaacgccggaatatagcgccaaaactacgcgccctaatcgaacatgtcaggcaatggcagcaaccgtatgcttaa

SEQ ID NO: 384390 - DNA, 1005 bp, Salmonella enterica
atgaaaaccaaacgcgtaaccattaaagatatagccgaacaggctggcgtctccaaagcgaccgccagcttggtactgaatggtcgtggcaaggagctgcgcgtggcgcaggaaacgcgtgagcgcgtactgtcgattgcccgtaagcatcactatcagccaagcattcatgcccgctcgctgcgcaacaaccgcagccacaccatcgggctggtggtgccggagatcaccaaccacggctttgcggtctttgcccatgagctggagatgctgtgccgcgaggcgggcgtccagctgttgatctcttgtactgatgaaaaccccggtcaggagagcgtggtggtcaataatatgattgcccgccaggtcgacgggatgatcgtcgcttcctgtatgcacaacgatgccgactatctcaaactcagccaacagctgccagtggtgctgtttgaccggtgccccaatgaaagcgcgctgccgctggtaatgaccgattcgattaccccaacggcggaactgatttcccgcatcgcgcctcagcatagcgatgagttctggtttttaggcggtcaggcgcgtctgtcgccctcccgcgatcgtctgaccgggttcacgcagggtttggctcaggcgggtattgccctgcgcccggaatgggtgatcaacggcaattaccaccccagctccggctatgagatgtttgccgcactctgcgcgcgccttgggcggccgcctaaggcgctattcaccgccgcctgcgggctgctcgaaggggttctgcgctatatgagccagcaccatttactcgactccgatattcatctgacgagctttgacgatcactatctttatgattcgctgtcgctgcgtatcgacactgtccagcaggataatcgccagctggcctggcactgctacgatctgataagccagctgatcgagggcgatacgcccgaaacgctacaacgctacctgcccgcaacgctgcagtttcggcatcagtaa

SEQ ID NO: 384391 - DNA, 1401 bp, Salmonella enterica
atgtctcttccatcacgactgcctgcgattttgcaggccgtaatacagggccagccacgtgcgctggccgatagccactatccgcgctggcaccttgcgccggtcaccgggctgatgaacgaccccaacggctttgtcgaatttgccggacgctatcacttgttttatcagtggaacccgctcgcctgcgatcatacgtttaagtgctgggcgcactggagctcccccgatctgctgcactggcagcatgagcccattgcgctgatgccggacgaagagtatgaccgtaacggctgctactccggcagcgcggtggataacaacggtacgcttaccctgtgctataccggcaacgtgaagtttgccgacggagggcgaaccgcctggcaatgcctggcaagggaaagcgccgacggcaccttccgcaaaatcggcccggtcctgccgctgccggagggctacaccggccacgtgcgcgacccaaaagtctggcgacacgaagacctgtggtacatggtgctgggtgcgcaggatcggcaaaagcgcggcaaggtgctgctgttcagctctgcggatctccatcagtggacgagtatgagtgaaatcgccggccacggcatcaatggcctcgacgacgtcggctatatgtgggagtgtccggatctttttcctctcggcgaccagcatattctaatctgctgtccgcaggggattgcccgcgaggaaaagtgttacctgaacacctacccggcagtatggatggcgggcgagtttgattacgctagtggcgctttcagccatggcgaactgcacgaactggacgccggctttgagttctacgccccgcaaaccatgcttaccagtgatggccgtcgtctgctggtcggctggatgggcgtgccggagggcgaagagatgcttcagccgaccctcatcaacggctggatccatcagatgacctgcctgcgtgagctggagtttatcaacggtcagctctatcagcgtccgctacgggaactgagcgccctgcgcggtgaagcgaacggctggtcggggaacgccctgccgctggcaccgatggaaatcgatttgcaaacccgcggggacgatatgttgagcctcgattttggcggcgtattaacccttgagtgcgatgccagcggactccgcctggcccgacgcagtctcgccagcgacgagatgcattatcgttactggcgcggaaacgtccgctcgctgcgtgttttcatcgaccagtcgagcgtggagattttcataaacggcggtgaaggggtgatgagcagccgctacttcccggcctgctccggtcagctaacattctccggcatcacgccggacgcattctgctactggccgctgcgaacttgcatggtagaataa

SEQ ID NO: 384392 - DNA, 1371 bp, Salmonella enterica
atggattttgaacagatttcctgctcgctgcttccgcttcttggaggcaaagaaaatatcgccagcgccgcgcactgcgccacgcgcctgcgcctggtgctggtcgatgattcgctggccgaccagcaggccatcggcaaagttgaaggggtgaagggctgttttcgtaatgccggacagatgcagattattttcggcaccggggtggtaaataaggtctacgctgcctttactcaggcggcgggtattagcgaatccagcaaatcggaagccgccgacatcgcggcaaaaaagctcaatccgttccagcgcatcgcccgcctgctatcaaacatcttcgtgccgataatccctgccatcgtcgcctctggtctgctgatgggcctgctgggaatggtcaaaacatacggctgggttgacccgggcaacgccatctacatcatgctggatatgtgcagctcggcggcatttatcattctgccgattctgattggctttaccgcagcccgcgaattcggcggtaatccttatctcggcgcgacgcttggcggcattctgactcatccagcgctgactaacgcctggggcgtggccgcgggtttccacaccatgaactttttcggcttcgaaattgccatgatcggctatcagggtacggtgttcccggtactgctggcagtatggtttatgagcatcgttgagaagcagttgcgtcgcgcaatccccgatgccctggatttgatcctgacgccgttcctgacggtgattatatccggttttatagccctgttgattatcggcccggccggtcgcgcactgggcgacggtatctcgtttgtcctcagcaccctgattagccacgccggctggctcgccgggttactgtttggcggtctctattcagttatcgtcattaccggtattcatcacagcttccatgcggttgaagccgggttgctgggcaatccctccatcggcgtcaacttcctgctgccgatttgggcgatggccaacgtcgctcagggcggagcctgtctggcggtgtggttcaaaaccaaagatgcaaaaattaaagccattactctgccctcggcgttttccgccatgctgggcatcaccgaggcggcgatttttggtattaacctgcgctttgtgaagccatttattgcggcgctgattggtggtgcggcgggcggcgcatgggtggtatctgtacacgtctacatgaccgcggtcggcctgacagcgatccccggcatggccatcgtgcaggccagttcgctgttgaactacattatcgggatggttatcgcctttggcgtcgcctttacggtctccctggttttgaaatacaaaacggacgctgaataa

SEQ ID NO: 384393 - DNA, 1518 bp, Salmonella enterica
atgtacagaaaaagcacacttgcgatgcttatcgctttgctaaccagcgctgcctctgcccatgcgcaaacggatataagcaccattgaagcccgactcaacgcgctggaaaaacgcctgcaggaggcagaaaacagggcgcaaacggcggaaaaccgcgccggggcggcggagaaaaaagttcagcaactcaccgcgcagcagcaaaaaaaccagaactcgactcaggaagtggctcagcgtaccgccagacttgagaaaaaagccgatgacaaaagcggatttgagtttcacggttacgcccgctccggcgtgataatgaatgattccggcgccagcaccaaatccggagcctacataacgccggcaggtgaaaccggcggagctatcggccgtctgggaaaccaggccgatacctatgttgaaatgaatcttgaacataagcagaccctggataatggggccacgacccgctttaaggtgatggtcgccgacgggcaaacctcttataacgactggactgcaagtaccagcgatctgaacgttcgtcaggcctttgtcgaattgggtaacctgccgacgttcgctgggccatttaagggctccaccctgtgggccgggaaacgtttcgaccgcgacaatttcgatattcactggattgactctgatgtcgtgttcctcgccggtaccggtggtggtatctatgacgtgaagtggaacgacggcctgcggagtaatttctccctgtacgggcgtaacttcggcgacattgatgattccagcaacagcgtgcagaactatatcctcaccatgaatcacttcgcaggtccgctgcagatgatggtcagcggtctgcgggcgaaggataacgacgagcgtaaagatagcaacggcaatctggtaaaaggcgatgcggcaaacaccggcgtgcatgcgctgctcggcctgcataacgacagtttctacggcctgcgcgacggtagcagtaaaaccgctctgctttatggtcatggtctgggcgcagaggttaaaggtatcggatctgatggcgcacttcgtccgggagccgacacatggcgcattgccagttacggcaccacgccgctcagcgaaaactggtctgttgccccggcaatgctggcgcaacgcagtaaagaccgctatgccgatggcgacagctatcagtgggcaacattcaacctgcgtctgattcaggcaatcaatcagaatttcgctctcgcctacgaaggcagctaccagtacatggatcttaaacccgaaggttataacgatcgtcaggcggtgaacggtagcttctacaagctcaccttcgccccgacatttaaggtcggcagtatcggtgatttcttcagtcgcccggagattcgtttctatacctcctggatggactggagcaaaaaactgaataattacgccagcgatgacgccctgggcagtgacggttttaactcgggcggcgaatggtctttcggtgtgcagatggaaacctggttctga

SEQ ID NO: 384394 - DNA, 924 bp, Salmonella enterica
atgaatgcaaaagtttgggttctgggcgacgcggtggtggacctgctgccggagagcgaagggcgcctgctgcagtgccctggaggcgcgccggctaacgtggcggtaggggttgcccgccttggcggcaacagcggatttatcggccgcgtcggcggtgacccgtttggccgctacatgcgtcataccctgcaacaggagcaggtcgacgtcagccatatgtatctcgacgatcagcaccgcacgtccactgtggtcgtcgaccttgacgaccagggggaacgcacctttacctttatggtacgccccagcgcggacctgttcctggttgaagaagacctgccacagtttgccgccggacagtggttgcacgtctgctccatcgcgctcagcgccgagcccagccgtagcactaccttcgcggcgatggagagcatcaggtctgccggcggtcgggtcagctttgaccctaatattcgtcccgatctctggcaggatcaggctttgctgctagcctgcctcgatcgcgctttgcacatggccaacgtggtaaagctatcggaagaggagctggtcttcatcagcagcagtaatgatttagcatacggaatcgccagcgtaacggagcgctatcagccagaattgctactggtgacccggggcaaagcgggggtgcttgccgcgtttcagcagaagtttacccatttcaacgcccggcctgtggccagcgtggacaccaccggcgcgggagacgcatttgtcgccggactgctcgccagccttgcggctaacgggatgccaacggacatgaccgcactggaaccgacactcacgcttgcacagacctgcggcgccctggccaccacagccaaaggtgcgatgaccgccttgccctatcagcgcgatctcaaccgtcagttttaa

SEQ ID NO: 384395 - DNA, 399 bp, Salmonella enterica; identical to SEQ ID NO: 119662

SEQ ID NO: 384396 - DNA, 276 bp, Salmonella enterica
atgaatgtgggttctactacgcttgagagctgggtacgccagctcaggagagagcgccaggggattacgccctctgccacacccattactccagaccagcaacgtatccgcgagctggaaaagcaggttcgccgtctggaggagcaaaatacgatattaaaaaaggctactgtagattcaattggtcaacgcaacagttatgtgaaaacatggggttgcggaggttttttgaatgagacgaacatttacagcagaggaaaaagcctctgtttttga

SEQ ID NO: 384397 - DNA, 687 bp, Salmonella enterica
atggatagcgtccaccatatttggtgtccattatcctctcaggaatttcaggatctgccagacggtgctgagacgacgcttaccaacaaagctcagggaggccagctgtatcgttatctgcgccaaggccataagcgttatcgcaaaggctcgggtagccggtgctcccccatcaaagatgcacgttcgattgaggagcgccctgccattgtcgatagccgggagcggtttggcgactgggaggcggacacggtacttggcaaacagggaactggggtactggtgacgttggcagagcgtaagagccgtcattatctggtgaaacgagttcgaagcaagcaggccgatgaggtccgggatgcgattatcgagatgctgaggccgtatgccaagcacgtccacaccatcacctttgacaacggcggcgagtttgccgggcacaaggcaatagaagcggcgctagaggcgaagacctattttgcacatccctattcgtcgtgggagcgagggctgaacgaaaacttcaacggattgctgcgacagtacatcccgaagggaacggatttgagaacagtcacggacgaggagatagaacaggcgcaaagagcgttgaatctacgcccacgaaaatgtctcggatttaggcagcccggcaaggtgttcgaggaatacttccgagctgcgtag

SEQ ID NO: 384398 - DNA, 342 bp, Salmonella enterica
atggttgaactctcgcatcgaccagagatctccgtagcgcaactcgctcgtgagcatgggatcaacgataatttgctgtttaagtggcgccagtactggcgcgaaggaaaactacgtcctccttcaacaacagaaaacaacgtgcctgagctgctcccgataacacttgatgccgaagatgttgtccctgcaacctccccccggtcacaacctgtagctgctgcggcacctgaatcactcaatatcagctgtgaagtgacgttccggcacggatcactccgtctgaatggtgccatcagcgaaaatatcctgaacctgctgatacgggagctcaaacgttga

SEQ ID NO: 384399 - DNA, 348 bp, Salmonella enterica; identical to SEQ ID NO: 16878

SEQ ID NO: 384400 - DNA, 273 bp, Salmonella enterica; identical to SEQ ID NO: 384203

SEQ ID NO: 384401 - DNA, 771 bp, Salmonella enterica; identical to SEQ ID NO: 117490

SEQ ID NO: 384402 - DNA, 318 bp, Salmonella enterica; identical to SEQ ID NO: 117489

SEQ ID NO: 384403 - DNA, 294 bp, Salmonella enterica; identical to SEQ ID NO: 117488

SEQ ID NO: 384404 - DNA, 315 bp, Salmonella enterica; identical to SEQ ID NO: 117487

SEQ ID NO: 384405 - DNA, 210 bp, Salmonella enterica; identical to SEQ ID NO: 199648

SEQ ID NO: 384406 - DNA, 1917 bp, Salmonella enterica
atgtccattcccgaactcgccgccagcatccagcgtgtcggcctgctgcaaaacctcatcgtgattgccgccgccgatggcgagcattacgaggtcgtggccggtgaccgtcgcctcgcagcgttgaagctgctggcgaaaaagcaccgcattagcaaggaatgggaggtgccttgcctgctggtggccgatggcaccgcccgcacggccagcctcaccgagaacgtgcagcgcgaagccatgcaccccgccgaccagttcgaggcgttcgccgcgctcgtggccgaaggccgcagcatcgaggacattgcagcggatttcagcgtcacgccgctggtggtgcagcgccgtctgaaactcgccaacgtgtcgccgcgcctgctggccgactaccgggccgaggccgtgagccttgaccagttgatggccctcgccatcaccgacgaccatgctgcgcaggaagccgcgttctacgatgcgcccacatggcagcgcggcccgcacaacctgcgcgaccgcctgaccgaacgcgaaatcgacgcctaccggcatccgctggtgcgctttgtcgggctggacggctacgagcaggaaggcggtggcatccgccgcgacctgttcgcggagggcgacaaaggcgtgtatctgaccgatgccgcactgctggaacggctggcgcaggacaagctggcaggtatcgccgccaaggtgcaggccgagggctgggcgtgggtggatgccacgccgggcatgacccatgccgatctgcaagccttccagcgtgcgccaagggaacgccgcagtccgaacaagcgcgacgcgcagcgcatcgagaagctgcaaaccaagctgcacgaactggccgaggcggtggatgccgcgctggacgacgaggacgaggaaaaggccgatgccttgcaggaagaaggcgaacgcctgggcgagcagttgcaggcgctggaagatggcttgctggactatgcggccaacgtgaaggccgcagccggtgccattgtcaccatcgaccgcgacgggcaggccgcgattcatcgcgggctgctgcgcgaagcggaggccaaggcactgcgcacgctggagcggctgcggcagggtttcggcagcgaaggcgaagccgcgaacgaggacgcaggcgaggacgacgagcagcccaagaccgccgccatgtctgaccgactggcgcagcggttgagcgcgcaccgtaccgctgcgctgcaaatcgaagttgcacggcatccgcaagcagcgctggccgccgtggtgcatggcatggtgcagaccgtcttgcaggaaaggcactacgggcacgacctgccgctgggtgtgcgcctcacggtgcaagaccggctggaaggcatggccccggactggccggaatcacccgccgccgtggcgctgcgcgaactgcaacaggtggcaggcgaaaccttgccggaggacagcgccgaactgttcgccgcgctgctggcgaaatcacaggatgaactggtgcggctgttggccgtgtgcttagcttccacggtggacgtggtgacgcctcgcgccacgccgcaccagcccggcgcggaactggcgcaggccgtggggctggatatggccgcgtggtggcagcccaccaatgagggttacttccggcatgtgccgaaggccgcgattctggaagccgttggcgggttcgcgccctcgcacgtcacccgactggcgaagttgaagaagggcgacattgccagcgaagccgaacggctggccgctggcaccggctggatgcccgccatcttccgctccgaaggcccgcagcagaccgggcaggacgcgccggcggatggcgaagccgaagcacaggaagaagtggccgccgtggcggatgaccagccgcaggccgaggctttggccgcgtga

SEQ ID NO: 384407 - DNA, 807 bp, Salmonella enterica; identical to SEQ ID NO: 31735

SEQ ID NO: 384408 - DNA, 441 bp, Salmonella enterica; identical to SEQ ID NO: 31736

SEQ ID NO: 384409 - DNA, 1362 bp, Salmonella enterica; identical to SEQ ID NO: 31737

SEQ ID NO: 384410 - DNA, 804 bp, Salmonella enterica; identical to SEQ ID NO: 31738

SEQ ID NO: 384411 - DNA, 300 bp, Salmonella enterica
atggcgctgatactgatcccggagttaacccgggcaggttactggccggctgaatatgccgacagaaatcaggccgttacccggcaatggctgacgggaagtgatgcgtactggaaatggcacacggcttacaatcgacattcggtggcagaaacggcaatgtaccgtgtcaaacagctgtttggcgggcatcttacgtttcgggattatgatgcgcaggctggagaggctatggccatgatccgtgccttaaacaaaatgacgtgtgcaggcatgccagaaagtgtacagattgcctga

SEQ ID NO: 384412 - DNA, 189 bp, Salmonella enterica
gtgtacagattgcctgaggaagtcagccacgaggagcgcttttatctaaatccgatttattcaacaaagccccgcgcatgccgtcagggggaggttctggagctgtcgctctgcgatgtcggggtagtgcacgacattgatacgctggcggatctggcggcggcggagcaaatcctggcacaagcctga

SEQ ID NO: 384413 - DNA, 456 bp, Salmonella enterica
atgcgacagcagttgctcgttgatcttcacccctttacgcttcagcgcatcgaccgctctttccatatagacggtattccacagggatatggcagctgtcaggagcgtcagtccactggcgcgatagctctgattttccggttttcggtccctgatttcacccagccggtgcaggaataccgcacgcgccagcgcgttacgggcttctcctttattcagtcccgcctgtacccgccgacgcagtgccggatcgcggaaccagtcgagcataaacagagttcgttcaatacggccaatttctctcaatgctttggcaagtccgttttgcttggggtagctggcaagctttttcagcatcagggatgccgtcacggttccctgctttatcgaggttgccagacgcagcacttcacgccagtgaatttcgatctctttcagattcaggctggtcgttga

SEQ ID NO: 384414 - DNA, 333 bp, Salmonella enterica; identical to SEQ ID NO: 199652

SEQ ID NO: 384415 - DNA, 552 bp, Salmonella enterica; identical to SEQ ID NO: 199653

SEQ ID NO: 384416 - DNA, 768 bp, Salmonella enterica; identical to SEQ ID NO: 199654

SEQ ID NO: 384417 - DNA, 1104 bp, Salmonella enterica; identical to SEQ ID NO: 159029

SEQ ID NO: 384418 - DNA, 201 bp, Salmonella enterica; identical to SEQ ID NO: 144627

SEQ ID NO: 384419 - DNA, 273 bp, Salmonella enterica
gtggactggctgatcgccgagcgtcccggcagggtaaaaaccttgaagcagcatccgcgcaagaacaaaacggccatcaacatcgaatacatgaaagccagcatccgtgccagggtggagcacccgtttcgcatcatcaagcggcagttcggcttcgtgaaagccaggtacaaggggctgctgaaaaacgataaccaactggcgatgttattcaccctggccaacctgtttcgggtggaccaaatgatacgtcagtgggagagatctcagtaa

SEQ ID NO: 384420 - DNA, 501 bp, Salmonella enterica; identical to SEQ ID NO: 101070

SEQ ID NO: 384421 - DNA, 330 bp, Salmonella enterica; identical to SEQ ID NO: 101046

SEQ ID NO: 384422 - DNA, 282 bp, Salmonella enterica; identical to SEQ ID NO: 101047

SEQ ID NO: 384423 - DNA, 507 bp, Salmonella enterica
gtggcgctgcgcgagttgcagcaggtagcaggcgaaggcttgccggaggacagcgccgaactgttcgccgtgctgctagcgaagtcgcaagatgaactggtgcggctgctggcgatatccgtggccgtcacggtggacgtggtgacaccccgcgccacgccgcagcaaccgggcgcggaactggcgcaggctgtcggcttggacatggccgcatggtggaagcccaccaatgagggttatttccggcatgtgccgaaggccgcgattctggaagccgtggagcagtacgccccggcgcacgtcacccggctggcgaagttgaagaaggccgacattgccagcgaagccgagcggctggccgatggcaccggctggatgcctgccatcttcaaggccgaaggcaccgacgacaccacggcgcaggatgcgccgcaggcggtgacgaacgacgagccggaagccatcgacaacgacgacgagcagcaggcccacgcactcgccgcctga

SEQ ID NO: 384424 - DNA, 486 bp, Salmonella enterica
gtgcggagctggccggtgaagccgtctttctctgcggtgaaggtgccgatgttagccatgatgatttctcctttcgggttgaacaaggtcgcgccagtgcgtccttgttgtgatccgtccggcgggggatgggctggccgcaccgcgcagcggtcgcaacaccgtggagaacctggaagcgaaaagaatttgtcccgcgaggaatgcgcgcagcgcagggggaattgttttcgctggaaggttgcggccatgaagcccagccaccgccaggattcacaacaacacaaggacgtactggccgcccgctcccgaatggaggcatggccgactcggcatccccgcgcgacggcttcaccggcctgcgccctgacacgggcaaggacaatgcccagcgacaaggtgaaagcgtccctactgctgcttgcggccctttgcgtgaggcgtggcgtggaagctccattgcaaggccgggcggcgtgtcggtga

SEQ ID NO: 384425 - DNA, 1023 bp, Salmonella enterica
atgaccatcacgactgtcggtatcgatcttgctaaaaatgtgttcgctgttcactgcgttgaccaacacggtaaaactgttctggttaaacccaaagtatcgcgtgctgcccttcctgagctgattgccagtttacctccctgtgttatcgggatggaggcatgctccggggctcactactgggcaaggttgtttcggcaatatggtcatgaaccacggctgatggctgctaaatttgtatctccttaccgcatggccggtaaatcaggcaaaaatgatgcagctgatgctcaggctatctgtgaagcagttcgtcgcccgcatatgcggtttgtaccagtgaaggatgagagccagcaggcgatgcaatgcctacaccgtatcagacagggttttatcgaagagaaaacagcaacatataaccgattgagaggtttgatatcggaattcggtgtcatcgccccacaaagtacagatgccctgcgtcacatggtttctgagcagaagagttctttgccacttcaggttcaacaatgtgttaatgacctgctggaacacattgatcgtattgaagataatattactgaatatgaccggattttgtcccgcatggcaaaaacagatcaccgcagccagcgattgatggaactgaaagggattggtcccacaacggcctgtgcgctggtcgccagtatcggtaatgcacacgattttaaaaatgggcgacaactggcagcctggctgggactaacgccatcgcagtacagcagtggtgggaaatcaaagcttggcaggataactaaagctggcgattcgtatctgcgaacgctactggttcagggggctcgttcggttctgattggtgccgagaaaaggactgatttattcagtcgttgggtctgttcactggtcgatcgcagaggatactggcgtgccgttgtagccatcgccgccaaaaacgcaaggctgtgctgggcatcattgcattatggtgatgatttcaggctgtactcagccagctaa

SEQ ID NO: 384426 - DNA, 1023 bp, Salmonella enterica; identical to SEQ ID NO: 94639

SEQ ID NO: 384427 - DNA, 279 bp, Salmonella enterica
atgctggccgcgcatcgccagttcgcccgcgatgtgcgtggcgagcgtggtcttgccgacaccgcctttctggttgagcagagcgaggatcatggcgcggccctccctgctggaaagccgggctttacctgccgtgcaaaacgctgttcgccgtgccgtttctcggttgtccaccgaaacggcgcgcttctactaaaagttatgtatttcttgttagggaagttagaggggccgcaaacccgcgccgttattggctttccggcgttttcgtactcctga

SEQ ID NO: 384428 - DNA, 411 bp, Salmonella enterica
ttgcatcgcttctcgtggatcaacgagtggaaggaactggccgatgccagcggcgtgccgctgggcatcgaactgatcctgccggactggttctatgcgggcgtgctcgatgccgccttggtgctgaccatcgacccagcctatttccgcttgaagggcgggatcgagcgctggctgtaccgcctggtgcgcaagcacggcggcaagcagccgggcggctggcaattcgacttccggcacctgcaccgcaagtcgggcagcgctgcgcgcttctccgacttcgcttacgacctgcgcgtcctggtggcgcggcagtcgctgcccggctacgtcctgggcatcgagcgaatgccggacgacggacaagaactgctgaccttccggcccgtgctgcacacggcacggggataa

SEQ ID NO: 384429 - DNA, 255 bp, Salmonella enterica; identical to SEQ ID NO: 162289

SEQ ID NO: 384430 - DNA, 411 bp, Salmonella enterica
ttgcatcgcttctcgtggatcaacgagtggaaggaactcgccgacgccagcggcaccccgctgggcatcgagctgatcttgccggactggttctatgccggcgtgctcgacgccgccctggtgctgaccatcgacccggcctatttccgcttgaagggcggtatcgaacgctggctgtaccgcctggtgcgcaagcatggcgggcggcaggagcacggctggcaattcgacttccgacacctgtaccgcaaatccggcagcgcggcccgcttctcggacttcgcctacgacgtgcgcgccctggtggcgcggcagtcgttgcccggctacgtcctcggcatcgagcggatgccggacgacaacaccgagctgctgaccttccggcccgtgccgcacgcggcacggggataa

SEQ ID NO: 384431 - DNA, 558 bp, Salmonella enterica; identical to SEQ ID NO: 199428

SEQ ID NO: 384432 - DNA, 546 bp, Salmonella enterica
atgaacgcattcgcttggcctgccgcgaacgcggcaccggctgcgccgctgcctgcgctttcgacactcgccggacaggccggcaatgtgccgctgacgcgcgtttcgctggcctacctcgaacatcgcttcaagctctacctgcgcttcggcgaaccggcgcgcacgcttcagctcgaccgctggcggcgctgcgcggtgttcctgccgggcgcgatgctctgccgcatccgctggcaggccaacgactacggcacgatccgctggcaactcatggtgatgcaggcttgcacaccgctggacgcggcgcagcgcatccccggtgttcagccgggcgcgcgcttgctcctacacaccgaaggcgatgccaacgtgcgcgccgtgctggagcgcatcgacggcatcgaggcgctgggcatcgctgccatcgacgtgtcgccggcgtactggcgcacgctgggcaaccgtcttgcggctcgccttgcgctgcccgaatacaccaccgagcggcataccgcctggctggccgggaaggtgctgccatga

SEQ ID NO: 384433 - DNA, 342 bp, Salmonella enterica
atgccgctgcccgacagggccgccatgctggctgcgcagcgcggctacctgccgacccgcgttccgctgctcaaacgtgtgggcgcagtcgcgccacaacacgtttgcatcgtcgccggccaggttcgcatcgacggcgtgccggtggccgccgccctgcctgccgaccggctgggccggccgctgccatccttgcagctttgccgccgtctccaaccgggcgaactgttcctgttgagcgcgaccaacccggcgtcgttcgacagccgctatttcgggccggtcagcgcgttcgccgtgatcggcgttgcgcatccgatctggctggagacacgtccatga

SEQ ID NO: 384434 - DNA, 210 bp, Salmonella enterica
atgttcctcggcatggggttcgtgctggcatttctgttcctgctgattttcgccatccgcggcatgtccgccgccgtcaaccgtttcttccctgaaccggctccggcaccaaaactggcacctgccgccgccgcgcccgcggacgactttgcccgcctcaagccggtgattgccgccgctatccaccaccatcgccgccttaacccttaa

SEQ ID NO: 384435 - DNA, 363 bp, Salmonella enterica
atggcacaggacgcccgcgaacgctggcagaacaccttgaacggcttgcacaccgcgatgcggatgcaggcgcaggtgtcgcagaacctcgcccaagacgaaagcgcgctggccgatctcgtgagccagagccagtcggccaccggcgcgctgcaagcgatgcaggcgacgaaccagctcctggctttgcaggccaagcagtcgatccaggcgcagcagctccagatcacgcaagaccgggccgcttcactggaactggcgcggcaagcggcggctatggagcgcgcccgcgaagtgcggcggcgctttctgggcaccggcacgccgtacacgccgcagtccgtcaacttctataacaactga

SEQ ID NO: 384436 - DNA, 153 bp, Salmonella enterica
atgaagtcatctcatttttgtaaactggcagtaactgcatctttagttatgggaattgtctccggcgctcaagccgcgggtagtaacacagcgaaggtcactttccttggtaatattgttgattccccctgctctctcacacttgttttttag

SEQ ID NO: 384437 - DNA, 429 bp, Salmonella enterica; identical to SEQ ID NO: 247579

SEQ ID NO: 384438 - DNA, 216 bp, Salmonella enterica; identical to SEQ ID NO: 85987

SEQ ID NO: 384439 - DNA, 690 bp, Salmonella enterica; identical to SEQ ID NO: 247578

SEQ ID NO: 384440 - DNA, 297 bp, Salmonella enterica; identical to SEQ ID NO: 247577

SEQ ID NO: 384441 - DNA, 273 bp, Salmonella enterica; identical to SEQ ID NO: 40307

SEQ ID NO: 384442 - DNA, 189 bp, Salmonella enterica; identical to SEQ ID NO: 247575

SEQ ID NO: 384443 - DNA, 612 bp, Salmonella enterica; identical to SEQ ID NO: 247574

SEQ ID NO: 384444 - DNA, 270 bp, Salmonella enterica; identical to SEQ ID NO: 247573

SEQ ID NO: 384445 - DNA, 306 bp, Salmonella enterica; identical to SEQ ID NO: 247569

SEQ ID NO: 384446 - DNA, 225 bp, Salmonella enterica
atgaacaaacaacaagttcgggcacggctggttgaaagaggcagtagcttgcgccagttcgcgcttaacgcgggctatgagccacgaacagtcacccaggctgtcagccgctgggcaggcaaaagcgaacttccacgcggtcgtttgacttatcggattttgcgagacctttcggtcgcaataggcaaagaagttacccccggcatcctcaaggaggcgtcatga

SEQ ID NO: 384447 - DNA, 411 bp, Salmonella enterica
atgagtataaaagagagattgcgcgaagcgatggatgctaagagtctgacaattaaggcattgtcagacttgtcaaaaattccatatcgctcacttcaaaactatctgcgtggagagagagaacctaatgcagaggctcttgttgcgctaagcacccatttgaacatatcaatagattggctacttactggtaaaggggaagctgttggggtagagaaagcacagccagctaatcaggagcagcatttcaaccagtctgatctgaagttattggagctgctcaaccaactggagccagaggtgcgaaaagagttgctgcgaggcgctgaggaaaaacagcgaatgattgatatggaaaaacagcttaaggagctgtccgcagcgttcgaaagattaaaaaatacgggttaa

SEQ ID NO: 384448 - DNA, 534 bp, Salmonella enterica; identical to SEQ ID NO: 85990

SEQ ID NO: 384449 - DNA, 771 bp, Salmonella enterica; identical to SEQ ID NO: 247567

SEQ ID NO: 384450 - DNA, 738 bp, Salmonella enterica
atgatgaccctctatatgtactggcatcaggttgtctgggccgtgctggtactgctggggctgggcatcgaactggcccgctacgggcaggcccgaacgggtaagcacagtttctggtggcagctctttggttcagtaacggtagcctggctgctctggtgtggcggcttcttcagtcaggcccgcgctgcccagccaccgcagaccgcgctgcagtatcgcgacgatgtgatccgtaatgcccggcttgaatggggaatgtctgcgccggtggccgacttcgccgcgcagctgcatcaggaaagcggctggcgacctgatgcggtctcgccggttggcgctcagggactggcgcagtttatgcccaccaccgctgactggataagtcagctgatgccggggcttaacagccgtgaaccgtttaatccgtcttgggccatccgggcgctggtcagctatgaccgctggctgtggcaacgcgtcagcgccgtcaatgactgcgagcgtatggccatgacgctgtcaggctataacggtggtctgggctgggtacagcgggacaaacggctggcctcgcagcaggggctggacagcacccgctggtttggtcatgtcgccacggtgaatgccggacgcagcactgccaactggcgggagaaccgtcattatccgcagcgcatcctgcacgaactggccccgcgttatctcacctggggaggcggcagctgtgtggactaa

SEQ ID NO: 384451 - DNA, 654 bp, Salmonella enterica
gtgtggactaacctgctaaaaaatctgccgtggcgcagtctgctgctggcggtggtcataaatgcttttctgattgggctttattacctgggctacaaaagcgggcatgaaaacgccacgcgcgacggcgataaggcggtcagtgagttgcagtcagcattcgacacgtacaaaacggagcaggcaacgcttgagaacgctgcgttgcgggcttgggcgaaacggtatcaggaacaggtagccgccgggcagcaggctgaagccagttaccttgagcagattgctcaactggagagccagaacaaacaactacaggggcaaattaacgatgtcacacagcgctggattgatgaaaaaggtaagagccatcccattgagtgcgtgtttactcgcggtttcgtgcgccagtacaacgccgcgctcggatatgacaacgcatccgtcgacaccggtcattcagacgcaactgccgccgctggcaccggcactggcgcagcgtccgggcaacctgaagccgctgacgcctggctacgcaactcaggcgtctcccagcgtgatgtcctcgccaacatcatcgacaacgcgaagcagtgccgcatctggcgcagccagataaacgggatgctggacgaacgggaaggattacagaaatga

SEQ ID NO: 384452 - DNA, 1497 bp, Salmonella enterica; identical to SEQ ID NO: 40309

SEQ ID NO: 384453 - DNA, 1098 bp, Salmonella enterica; identical to SEQ ID NO: 247556

SEQ ID NO: 384454 - DNA, 954 bp, Salmonella enterica; identical to SEQ ID NO: 247555

SEQ ID NO: 384455 - DNA, 357 bp, Salmonella enterica; identical to SEQ ID NO: 247554

SEQ ID NO: 384456 - DNA, 498 bp, Salmonella enterica; identical to SEQ ID NO: 247553

SEQ ID NO: 384457 - DNA, 252 bp, Salmonella enterica; identical to SEQ ID NO: 33172

SEQ ID NO: 384458 - DNA, 282 bp, Salmonella enterica; identical to SEQ ID NO: 247548

SEQ ID NO: 384459 - DNA, 213 bp, Salmonella enterica; identical to SEQ ID NO: 85992

SEQ ID NO: 384460 - DNA, 2466 bp, Salmonella enterica; identical to SEQ ID NO: 247545

SEQ ID NO: 384461 - DNA, 513 bp, Salmonella enterica; identical to SEQ ID NO: 247541

SEQ ID NO: 384462 - DNA, 348 bp, Salmonella enterica; identical to SEQ ID NO: 247540

SEQ ID NO: 384463 - DNA, 582 bp, Salmonella enterica; identical to SEQ ID NO: 247592

SEQ ID NO: 384464 - DNA, 249 bp, Salmonella enterica
atggcatttcaaattttaacgactactgcagcaagcattactgaactgaaacgtgacccaatgggaactttcaatgccggagatggcgctccagttgccattcttaaccgtaatgaaccggctttctactgtgtgcctccggcactttatgctcatcttatggatattcttgaggatgaagaactcggtcgtattatcgatgagcgtgcgaatgaacgcgtcattgaggtcaacattgatgacttataa

SEQ ID NO: 384465 - DNA, 315 bp, Salmonella enterica
atgacgttccagctcaagctgtcccggattcgccaccagatccagtttcagggcaacgccacatctggtgtaattctccagcccggtaatctggataagcccacgcccgcgatacctccagccatctccggcgtctttgttacccatgcggccgccataaaccagattggctatttgtggctggtgggcaacctggcgaccatcaatacgccccagcatttcgcactgataaggcgtaaggcgtttaccaaacgtttttttcagcgcctccaccgaataattaaagctttccttcagaacagtaaatcctgctga

SEQ ID NO: 384466 - DNA, 924 bp, Salmonella enterica
atgatttttgttcgcacagcaacaggtagtcataaggttgagagttgggatctgataacaagcaggccaaattttatcgataagatttcgaaggctgagcataaattatcagagattattggtttttatcgtttcaaagataagattcattgcgggctgaaaggctgtaaccagccgcaccaaatggggtatatcgttcgcactgatgatggcattgaaacaaatattggtaatatttgcggtgccgaagagttcggcgtgcaatttaaagagttaactgagcagttcgataacttcatgaagttagagacaaacaaaatgattgtctcagaggccaaactaaaatgtgataggtggtcatctaccattgacagctttcgtaagcttaagccatcaatagatacatgcgcggcgaatatcgaaaagattcaaaatgcaaactatgctggtcggcttgctgcaacagaaatcaggcttttagcaaagagtcaaagcggaatcgttactctaactgaaattgaaactgctaaatgggcaagatccattctcttcgccaccaataaatacatgcaagagtcaggagaggctactaccgattacttcatgggtaaggtgtctttcacgcatgtactattgccagagaataatttaagagagcgattcgtttctatatcagaagatattaaagctattcgtcagatagatttaaaggcagcaaatagcccaacaattgctgatttatcaagacgggcaaatactatagaagatcgaatcaaacagttgaaacttctcttacatgaggcaagaaagtttcttactaaaaaaaatctttcggccgtcagcagtaagcttaagaactcatcgactgcatctgagagtgatcgagcacattttgagtcgttccttaacactttaagtcgataa

SEQ ID NO: 384467 - DNA, 831 bp, Salmonella enterica
atgaacctagacagtgttttaaagttttttgcgcctaaaggtatgcacatttctgataccagcagagcgacggcaagcgaccagctaacggttactgatgttatggctgcactgggaatgacacagtccgacgcggggatagggttggccatgtacctcgggaaagctggaatcagtagccaggacagagaggcatccattatatggttggcagagtatgcgaaagagcgcgcaccgatggctgttcgtaaagcatccgggaaaaaattctcactatgtatgcgcattcttgcccggtttgcatataacgattacgcatcatcagcagctgatagcgtggaatgtccaaaatgctgtggtaaaggattgctcacaaccactaaaacggtgacgaaaagccattacacaatgcgattgccacaatgggcaaaagacatgaaacagtcaccatctgactttgaggtaaagcgtgatgtaactgacactgatcaaacgttatgttcccgttgccatggtactggaaagataagtaagcgatgccagtgtggcggaactggtaagacggttgatcgtaaagcgacagaactgcagggcgtaccggtttacaaagagtgtaagcgttgtgaaggtcgcgggtacagcaggccaaaatcatcggttgcctatcgtggtatcttctcggagttgccgagcctgcctgaccgtacctggcgatacagttggaaacctttttatgaaagtttggtgacgaagtgctttcaagaggaaagttattcaaatgctcaattaagtcgggtaacaaaaagcgacgatgtgatagaaatcgcgtaa

SEQ ID NO: 384468 - DNA, 990 bp, Salmonella enterica
gtgagagcgttactgacccctgaaattgctcctcgtatgggagttgtattgttcaggccgggatcggaactgatgcccctgtttatgcaggggcgtgttctgcttgaaccagagccggagcaattttcatctttcgccagcggcgcggtcccggcggtatcacagccgctggcggatgatcctgctgttcgtgatgtgttccgtaatgagtcggttatctatcgtgctggtggtctggatagtctggaaagctggctactccgggggaatggctgtcagtggccgcattcagactggcacagcgaacagatgacaaccatgcgccacgctccgggggcaatccgactgtgctggcactgcgataacctgctgcgcgaacagtttacggaacggctgaaatcaatagctgtggagaacacgacaaaatgggttttatcggttgtttgtcgtgatctgggttttgacgatatgcacgcagttactctcccggaactgtgctggtggatggtacgcaatgacctggcagaagtcttaccggagagcgctgcgagaaaagcattaaggatgccgaaggcaattgtccagtcagctacccgtgaaagtgaaattgttccctcggtgccggccaccagcattgtacaggataaggcgaaaaaggtactggcgctcagggttgatccggaatcgccggaaagcttcatgttacgtccgaaacgccgtcgatgggtcaatgagagatatacccgctgggttaaatcccagccgtgcgcctgctgcgggaagcaggcggatgatccgcaccacctgataggccacggtcagggagggatgggaacgaaggcgcatgacctctttgtgctgccgttgtgcagaacgcatcacaatgagttacatgcggacaccgtggcattcgaagagaaatacggctctcaactggagttgatatttcgttttatcgatcgcgcgctggcaattggcgtgctggcgtaa

SEQ ID NO: 384469 - DNA, 732 bp, Salmonella enterica
atgaacatcgacaaacaggcgctgctcgtcagcaaagcaaaagcatctgtattcactatggtatacatctctcaatttgaagcgagtgatattgattctgacgatatcgatttgcggtttgaagttgatggcgttgaaaccggcacaacagtttctatcgttgatgagtgtggccacgccgcacagataattacggcgctgctggatgagctggagcattacaaatcacgtgaagagcgagttacaaagctggttcttgataactcaacaagctgggatgctctctacaagaagctggaatcctcagagaagcgcatagcggaactggtaaacgatgaggtgcgccagcgcctggctaacgctgagcatcaactgcacatggctgaactggctaagtgcaaccttagagccagtcgcaaagctcagttccgcaagcgcaaggccgcagaacgccgtatagcagaactggaggcgcgagaaataaaaccagccaaaggtgaggtgcttgtcgttgtatctggttttactggttgtgggaaaagcgccatcgctggggaaatagaaatcgcgatgaaagctattggcgtaccggttcagtggactaacggcgatgcagaaaagcacatgactggcgctgactggctaacagcgattgagatgtacaaaccaacggtgcgcatcgtggaagtgaatgttccacgcgctgctggcatcaaggttgagggggagtga

SEQ ID NO: 384470 - DNA, 351 bp, Salmonella enterica
gtgaacaaatacagctattgcgcaacgatgattgccgccatactcagtacgaccacaatggccaatgccagtagccttgctatttcagtggcgaatgatgatgcaggtatatttcaaccatccttaaatgccctttatgggcacccggctgcagaccggggtgattatactgccgggctctttttaggctacagccacgatctcactgacgccagtcaactctcttttcatatcgcgcaagatatttattctccatcaggcgccaataagagaaagcctgaagccgtcaaaggcgaccgcgcgttcagcgcctttcttcataccggactggagtggagtggaattcattag

SEQ ID NO: 384471 - DNA, 204 bp, Salmonella enterica
atgaaacgattgaaagagatggctgtgattttatttttggcattactggcggcaggttttacgtcgtcggcgatggcatcgtctggcaacgataatccgtgggattttgatctggatttttcaggtggttattattattgcaaattaatacaggctggtcttctggaattacctcctccctttggtgagtattgctggcactaa

SEQ ID NO: 384472 - DNA, 1104 bp, Salmonella enterica
atggaaaaaaactcttttcccataagccacgaacattccttaactatggattatgttaaagcttttggtatgattttcgtattggttgggcatataaataatgacatatttaatgtttattatgcctatcttttccatatgccattatttttctttattggtggggttttatataaagatacacggtgtataacaaattttacagcgcatgttataaaaaaacagttaccttatcttatagtaacttatttgattattggttctattgcattattaattaatgtacgttatggaatacacacaggtgatgctttttcgacaggactatatgaaacggttaaacttgctataaaatcaaattttcataacaataaaatgtttctaacaggttggtttctgtttgcttatatatttgtgagcattttgtcggtgattataataaaaagcataaaacgggtcgttgttagcaatgctttattattatcggtattggtggcgattagtgtattattaataactgtctcaataacatatttatcccctcaatatattctggtaaaagactataagctgaattttatatgccaagtgttaaccggtatgtcgttttatatttttggatacgtgatcagaaatcagatatataacttattaaatttttatgtttttattttattaactgtaatattatatgtttcgaaaagttatggtttctctacgcagacaattatgtcatggagttattatccggatgggttaataatgtctgttattaacgcgctgataggtatttatgctgtgttttttatctctctattaattacaaggggaatgaaagaaattaagctgctaaaaatgataggtcagaattcaagagctatcatggcatatcatttacttgtatatgtaattttagatataattgcttcaattttaggtgattatagcctatcgggaacagatgtatatgataatcactttatcactaaatggtccgttcctgtctacattgcattaggtttgctactgcctctaatttttagtattctgaaacagaaagtaatagggaagataaaatttaagcgggattttagaatcaattaa

SEQ ID NO: 384473 - DNA, 858 bp, Salmonella enterica
atggagatgttgggaaattttcttttacaaacgattacatctactgctttcagtctggtatttctgactggtgttggttggcttttaagaacctggattggaaaccgaattcatttaagcattaaaaatcaatatgataataaattagaaaggcttaaggctgaacttaaaaccgaaagcgatgctcatctaacagatatgaaggcagaattagatcgacaatcaaatatattaaaaattgctgctgcgtctttctctgaggtacaaaaagcaacaatttcaagaaaaattgatgcagtcgatattctttggaaagggataatcgactttcgcaaaatatttcctggtgcagcctcttttacggacgttctcactgatgaagaaatgaaaaatttctatactgatccacgactacataaatattcacatgaattggagcaatttgatatgatatgtttaatcaatgccagctctgaagaagttaagttagtaaggccacatattggtgaatttgtgtgggcgctttactctacttactgcactattctgatgcgttccatttatttattgaagtcaggaaaggatgagccatctaaagtggcatggcattgcgatactaatattgaaaacttaattttagttgcatttggtgaagagtgttcttctgagtttaaaaaactccgttgggggagatatcaatggcttcataaccagtttgattcgtcattatttaaagcgattgatactcttctaactggtaaaagtttcagtgatgcagctttacatgaagcacaattgatggagcgtcaaattagtgctagtagatcaaatgagctcaagattccgtatcctctttaa

SEQ ID NO: 384474 - DNA, 6165 bp, Salmonella enterica
atgagtgaccgaagatcagagaagcgatttagtaacagccccctaagtgccgcccacaggggttacgtctaccaagatttagtcacggcatatctattcatctgttgccttgttcgccgagacgagaaaataactgttgatcgcaaaaccgttgaagacgaccgttttgatgatattgaggtcattgtaaatgggcataaattacgtaggcaactaaaatcaagtgaaaatataaccagaccattaactttcgatgattttgataaaaagaattcatctttacggtttgatcgattagtcaacacatttctctcctcagaagaggatactgctactgaagaatatcggctctgtgcaacatggcagtatcctgattctgacgaccctgttgttgaattacttataccagctaatagcgctgctggtactttcgatggatactccacggagctatactatttagatcctgatagggtctggccgaagagttcttccccagtatttaaaccattggtgagtatccctggaggggaagctgtacctagtcgcgatgatgtaattgctttttgcgagcggtttattattgaaattgcatttcctcctgcttcccttgatcttgaacatcccgggcctctcgagaatttactattaaaaatgcttgtggagcatgttggtattggtcgctatccaaatgatgaacgccgcgtggaagatgtggcagcactggcagttcatattgctaatgttgcaaggacaaggggagaatcattatcgccatcccttatagcgcaacgtttatcactccgtactgactttggtcgtattgctcaagcattccctctagacagagctgttttattcgagcggaagtcattacagaaacaactctttgaggcagcacaacaacaaggggttcatcttgttcttgctggtccaggagccggtaaatcatggtctttgacgcagttgtcagaagaactggtacaacagggttttattgtagctcgccattattgttttttggaaccaggggatgaactagttgaacgaagaattacaacaaacgttttcttcgctaatttgttggctgaattgcatgaatcctgtcaaaaacatgcaatccctttacaacagactttttcttcaggtattcatgagctcgaacagaccttaggtgaaatctctgcctgtgaaagacatactgtgatcattgttgatgggctggatcatattgcgcgtgttcgtgatgcatcattaggcctcagtgataatgaaacagatattgttgaacaattggcaacgcttgagctaccagaacgagtaacgctaattatcggctcgcaaccaggaaaccatcttgagccattacgggaagtatacaactctaatttgaacgaatacgttgttgaaccttggtcattcgaagaagtgagggaactaactataaaacttgggttaggtacttcactagcagagattaacctacaagaaaaagaaaatgacgttctgcaaatactgttccagcgctcggaaggtaatcctctatatactcgctacctttgttttggtctgacggatggtcttttatctggtgcaattactgaaccatttgaatggctcataggggtgcccgacctaaatggcgatattaaacattactacgggcacctatattcgtcggcaggcaaacaagctcaggcgattgctgatcttatgggggtgatggatttctcagtaactgaaagtgaattatgtgaaattgtcggcccattacttagaggatatgtttccattgcactacagatcttacgtcccgtcctaacccaggcaactactcagggcggcatgaggatatttcatgaaagttttcgacgtttcatgattgatgaattgatacgtcagggaagacaagttgctgatattttatatcccgtagcggtatggctggaaatgcgaggattttttgttgatgctaaaagttatcgctttttgctaccaattatgaggcgggctggaagagataacgaaattctgacatacgtttcagcatcatttgtacgcgaaagtgtcgctcatggtcatccttccgaagctattcagaaaaatatcatgcttgcgacggatgtggctgctcgtactcttaactggcctgcattggtccgctatgctgaattatccagagcacttaattcttgctttgaggaagggaacaatgattggcaagagtattggcggacttactattctatttatggggctgatgcattggccgagaggctgttgtttgatggtcgtccaacactaactcaaaaagaaggtttactggcctgtcagctagttgattccaaaggggttgccgcaccttggcaagaatacttatctattacaacagaaatagaagatagactcgattattcggatactaagtctcatggtgacgttcgttgtgataatgaagaggaagctctcgcaaccatttacggtgcattacggttagggcggtatagacaagttattcgacatatttattggaatctctgtcgttcaggattgcttttttcgccttggttcttgcgtaatttagctcaacaactagctcagtttacgtccccagccttagtcgaaagaatttgccatagaggggatcctacttatactggacgctacagattaccagacagaactgtctgtctcttatttctaggtctttcagatttctaccggaatataaaagcagtagatggcagtcggcattatgccgaaatggccttatgccaggctgttacgccaatagaagctatgtggtgtgttgacgctggagcttcaggtgaacgagcgcttgatatagtacgtaacgagcttaaagttgaaacaactccagcaaatgagcgttattcaccagaagccgagtttgtacaccagtgggtggcatcagtacgtctgaaagctcgcgatgtggactgtgagaggtttttccagcttcaacgacttagtctggagggagacggctggtatcgctgctggctgaggtttgttcttgctgttgcattggctgaagcggctgcggtgaaagatgaagcatacgatattctagccgcttttgaagaattaactaaggacacaagaccattcgctggtagccccagagcctgcgatctctattcgatacatcctattatcaaagcgagcctcgttcgtgcacttaagctcctcaaaactcgtgaggagtgggaaaaagctctaagtattatttctatggttcgtaatgatacgacaacatatctggatcgagatgaaaatagtccgctttcaggagatgtattgtattcattttttctcgcacacacaataaagcccgagattgcagatttaatcattaaaaggctagaagatgagcttgaatctatggaagcaaatggtacttattacagtatacatgcgttagaacgaatgaagttggctcaactttatgcgaaaacgtccccctcggaggcaatccggcactggcaacaggccattgtatttttattaggctatggttttcgaaaagatattacattgtttgatatcatcgaatgcgttcctgcattaaaacttcattcaagagaatcagcgatatatgcattgattcgtctccgcccactactaagtgcagtactttgtcataccgaccatagaacgacaaaacatgcccccaatgcatggtttagttcattgttacaagttgacgaagttcaggcaatcgaattacttaatcgtactctaatgtatgaacgaggtgttttttcttggacaagtatagaggcgcagaaggagacattacgtcaactggctgaccggggggattcaattttattgaatgcactttggtcgacattattggctgatattgactatgagaatgccggagaagcagtagtaaaagagaggctgtcctctatccaacgcttacttacagaatatccggcttatgctcaggaacgattcacggtactttgtgcagaagtatttaatgattcttctaactaccaattaagcgcggttgggcctttgcggaaatttgccgaagaacatagtctgcatatgccagcttacaaacttcatgaaacgaataaaaatagagaaactcatcgaagagaatatattggagatacatccacgattacctctatagctttacgcattccagtatttccgccagcacccaaatttgtcgaactgctaacaatattgcgaaagctttcaaaatcaactctttctcgtgctgaatatcaagagtctgtttcactaccattaagttatataatgacggaaatggtacaaagaggagaagaagagcaggctctgcgtctactctatttttttgttcacgaacgttcttattggtctctggagagtattacgccggtattatgtttggcggagtgtctggataattctggacatgaaaaattggctgttgtcgcctatacgcttgctttcacttctgcaagaggaggacgggggtggctcaattttggtgatgacacacaatccgcacctctccgtcgggctctggagatggataaaaagctggcactgcaaacgctggcacaggagacgctccgacggctaaatatggacggctattatgggttatcccgtcacctgattgaaaggatagctgactggggcgatcatgaactggcagtgaatgcctgggaagaggccttcaccattattgaaagccgattaccgctccccggtcatattcatgtgtttgaaaaccttgaacttcaggctacccctgaatggtctttggatgaatcactttgcgtgcttttactcacgaatacaggcaatgcggttatctccaggcgaatagcagctctgtcaggtgttgctcgactggtaaaagagagaacggaactcttttataaccctctaaaatattatctgatgcataccagtagtgtttcctcactacaatccatactacagattcttaacgaaactctggcagatgtgactgctttggttcaaaggcttaaagagccattaagggattatgctcaaagtccttcattaagtttgtcactgttggccaagcttcttttatcgcgtatcaaagaaacaacatttaacgcgaaatcagcgatgtcattggcaataaacacaccttcaaataaatccatggaagtagtttcctttgctgatgaaagctgtttattgaatattttccaagaagtatggcctgagttacctacgcttgtggctaccagaatggaatcatatattactggtgacgctgaaagcgttttcaagcattttatgaaggaacgatatgaactcaaatatgaccgaggaaattacgtaaaaccttcggctcgaactttactatggcattctgaattatttcttgccatttttgataatgttttgaccgaatttccggcacaactctggcgtaagggattgtgggaagcaggcatagaacgtagcatcctgggacaaattctgccttttatgcctcttcatctggctatggacgccagtcggatccccagaccagactggccgttatatgaaagtaaacaatataaactggcagaatttacgcgggtctctaatgaagacccaacatgggggggatggataagattagggctgtttgaacaatactattttcgggcagatggtaaagattatggccccatggacaggaaaacggtgcaatgtgctgcgattgttaggacaaatcctgatgggatggttccttcgaaagtatcgcctttaggcagtgatgatgccttagtttggtgggaagacattgattggatggaggcaatgcaggctcgagcaaagccacaattagttaagctgggtaaagtcaaagacttgttggatgatgtctttgtcctgcttcctcctgcggctctgaaatatgatgcacaattgaaatcatctcattacgcggggccgctttgctggtacgatgagaatggccgaccggtcgttgtattacgaacatggcgagttaagggaaaaggtactggtgacatagatgcccacgtaattatcggcgctgatttaattatgcatcccaaactggaaaaggtattgcatacggcatacggcggaccgcttaaagagcttaattctgttcactgcgaaactatttcgtag

SEQ ID NO: 384475 - DNA, 1956 bp, Salmonella enterica
ttgaatactacagaacaacagattgtaaagctggggccaccagtaggaaaagcagatgcttatttaccactggagcttatggaacagaaaacgtttgagctattttgttgtgagctcatcaagaaacggctgaaaatcgaagacggcgagatagttgataccatgacgattggcatttccggccaatcacaatttggggcggatatttttacgcatcgccagcacggcaatcaggacgtttattcgttatacgaagtgaaacgttgtaaaaaattcacaaacagccactatatttccactgttcgacgctttaatgaacatcgggaaaaatggcaggtaaatatcaatgagttttacatttttctcagtgagaaagcgtcagcaaaattaatagcagaatataaaaaacaagagtctatatttaaagaactgaatatagtacatcgtgtgcttgatacggaattaatccacgactggctgaaaaatctgtattgtccagatctgttgtatcgcttttgtcacgagagctgggtgtctcttttttatggcgagcgagcactgttaaatatcaaaaactatggcgtgtgggactataacgaatcttctgcctggcgaaattacacgcatccatatgaacacattactggtgatacctatacacttcagaacgatcatgtgctgattaaggcgtttttacctaatctgaaaggaaatccactatcctgtttcattgattttcgtaatggccgctatagccatgttttgttgacgatgagtcagaatgccctgctaaattcggccttcgaaggggccggtagtccaccggaggcgggagtcagaccgtgggttttaaaagaacatcatggcgaaaattattattgcgatatcggtaactgccgccttgtactaaccctaaatgaaacccgctccctatgtgatgcttttgataaattctggaggtgctataaacagcgcatggaagaaattgaccggatttgtcgcaccgttgatttctcgaacagtacaccactcggtgataatattcatctcattaccattccttactggctatggggtcgcattagcaccttttgtcaacatcatgactatctgaataccgaaggcgagtggtcgatatttaatcctgcccgtgaacgtattatggtctttacccgtcataaagacgaagtaatgaacgaagggcatcacgtcacactattagccagccgcgaccctaattttaatcgccttactaatcatcgcgtggcgctaatctggcaacctcccagtcgctatgatatcgataatatggaagaggacgccatcgggcctcgtaattactgggatgcgttgacgacatatcgatggctgatggagaaattaatccctgcggcagatagctggtactgtgctaattactttccagaacgcaggggctggcaacgactgccatttcgcgcaccccgccatatctcctgtacatccgatgatatttattccaactaccaaccggaaagtaatatctcggttgaacaggtagacagcaaacagagtctgctggcgttgctgactgaactacaggatttttttaatatctacactcgccgggtgtactttaaggcaagtgaatttgagcaactttgcgatgcctttctctttttattgaacaagactaccgtcaattactggggctatatccgcagtagcatcggtgcttcgcaggatgatagagagtctgtggtaacatcattgcaaaagtatcggagggaaagtacggtttatgaaagcaattcgtcactgtatgactatctgtttcgcggcatgatggcgctatttggcgacggagactgccatattaacgaagtagaagcgattaaagttgcgacattattgcgcccctttgtggataaggtgtcggaggggcgttttttgcggcgctgtcagaaaaaattatga

SEQ ID NO: 384476 - DNA, 474 bp, Salmonella enterica
atgccagatttcactccatctttcattaagtcacccggagagttactttccgttcccttcagtgccgccacggatttcaccgtacttgccgatcactgcgaaacctttgccgaaacccttattgaaagcaacgatcccacgctaaaaatggcgctctgcggcagactcaacgcctgtcttacactgttgcaacccacgttgttagaccccgtacctcctcatcttattgaaagcctgaccgttgacaccctccctgcaaattccccccgtttcgagcctgaatgcacagagctttgtcgctactgtctctccctaacgcagatgctggcagggcaaggcttttactctgaaatagagaaacaccttagctgcctgctgtatgaactgatcaactatttcgctgcggaaatgaaagcgccgcgctggctccgtacatctgaaggtgtgaaatttattgacgaggtgacggcatga

SEQ ID NO: 384477 - DNA, 885 bp, Salmonella enterica
atgagtatgctggagcgggaaatgcggcacctggcgaagcaggcgggcggcgcacataaaacggtcagcgatcgtatggcgcaggcgaaacgcttttgcgaacgtctggtaggggaactgaacgtacaaatccgttacgtcaggcacctgaaagcgcggcatattgaggattacatccgccaccggctggcgcagggcatcgacaaacgcaccctgcaaaatgaaatgtcagcgatccgggtgatcctgcggcaggccggacgcgaaaaactggcggatggcgaccggatcagcaaccgggcggtggggatcggcggcgcatcacgcagcggcgcacgtcgcgctatcgccgatggtaaataccagacggtgcaggaaaatgcccggctgaaagatccggggctggcggcagcgctggagctggcgcggctgatgggcctgcgctcgcaggaggcggtgcgctgcccgcagtcgtttaaaacgtggcagcaggcgctggcgcgtggagaaacccggctgacggtggtatttggcaccaaaggcgggcggccccgcgaaaccgtgatcctggatactatagctgtcaaaaaagcgctggagaacgctattaatattgcggaacagcgtaacggcaggctgatcgataaggccgatctgaaaagcgcgatgaactactggcgcggtcaggcggggcaactcggtttaacgggcaaaaataccccgcactcgctgcgttacgcctgggcgcaggatgcgatccgtcactatctggcgcagggattctgcaaaaaagaggcgctggccatggtggcgatggatttaggacacggcgacggacgcgggcgctatgtggcgcaggtgtatgggttgcgtggggaggactga

SEQ ID NO: 384478 - DNA, 1263 bp, Salmonella enterica
atgtctttaaacgattctagaatccgtaacttaaaaccctcggctaaacctttcaaagtgtcagattcgcatggtctctatctgctggttaatcctggcggttcacgcatctggtatctcaaatatcgcttcaacggtaaagaatcgcgcatcggtttaggcgcttatccgctggtttctcttgccgatgctcgtcagcagcgtgacgtatttcgtaagcaactggcgcagaatatcaatccggtgcaacagcgcatggaagagaaagccgccagttcgccggagaaatgttttaaggccgtggcgctcggctggcataaggccaataagaaatggtctgaacatcatgccagtcgcattcttgccagtatgagtaaccacatcttcccggtgattgggaatatgcgggtcactgacctcaaaacgccgcacttcaccgctttactgaaagggattgaagaaaaggggctgctggaagtcgcgtcccgtacccggcagcacctgaacaacatcatgcgctacgccgtgcagcaggggctgacggaaagtaacccggcgcaatatctggaaggtgtgactgcggcacctgtcaggaagcactaccccgcgttaccgccggaacgtctgccggaactgctggcgcgtatcgacggctacacaaaaggccgggagatcacgcgactggcggttgaactgacccttcacctgtttattcgctccagtgaactgcgttttgcgcgctggggtgagattgatttcaaaaacaaaatctggacgcttcccgccacccgcgaggaaatagacaaagtacgctattccgggcgtggcgcaaaaatgcgcacgccgcatattgtgccgctttcgcgtcagaccatcgacatcttgaaacggatcagggagatttccgggcatctggaactggtattccccggcgatcacaacccgtataagccgatgtgtgaaaataccatcaacaaagcgctacgtctgatgggatacgacacgcaggcggatgtttgcggtcacggctttcgggcaatagcttgtagcgcgttagtcgagtctgaactctggtcgcgggatgcggttgagcggcaaatgagccatcaggagcgcaacagtgtgcgggcggcgtatattcaccgcgccgagcacctcgacgcccgtaaagccatgatgcagtggtggtcggattatctggatacgtgccgggagggttttatcccgccctatatttatgcgcggcaaaataaagcggcctga

SEQ ID NO: 384479 - DNA, 1107 bp, Salmonella enterica
gtgcctgataacaccccaacaacccatgaagaaaatgcagcaaggcttagtcaggcgggcaaatgtctgcgggatattgaggcagggagatttcagtgtgatgaagaaaaacagcaaccgacaggcgaactggcagatgaaccagcaacgcctgaagcagtggaacaggacacaactgaacatcatccggacccacagccgctggagaatgaaccacctgtaagccagacagaagcaggctaccagaaaatacgggcagaactgcacgaagcacgtaaaaacattccacccaaaaacccggttgatgttggtaaacaactggcagccgcgcgcggtgaatatgtcgaagacatcagcgacccgaacgatccgaggtgggttcataacaattacagcgcctcaaatcagggtgaaaaagaagatgtggtgccggaggaaaaacaaccagcagcagagccggaggctgtcaccagaaacgcggacgggactttcgatgtatcagcgctattcccgcccccctcaaaccagaccgaaaaaacggaagccagaacagaaagagatggagaaacgccgaaagagagcaaccagcaggaaacggctggcgatacagggcaggaaattacaacggacggtggatcaggtactggcggtgatgaagctggcgaagcggcagatcccgtagaaaacggaaatttcactgtccctgatgatatacagccaggcatttactatgacatccctaacgaggcgtatcacgctggccagggggtcagtaaatcacagcttgatgatatcgtagatacaccagcaatttatctttggcgcaaaaatgcccccgtggacacggagaaaacaaagtctcttgatacaggaacggcttttcactgccgggtactggaaccagaggaattcagtaaacgcttcatcatcgcaccggagtttaaccgccgtaccagtgcaggaaaagaagaagagaaaacctttctggaagagtgcgcccggacaggaataaccgtgcttacggcagaagaaggccggaaaatcgaatttatgtaccagagtgtgatggcgttaaccgagtgcattgctggagaagttgatcagtga

SEQ ID NO: 384480 - DNA, 654 bp, Salmonella enterica
atgaaagagcgcggaatgatttttaacagtgagatggttcgcgccattctcgacggtcgcaaaacgcagacgcggcgcccgattaagttcccattcaaagatcgcaatcttggctgtgaattatccggcaacgaactcgctggggagctgtctgccagaaactatttgaacagtccgtttggtaagccgggtgatcgcatctgggtgcgcgagacgtttcaagggccattattcgatttcgatcagatggacgcctattgcaaagactccacaccatttgagaaagctcagttctgcgtttacaaggctgatggcaagcccgcaccagagtttttcgatgccgacgataatctgcattgctgctggagtccatccattcacatgccgcgctgggccagtcgcatccttctggaaatcaccgacgttcgcgttgaacggcttaatgctatcagccaggaagatgctcaggcagagggcatggagctaacaggttggcgcccgacttattcagatcctgatagcggaggcgaggtttgtacaccatatgacaattttgcacagttgtggtcgtccatctacggcgaagaaagctggcagggaaacccatgggtctgggttattgagtttaagcgtatcgaaggcggtgaggcatga

SEQ ID NO: 384481 - DNA, 249 bp, Salmonella enterica
atgaaaggtgcattaggcaagaaggaactcctggcggtggtgccattatccatgagcactatcgacaggctggaaagcgctggtgaattccctaaacgctggtacatcacagataaacgctgtgcatggacacaggaagaagttgagcactggctggaagaaagaaaagcggcaagccctgaaaaattccaaggaaaaaagccgccggttgatcagcgtgtttaccgcccagtaagtaacgccgcatga

SEQ ID NO: 384482 - DNA, 1023 bp, Salmonella enterica
atgtctaccaacgcacttaaggcagcagctaccggtaatcaggttgcgcatcacaacgaaaaaccaacaacgctggctgggctactcgcggatccaaaaattaaagcacagatggctcttgcccttccaaagcacatgactgctgatcgcctggcgcgtattgccaccacagagatccgcaagattccaaagttggcatcatgtgaccaagcaagcttccttggggcaattatgcaatgtgctcagctcggtcttgagcctggcggcgcacttggccacgcatacctgatcccgttcgacaagcgccagaaagtaaatggccgctgggaaactgtatcaacagaagctcagttgattatcggctatcgcgggatgattgaccttgcccgccgctcaggtcagatcctgagcatctcagcacgaaccgtccatgcaaacgataaattcagctactcatacggcctggaagaaactctagaacattcaccatgcgaaaccggtgaccgtggcgaactaacccatgtttacgcagttgccagactgaaagatggcggtgtccagttcgaagttatgagccgggctgacgttgaaaaagttcgcgctttgagcaaagcaggaagcagcggtccgtgggttgaccacttcgatgagatggcaaaaaagacggtgatccgtcgtctgttcaaatacctgcctgtttctatcgaactgcaaaaagcagttgtgatggatgagcgagcagaagctggcctgagccaagataacgcagcagttatcaccggcgagtattcagtagttgatgatgaacagcagatcctgacagtggtttctgactctgaacgcgaagaagcgcgggaatacgtcagcgcaattctgaacagccttgactcatccgccgcagacgcaaaggcgatgtttaaacgtgccgaagacgagatcaacgccatggccgaaaagctcggtgaagaatatcaccagggttttataacgacgcttaacgatatgcgccctgaattcgaataa

SEQ ID NO: 384483 - DNA, 900 bp, Salmonella enterica
atgatgcagaacgcaggaagcatggatagaaccaaataccttggaggaagtgatgtcgccggtattctcgggattagcccgtggcgcactccgcttgaggtttacctggacaaggtccaaccgcgtattaagccagtagacccttctaagcagaaagttttcacgcgtggccagcgcatggaaccatacgtgatcgaccttctctctgaagaaacaggcctcgaaattattcatcgtggcaatcgttatatccaccgtgattacggttttatcgcagcagagatcgatgccgaagccgctacaggcgagaacatagagatcaaaacggttagcccgttcaaggctaaagagtggggtgaagttcagacagatgcaatccctgtgcattacacggctcaggccatgcatggactgatggttaccggaaagcaggtatgcgtattcggcgtactgattggcggtgacgacttccgtatctatcgggttgagcgtgacgaagaaactattcaagccatcctcgaaaaagaagtcgccttctgggaccgggtgaaaaatcttaacccgcctgaggcaacgagcgtaagcgatatatcgctgatgtttgaaaaagatgcaggaaccagtatcgaggctgacggaaaggctctttcgctattcaacgaccttcgtgacatggaatcacgctgtaaatctctggaagcagaaattgccgtatcgaaagagaagttgaagatgtacatgcaggagcactcaatcctgacgctggacggcaaaccgatctgcacatggaaatcacaggttagcaatagattcgatcagaagttattccaggtagagcaccctgacctgtacgaaaaattcaaaacagcaacgacatcacgcgtattcagaatgaagtaa

SEQ ID NO: 384484 - DNA, 303 bp, Salmonella enterica
atgcacattcagaaattcaataacctgaaaaaaatcgtcgctcagttcggtggtgattaccagatgtcgtcagatttatacgaccgccacgttgagcttattgatgcgattagcggcgccgacatggacgagacattcgagcgttccctgcttcgcgctggagttcgcaaagaaatcatcgacgcagctcgcgaaagctgcgagttcgaagaggtcatgtcgacattcaagcgcgagctgaccggtatcgtcgcccgcctggacctggcagaccggatcgacagcgcgaggacagcggcatga

SEQ ID NO: 384485 - DNA, 1080 bp, Salmonella enterica
gtgagcgaattagcaattatcgaaattgcgccagatatggcgccaagcatttacgtagaaaacggtctggaaaaattcctcgaacagatccgcgaaagcgttaatgaagttcctgacctgagcactgccaaaggtcgtgcccgcattgcatctctggcagcacaggtttctcgcagtaaaacagcagttgaaaagccaggccgcgattaccttcgtcatctgaaagaagccgtcaaacctgctgaagctgaacttcgtcgatttgtatcagcttgcgatgagatgcgcgatgaggttcgccgcccacttaccgaatgggaagcagagcaggaacgcatcaaggctgaagaagccatgaacgcactgcacgccgaagcgctggaaatgaacgaagagttcgaccgccagcgtgccgcgcagatcgaagcagaccacgaaatggctctgctgatgaatgacaagtttgaccgtgaccgcgaagagcagcgccgccaggcggaacaggctcagcgtgaacgtgacgagaagctccaacgagaagccgctgaaaaagccactcgtgatgctgaagaaaaagccaaccgtgaacgccagcagcaccaggatgcacttagtgagatcagcggtattcagcagcaggtgatcatcgcgcagtcggggcggttaggcgttcgccagggcgggacaatccagtgcattaaagaaacgctggctgaaactgaggagtggcctattgatgggcgctttggctcattgatgggtgcagctgaaaatgccaagcagcaagccattgttcagatcaaacaactcctgattaacgctgagactattcaaaagcagcaagaagaaaatgaccgcattcttcgcgaggctgaagcaaaagaaaaaaatcgcttggacgaagagaagcgcatcgctgatgaagcggcagcacgcgctgctgatgtagagcaccgtcgtgccattaatgctgctgcggttcaagcgctcattgaacagggtattcctgatgactgggcgaaggcatgtgttgtcgccatcgctcgcgggaaagttccagcaacaaccatcaactactga

SEQ ID NO: 384486 - DNA, 195 bp, Salmonella enterica
gtgaagattgtcaccagaatggaggcagcaaaagctggccttaatcgtttttataccggtaaagaatgccgtaatggtcaccgtgctgagcgctacgttctgaacggaacgtgtgttgagtgcgcaatgaatagcgctcatcgtcaccgtgatgaattcgctgctgcgttgaggaacgcgcgggaggcaacatga

SEQ ID NO: 384487 - DNA, 675 bp, Salmonella enterica
atgaatatctatcaacgcatcaacggcgctgactggcgcaatatctttgtcgtcggtgatctgcatggatgctacacactgctgatgaatgaactcgacaaggtttctttcgaccctgcgtgcgatttgctgatatcagtgggtgaccttgttgaccgcggcgcggaaaacgtcgagtgcctggatctgattactatgccatggttccgagccgtacgtggcaaccatgagcagatgatgattgatggcctgtcagagcatggaaacgttaatcactggctggtaaatggtggtggatggttcttttatctcgactacgaaaaagaagtattagctaaagcgcttgtccataaagtagcagagttgccgctgatcatcgaactggtgaccggcgaccgtaaagttgtcatctgccacgctgactacccgcacaacgaatatgagttcgacaagccagtgccagaggaaatggtcatctggaacagagagcggatcgccaatgcgcaagacggatatcatcacgaaatcatcggcgcagacattttcatatttggtcacacgcctgcacgtcagccactgaaatactccaaccagatgtacatcgacacgggcgctgtgttctgcggaaacctgacattagtacagttgcaaggcgaggtgaatgatggccggtga

SEQ ID NO: 384488 - DNA, 678 bp, Salmonella enterica
atggccggtgactggatcaagatgcgtgccgacctgcacacgcatcctaaagttgtccgcatggcatccgcattgaaagcggacagattgcggatagttggcggactacattccgcatggtgtctttttgatgtccactctgttgacggttttcttgacggatacagtgctgagactctcgacgacctgatcggcttccccggatttgcgcgtgcaatgatggctgtcggatggctggaagaagaaggcgaaagcctagtaatgccgcgctttgaagcccataacgggcagtctgccaagcgtcgagcacaggacgccgacaggaagagaaatgtccgcaaagcgtccgcatcagaagcggacaaaaagcggaccagagaagagaagagaagagaagatattaaaccccatataaaccccactcataacgcgcgcgcgaaaaatcctgtggataacttttcggaggaacaatttgcgatgtcggatgaatggaagccggatcccgatttcactgaacagtctcgagactggggaactccggtgcatagtgacgtgaagaaaacagagctgaaggcgtttatcgacttctggaagtacgaagatgtccagttaaaccagtaccagtggcagcagaaactggccaggcatatcatccacatcaggggtgacagctcgtag

SEQ ID NO: 384489 - DNA, 465 bp, Salmonella enterica
atggcggcagtattagggattgacccaggatgcagcggatctctggtcctgataactgatcagggcggatacatcgaccatctggcaatgccgaccatcaaggttgggaccaagtccagagtcaacggcgcagcggtggctgcatggctgcgtaagtacggaattacgcacgcgtacctcgagcaggtaggagcaatgcctgggcagggaacggcgagcatgttcacgttcgggcacgcagctggcgtagcggaggggatcctgcagggtctcaacattccgtacacgctggtaactccgcaggcctggaagaagtcagccggtctcatcggaagtgacaaggacgcggcacgcagcagagcaattcagctctacccggaactcagggcgctggatgcaaaagcaaaaggccaggccatcgcggatgcgctgttaatcgccaggcacgggatcagcatcaaataa

SEQ ID NO: 384490 - DNA, 213 bp, Salmonella enterica
atgagcaagccaactgatgaagaaatcattcaggtgcttcgtgatcatggcaattgcatgagctatgtggtcactcactggttacgcgataactacaagggcatcaagacagcgtatgtactgcgccgcctgaaaaaacttgaggccctcggtgcagtgaagcgagtgaaaagcagttatgcggttcaaatctgctgggaggcagcccaatga

SEQ ID NO: 384491 - DNA, 324 bp, Salmonella enterica
atgacagcactcaacaaactgacagacgggcagttgcttttccgtttacaggacttttacggcgccgaacaggacgccatcaagattaatgaccatgaatatgctcaggagtgctcagacatagtgagtgttattcgtgaagttatggagtcaaggaaagcgcttgaagccgcagagaatcgcatgacagaactggaatctcgtgttgttgcgttgccacgccgagtaggcgctaaatgttcatggcaggatggaccactaatgcacgcggatgaggtcatcgaagcaatccgcgccgctggcattggcgtgaagggggagtga

SEQ ID NO: 384492 - DNA, 423 bp, Salmonella enterica
atggcgctgacgaaaaaacaacgtgcagagctacgcatgaagtttggcggtcgctgcgcttattgcgggtgcgaacttcccgaaaagggctggcatgctgaccacgttgaggcggtgctacgcaaatcagagcagtgcatgaaggctgcagcgaaaggcatcttcaaactgaaggtgacgggtgaattctacaggccagaggctgagaggcttgaaaacctgttcccggcatgtgcgccatgcaatctgctgaaaacgtcctattcgctggaaatgttcagaaagcaggtatctcttcaggttgagcgcgggcgaaagagcagcgtgaatttccgcactgcagagcgtttcggcctcatcgaggcagtggagaagccagtggtgttctggtttgaacaatatcaggaaggagcggcatcatga

SEQ ID NO: 384493 - DNA, 594 bp, Salmonella enterica
atgagcactattaccaaagaacgcattgcaaacctcattgagttcaattctgagggcagcgactgtcaggccaatgccgagcagtgggaagttcatgaacttgcgcgtatcgctctgacatcgctcgaagctgagcctgtagctgatgtagttgcatggtcttcgcaaaacgaagagcgaacctgcgatattcgctggcgacgttttgacgttgcgccgggcccgctttacacctccccgccagcgccggtagtgccagatgaaatggtcaacaacattgacaatccttgtggcgacgaggatttgatttacgaggaggggaaaattgaaggctggaacgcctgccgagccgccatgcttcaggctggcaactctccggtaactccggatgacgtaaggcgcatggactggctggtatcgaaaacggttaatgttcgcgagccgatggtttacggaagccatagccttttctggtcgcagaccatcacggatgaagaggacgattatcacgcgacaaaattacgcgagcaaatcgatgaggctatggcggatgagcgggcagcagcaccgcagcaggaggtgaataatgtctag

SEQ ID NO: 384494 - DNA, 180 bp, Salmonella enterica
atgtctagagatgaaatgatagccaaagcctatagcgacaaaaacttcctgaattggtttgagtgttacttcggttatgggccggaagacgaaatcccatgcaatcatcctgtactggtagcaactgcgattgcatgggttgagtctcgtaagtttgtaaacgaggatgcaaatggctaa

SEQ ID NO: 384495 - DNA, 339 bp, Salmonella enterica
atggctaaaaccgcagcagagcgcaaagccgcgcagcgggtccgcctggctgaatctggtaaccgcaaactggaattgcaactcgacgagcaggagcaggaaatgctggcgcggaactgcgccgcccgtcgccctggtcgtgcgccgtatgaaatggctgaatacattgcgatgctcattcggcaggatgatgcccgagttcgtggccgcatcaggtcaatcagcgctaaccgctgtggtaagtgcggcgatgagctgccggttaagtcatgcccatgcgacggagattcggcgtgctgggtgacgcgtggctggcatgagactaaattatcagtgtga

SEQ ID NO: 384496 - DNA, 669 bp, Salmonella enterica
atggccgccgactatggcggctttgttttgcgtgttactattaccaaaacggtaattattactttggtggtaacaatgcccgcagaaccaaaagcaccaaaacgtaaatcaacgcagtttaagccactcacagcgatgcaggaggcttacgcgcaggaatataccaaatgtcctgagaatcagactcaggcagcgattaacgccggattctcacctaatgcggcggcagtcaaagccagcgtcatgatgcgtgatgagcgcatccagaaacggatcgccgagctgatggaggaacgtaacaagcgcttgcgcgttagtgcggattacgtactgctccgcctggtggaaattgaccagatggacgtgatcgacatcctgaacgatgacggcacgctgaagccgatccgcgagtggccgaaaatctggcgaaccacgctcagcgggtttgacctgtcctcaaccatcatgaacatggatgagacatcaatcgagacaatcctcaagaaaataaaatggcctgacaaggtgaagaaccttgagctgattggtaagcacgtcgacgttaacgcgttcaaagagcgccttgaggtatccggcaccgtcaccattgccgaccgcatggcgaaggcccgccgtcgcgttaaagagcaggctggtggtgaagaatga

SEQ ID NO: 384497 - DNA, 1482 bp, Salmonella enterica
atgacagcagcagctatgtcgccggaagagcaactcgtcgaggatattgcatcgttcacgtatgacccgcttggctatgccttgtatgcgttcccgtggggcgaagagggaacagagttggcgcatgctaccggccctcgaaaatggcaggctgatgcattcagcgagatacgcgaccatctacagaatccggcaacacgtcaccagccgctgatgctggcccgtgcatccggccacggtatcggtaaatccgcgttcatctcgatgctgattaactggggcatgtcgacctgcgaagattgcaaggtggtggtgaccgctaacaccgacaaccaactgcgcacaaaaacatggcctgaaatcataaaatggtcgaacctggctattacgaaagagtggttcacctgcaccgctaccgcaatgtacagcaacgatcccggtcacgacaaacgctggcgcgctgacgcaatcccatggtctgagcataacaccgaggcatttgccggactgcacaacgagcgaaagcgcatcatcgtcgtattcgacgaagcgtccaacattgccgatctggtgtgggaagtagcagagggtgctctgacggacgaggacaccgagattatctgggtggcgttcggaaacccgacgcgtaacaccgggcgtttccgcgaatgcttccgcaaatataaacaccgctggaagtgcgcgcagatagacagccgtactgtcgaaggaacaaacaagcagcagttgcagaaatgggtggacgactacggcgaggatagcgactttgtgaaggtccgtgtgcgcgggatcttccctgatgcgtctgaaaaccagtttattccatccggcctgacgcaaccagctgttggcagggttatcactccggcacaggtccagcacgctgctgtagttcttggcgtcgacccgtctcaccagggtaaagaccccgcagttatctacctgaggcaggggctgcactgcaagaaacttggggagtggcagcgtaccaccgacgatgtgctgtttgcgaaagtgattgccgacttcgaggaccagtaccaggctgatgctgtgtttatcgattacggctatgggacagggctaaaatccgttggcgacaactgggggcgcaactggacgctgataatgttcggcagcggtacggcagatcccgagatgggcaataagcgcggcgagatgtacaaatccgcccgcgatgcgctgaagctaggggctcaactggatagccaggaacttgccgacgaactgagcgcacctgaatacaaagtcaggctgaaggacagcaggaagattttacaggataaggacgaggtgaaagaattgcttggccggtcaccgaacaatgccgacgcctatgtgctgacttatgccgctccggtcaccaaaaaacagttcaactatgggcagcagcaaagccagcagggtaaggcgctgactgattatgacccgtggaaatag

SEQ ID NO: 384498 - DNA, 429 bp, Salmonella enterica
atgaaaacagttgatatgttggctacgtatttagacacatggccaagcaaatacatcagagtctttcagggtagtgactccattttttatggtgaagaatctatcggcgaaactgatttagtaataactaaggcaatacccggtgaacaactggcagggttaatgctgagtgaagatgctggaacgtgcatcacctgtcaggagtgggttgctgcacgtatgtcggcaatggaaaatggtgatgtgcctgatatttctcgtgcctacgtcaataaagaaaaaagtgatgatgattacatgcgcgaacacttatacaacatgaagttgcaatgtctgcatgcggcgcttattcagagtgggcaattcgataaaaccaatgccaccaacattgcggaagccatcaacgctggatttgatgccatcaagtaa

SEQ ID NO: 384499 - DNA, 297 bp, Salmonella enterica
atgactgatatcgacgacgaaggccgcaaagcagagcttgacgccaaacagcaacttctggcgcagcgcgatatcgacgacatccagtttgttatgggcagcgagcagggccgacgcgtgatctggtcactgcttgagaaaggtcaggtgtttggagcttgcttcaacgtagatccgcaaatcacagcattcaacgaagggcagcgcaacctggctctggttctgtttcagcgcgtcatgacgcactgccccgatcagtatctgaagatggccgcagaggccagtgaacaggagtaa

SEQ ID NO: 384500 - DNA, 987 bp, Salmonella enterica
atggctgttaaaggcttaactgcgctgacgctggcagactggggtaagcgcatcgacccaaacgggaaagtcgataaaattatcgaactgctttcccagacaaacccgatccttcaggatatgccttttgttgaaggaaaccttccgactgggcaccgtacaactgtacgtacaggcttaccttcagctacgtggcgtctgctcaactacggtgtgaagcaaagcaagtcgactactgtgcaggtaacagactcctgtgggatgctggaaacctactctgaagttgataaatctttggctgatttgaacggtaacactgctgagttccgcctgtctgaagaccgcgcattcatcgaagcaatgaaccagcagatggctcagacattgttctatggtgataccagcgttaaccctcagcagttcatgggcctgtcatcccgttactcaagcctgtctgctggaaacgcgcagaacatcatcgatggtggtggtactggaacagacaatacctctatctggctggttgtctggggtgagaacactgttcatggcacgttccctaaaggccaaaaagcaggacttcagcatcaggacctcggcgagcaaacactgactgatcctgatggcggaaaataccaaggctaccgtacccactataagtgggataacggcctgactcttcgtgactggcgttacgttgttcgcgtcgcaaatatcgatgtgagcaatctgtcagatcctgctacggcagcgaacatcgcaaaattgatgattcgtgctctgcatcgtatcccaaatcgtggcatgggcaagccggtcttctacatgaaccgaagcgttaacgaagcccttgatcttcaatctcttgaaaagtcatcgcttgcaatcagtgttaaagagactgaaggcgaatggtggactgcactccgtggagttccgatccgtgaaactgacgcaattctggaaacagaagcgcgcgttgtttaa

SEQ ID NO: 384501 - DNA, 381 bp, Salmonella enterica
atgtcaggtgaaaaagcaaaataccgcgtcctgcgtttatcccacattcataacaacctctggcctgaaggttctgaagttgagtatgacggtgaaccaggtacggcgctggagccgctgaacgatgcggcgaaattggcaaaagagatcgccgaaaagcgtaaagggaaattggcggtttcagttgtcaatgctccagtttccgttgctgttcagccggtagtggaagaattgaaatctgatggcacaggtgcggtaagcgaagaccttactcttcttcgacagcagtatgaggatttgctaggcaagaagccgggtaataaaacggctgaaacgctggcaaaagagatcgccgaaaagcgtaaagaactgggcgtctaa

SEQ ID NO: 384502 - DNA, 582 bp, Salmonella enterica
atgtgcagcccggctatcgctctcgctggcgccagtgtcgctttaagtggcgtttcagcatacaaccagtaccagcaaggtaagtattcgtctgctgttgccgagcaaaatgcagaggtggcgacggctcaggcacaggattctatcaaccgtgggaatgcgcaggccgctgaagttcgccgacgtaaccgccaggcagcaggcacccaggctgctacgatgggtgccactggcgctgatctctcaaccggcaatgctctggatatcttcggtgatacggcacaatttggagagcttgatgctcttactaccattaataatgcccaacgtgaagcctacggatttcaagttcaaggaatgaatgctcaggccgagtcgagagcggcacgcgcgaatgggcgtaatgctgtaggtatgacacttttgaccgccccgctaaaagcctatggcgcttatcagatggccggtggcacctggaatccattcaaaacatcagttgcatctggcggaggtactaccccgatgttatccaacaagggttttattaatagcagctcacagttcaaattagggggctactga

SEQ ID NO: 384503 - DNA, 2691 bp, Salmonella enterica
atgccaattgttccgacagtgcaaggccgacaggttcaaagcacaggcgtgcagaccggtggatttacaactccacaaactcaggatgcttttggtgctttgtctggggtaggtgaaaaatatattggcgcagtcgcagaagctaaacagcgggccaatgtcgctctttctcaggaggcgagcttaaagctcagtcaggctgaagaagatttaaagaccaagctatacagcctgaagggtcagaatgctcttggtaaaggactcgagtttacgcagcaatacgatgagcagatccaatcgctgtctgcatctttacctgatgatgcatcgcgccagatgttcatgcagcaggcgcagcagcagcgcattcagtttcagggtaatgtaggccgctatgagcaggggcaggttaacgagtttgagagtaatcaatacgatgccaccaggcagctacagattcagaaagaggctgactcatggaacaacccacatgaggcggtactcgcaaaaaatatccgcacagtagcaacagcaagatatggcgcttcaagagggtggtcgcaggaacagattctggctgctattgaaaaagataaccttgccgctacggagatgagagcgaagaactatgcagttgataatccgcgtgggtggatgaatggcgagttttcggcaaatgataccggtggcctggatatgcgcgctgtcggtattgtcgaatcgggtgggaaacaccttgattcagatggttcgatcattacatcctcagcaggcgctcagggccgtttccagttgatgccagaaacagggaaagaattggctgcacggcgtggggttcaatacaacccggcagatgaagagcagcacaccatgctggcatcagattacgctaaggagctgtcaaacaaatatggttctgaattgctggctggggctgcatataactgggggcagggcaatgttgacaagcttattgaaaaggttggtgatccaagaaaaggcgagatatctcaggccgacttcataaaacaactaccatctgaaacgcagggatggatttcacggtaccgtaaaaataaaaccggtatggaccctgttacagtttatcagattgataaccttgcaaacgctcagattgagaagcagagaaagctggttcttaatgaacttgaaccactgctcaacaatacaatggcgcaactcaacaatggcgaggttcctgatgcagttccttcgatcccagccattatgtttagttatggtgaacagggaaagaaaatggtatcgcagcttgatatcgccatggacaatgcaaaaacattccaggccattcagtacctttcaccagagcagcagcagcaggaactactcaaaaagaaacccgaggttaacgatcctgattacgctttgaagctggaagcgtatggaaagttatcttctttggttagccggtcaaatgaaaccatacaggctcagcgggactctcgtagattcaatgaggcactttcaatgggtgaaaagctggaccctgcaaataagtcaatgcagaaagctgcagactatacgcagacagctcagaatttcagaattaacgacggttctacgcatgacggagtcgtccagctagtagcccaaaccggcattattccatcgcaggttgcatcacagttgtctgctgtgtctcgatctcacagtcccgatgttgttaagcagggagccgatctgtttaaccgcttgtatgacgcagatcctgcttctgtcggtgatatgcctaaggatatgcagggattctatcttaccgttaagcagcttacagattctggtatggctcctgaatcagccatcgaacaggcacaaaacctgacttacaaccagacagatgcgcttaaggctcagttggcatctactcaaagcactaaggagtataaaaaagaccgggttaaggcgatggactccgccgtcagcaatatggcgcaatggttccgcttggatccatctgcggatgaccagacgccggaagcggccagattccgcaatgattatcaggcgttgtacgacattaactatcgcaccaccggtggcaatgctgatgcggcgaagaaaatgaccaaccagcagatcgccaggacatggagtatcagcgaagttaatggcagtgcgaagctgatgaaatatgcaccagaggcgctttacaattatggtccttccggatggcaggttgagcaatggaagtccgagaaagagcaactgatgtatggcgatcgcaaagaccagatcgtaactagcccaacacagttgggtattacttctggttacgctggtcccgtaactaccaaaactccggagtcgcgtgttggtggtgagcttgagatcaccccagatgtgctgactgcgagaaatggtgattatgcaatcatggtgcgaacaaaagataaagacggtattgaagcggtgcagccgttctacgacaaatttggtagcccaatgcgctggaaaccatctctcgaagaatgggagccatataaaaaatctatacaggaaagggagcaaaaatatcaggaagaaatcattaggggccaggaaattcgcggctttaaagataagcaccatgcgatagatgaacagtatcgcaggttccacgatgatcgtgttaatcgcttcaaaaaatatttctcatggagtaatgaataa

SEQ ID NO: 384504 - DNA, 2892 bp, Salmonella enterica
atgcctgtgtattcctcgccagaagaacttaacaacgggtttactcctgctggcagtgtcttgccagtgccaaccgggtttgatgtccctttgcctgaaggaaccaacccggatccgcaacagccagagccatcagtatggggtgcggcattccgacaaaataacttgctggccgagatgttccgaccagcgaaacagtttgagccagtcgagggatataacccctacacagacaaaagcgagattcatggatatgagcaatggggatctgcttttgctgactcccgctcgccggaagaaaccgcctggctgaaacaacagattgacgacgaaaacgaagaccgacgggtactttcagaagctggtggtgaaggtgttcttgccagtattgcagcaggagtggtcgatcctgtcactgtcgcttcgatgtttatccctggcgcacagggcggcgcagtgacccgcatagcatcacaggcagcaatcggcgcggcagcaacagcggccagcgagattgcgctgaataatcagcagataaccagaacttggggggaaagtgcagcacacgtcgccgccggtgcgttgatgagcggcgtatttgcagccgccggaactgcgctgacaccatctgtacgtactgcggcaacgcgcgaagtggctgatgcactcgataacatgagtatcacatcagcaacggacacggcagcagcttcccttcctgaaggtggtagcgttggtgcagccagaatcaatgaggccactcttgaggatctgaccccggcaactggcggtcctgtcggtaaacttgctcgcaaggctggcagttatctgacgccgtttacccgcctgatggagtcaccgtcgaaaacatcccgccgaactgctctggagttggctgagaataactacaccttgcagggtaacgcccgcggcattgagacgcctgttgcagcggaaacccgcgttcgcggatggcgccgggaagaggctgcggtcgtagtagcgaataagcaggcttacggccagtataaagccgctggtggcgatctgagtttttcacagttccgtgaggaagtgggcaacgcaatgcgcagcggtgatgtgcatgccaacccggttgtacaggagacagcgcaggcaatgcgttccgttgtgaacagggtgaaagtggctcagcaaaagctgggcctgctaccatctgacgatgagcttaaagccatcggccaggagagttatttccctcgcgtttacaaagtaggaaagatcgccaacgaacgagataaatttcgtgacatgctggtcgactggtggtcacgtggcgaaaaaacaatgtcccgagaagaggcagagatcgctgctgataccacgatcaatagaattaccggtgcaaaaatacctcaggattttgcaaacgtctttatggtgaaagcggccggaagcaccagggcgcgtacattgagcgttccagatcgcctgatgaaagattatctggagagcgacgctaattatgtgcttcagcgtcatatccgcgaggcatcggcagaggttgagttgacgcgcacgtttggcaataaatcactggagaagcagcttaaggatattcaggacgaatatgatgcgttgatgcgtgaacgtcctgctgaacaggcaaagctggcgaaagcgcgtgagaacgatatccgtgatatcacagcgctgcgcgaccgcttggctggtacctatggtatgcctgatgacccgtcatcatttttcgtgcgcgccggtgcgttcctgcgtagcgctaactttgttactaagctcggcggcatgactgtttcggcaattccagatctagcgcgtggtgtgatggttaacggatttagtaataccatgcgcggttactcttcactgattaccagatctcctgcattcaaggccagccgagccgaacagttaaaaatggccgtcgggctggaaaccatcctgcacacccgcgcacgcacaatgggcgacctggtggatagttctgcacgtaccacggcagtggaagctggcatggagcgtgttaccgatgcgttcggaaagctcactatgatgggccacttcgatgatatgaacaaatcagtaaacggcatgatcacgtcagacggtattctctccggtgcttttgcaggtcgccgtctggcgaagctcggaattaacgacaatatggccgcacgtatccgcagtgagttcgaaaagcatggcgaggttatcgacggctggcatattggtaattttgaaaaatgggacgatcaacacgttgcaggtgtcttccagtcggcagtactgaaggacgttaataacaccgttattacaccaggtatcggtgatacccccctgtgggccagtacgccgctgggtaagacgatcttccagtttaaatctttcgctacggcgtcttataaccgcgcaacgctgggtgggctacaggaaggtactgggcagttttattacggtaccgcatttcagattgcattaggagcgcttacatatgcgcttaagcaggctgcgaatggtaaagaagtcgactggacaccgcaaaaactggtgattgaaggcattgatcgctccggtattctcggtccgctgatggaatacaacaacatggcggagaaggccactggcgggatgattgggcttggctcgctgctcggtactggtacgcagtcgagatacgccagccgtggatttatcggatctgcacttggccctacatttggccttctcgacaccattacagatgttaccgctggggtgcttaacggtgatgcaggagaccgggtgctgcataatgtgcgtacgcttctgcctggcaacaatctgttctggatcgcgccgttgataaaccaggtagatcctggtatgcgataa

SEQ ID NO: 384505 - DNA, 684 bp, Salmonella enterica
atggaagttttttggattgttgttggcgtggttgccgttattatttttatcattagccaaaataggacaaagacttctaaccgcactgtcatcaggcaagagaagacgatcaaaaccgatgacggcgaaataaaaatacagcgaacacaggttgttgatagcacaaccacgcaataccacagagcagataacgcacctgatgtatctgctaaccctaagtacgatcagtctgtaattgaagcctacaacagaaagccgattgaagcagtaaaggaaatttcaccatcccaaccgcagccttttacatctgcgcttccatctggtgtatcgcagcgccctgcttaccatggtaatttccccggtgacaacaaaccaacaccaacaccaacaccaacaccaacaccaacagaggataagacctcctcaaatgggaagaagcaatgtacaaggtgccgaataaatctgccatatgataaattcaggagatcatcaaagaaccctgacggactaacgatatggtgtgccagttgccttgatgggccaaagaacactcgtcacacgaaatggtgcccgatctgcaatgttagaagaaagagaaccagcttttactccaatgctcagaatgctgatggtctgatggcttggtgcaaaacatgttgggataagcataaaggtaaaagatag

SEQ ID NO: 384506 - DNA, 444 bp, Salmonella enterica
ttgaagtttaagcctagggttgcatttggctttagaaccggtgctagtaacgaacctttcgcagtagatggaccacatctcacggatctggagctggaaaccatacaaaattttatggaagatgttgccaatggcagaacgcttgtaggtaaaaacaagccttcttgggttgacgacaactatgataaaattcccggttcagacaattatgagcaggaaaattactggcactatcattgtggtcccacatggtatcctaacaccttcagaaatcatactgttgacttaaaattcaaccctggtgggaagcattcaaatgaatgcattcactatgcgaaagacggagatgaaatagttgtggttgggtattcgagggagcacataccgtttcttctctctgactacaacgataacccgctctttggtagcgatgaagaagagtaa

SEQ ID NO: 384507 - DNA, 168 bp, Salmonella enterica
atgacagcgttgaaaaatcggactcaacaaaatgagcaggccaagcaatgctgggatgccattggtaaggtaatgcttggtcgcgccaacaaagatcgcgatcaggacatgacttatcagtcagggacttctttcaacgacttcaaggcggcatttcgcgcaaaataa

SEQ ID NO: 384508 - DNA, 687 bp, Salmonella enterica
atgtctacacaaattaaaccttccgtattcaattttgagtcagattgccaagttagggccattattattgatggtgcgccttggtttgttgcgatggatgtatgtcgtgccattggtattgcaaatcatcgcgatgcagtacgtaaactcgatagcgatgaaaagggtgtcggttcaaccgacacccttggcggagagcaggaaacaacaatcatctcagaatccggactctacactctgatcctccgttgccgcgatgctgttactcctggcactatcccataccgtttccgcaaatgggtcactggcgaagttcttccgcaaatccgtcgcaccggtcgctacgttcgtgaagaattatccccggcagacaaagcacaaaaggttgtggccagcttcatgccagccattctggaagcgatgaagacggaagagaaacaggaatacagcgccccactcaagccgaactaccgtgaacacatccattcacctgaaggtgttcttggtctgacagagcactctttgatgatgagcctgctacgccaactggacgcagacgggcatgatgttgaaggtgctgtagcagagttcgcggccatgatgagctatattgtcggggccagtaaatgcctgcgcgatatccagactcacgcgcagtacatcaacagcatggcgggtaagttctga

SEQ ID NO: 384509 - DNA, 261 bp, Salmonella enterica
atgcaacggcagtatcaccatccgctggaagaaggatttgaggaaagaatacacacgccggtaggcgttagatccctggtggaggactcgcatctgatgaagttgctgcgggaactcgataaagatggcttcaatgttgatgggccacttgctgaactggttgcgcttgtgaattacgtcacaagttctcaaatgaatatgcaggatctgcaaacacatctcgattactgtgccgaacagttacggaaacaaaccacataa

SEQ ID NO: 384510 - DNA, 3213 bp, Salmonella enterica
atgacggtttcaaccgaagttgaccacaacgattacacagggaacggggtaacgacgtctttcccttataccttccgaatttttcagaagtctgatctggttgtgcaggttgttgacctggacgagaacatcacagagctgattcttgatacagattataccgttacaggtgcgggagggtatacaggcggaaacgtaatactgtcaacaccactgacaagtggataccaaatatcaatatcacgcgtactgccagtgacgcaggaaaccgacctacgtaatcagggaaaatttttcgcagaagtgcatgaggacgctttcgataaactaacgatgttgattcagcaggctattagttggctgcgtctctccctgcgtaagccatcatttgtagccaactactatgatgcgcttggcaactacatccgcaatcttcgtgacccgtcacggcctcaggatgcaacaacgaaaaattatgttgataaccttagtgaaggtaataattcctatgcggataatctttttagtagaacacttagagttcctgagcaaataaataccctaccatcatcactggatcgggctaacaaaatccctgcttttgatagcaatggaaatccaattgtcatactgccacagtcaggatctgcatcagatgtattgatcgaacttgctaaaccacctggtgctggtttagtcggattttcacacagcaataattacaacccaggaatggttggtgaaaaacttcagaacgttgtttatccaaccgatgccccatttaacgcccctacagatgggactagcgatgcaactactgcgcttcaaagtgccattacccactgcgagggaaaaaatgcagttttatgcatcaataaaagttttttggtctcggacagtctttcaatttcatcaccgctatgtgtattttccatgaatgaacagtgcgggattgtatcatccgctccagccgggcatgttgctgttatttttaatggaaataatatttgctggaatggtggttttattcgtggtttaaatcaaccaagtagttccacgataagacaagatggtgtcctgattaatgggaatgattgtgttttagataatgtctctatcaatggtttcttcgctaaagggttacatacctctaatgcagatgggagcggtgttggcatccgggactatggtacgcgaaataccatcagtaagtgccgggtagagtataataaattcggtatatctctcgaagggaaagacggttgggtactcggaaactatgtgagtaaccattaccggatgtcttctgaagccaagccgtgggacgataccagtaactactgggatggtattgttggcggcggtgaatggcttggcgttgcaaccggatatctgattgatggtaatgagtttgaggataatggtcagagtggtatctatgctggtggcaacggggggattttcgccaagaacaggattactaataaccatatacatggaaactggaatcgcggtatagattttggggttgtacagcgtcttgctaatagtgatgtttatgaaaatataatcaccgacaacatagtgcataacaaccgagcggctaacatatggttagctggcgttcgggatagcataataaataataataactcctggtttactgatgattataggtctatgttcgctgggcattttgattcctgcgtgtgcctgacgttagcagacggcggtgaaaaagcagcgccaaccggtaatcaggtaaacggtaaccggtgtaagaccctagaatctgatgatcagatcagcggttttacgttaaacattacagacactgccagaggaaaccaggtccgggataatgtgttatcccccacagggaagacatatattccaaatccagaactatatgctgttaataatatcgatatccctactgagttcgcattcacaccgcaactcataggcgggtcaggtgtgacactgggtaacagttctggaaagttaaccgctaacggaaatgtgtttagcctaagtttatctatcttggcccagtctgtctcatccccaagcggaagcctgacaatagggtatataccggggcttagtggttctagtgttcgccatcacaacgtacgaacggagttctataacaacctgaatactacaatgcaacgggcgcagccatacgtaaatatcggtgatagcgcggaccaattgcgtgtatacagactggctgatggattagctaaagatgatttactagagtattttatggctaattcggatctacgtatggttggcgatattgaaataattccatataactttagccgttcagttactgtggttggacatagcttctgcaccagtgatgttatgagcacagagttgaaccggctgcttggtaccgatatatacaacttcgccaggggcggggctagtgatgttgaagttgccatgtcgcaagaggcaataacacgacaatatgcgcctgtaggcggttcaatacctgcgtctggttcagtcgctcttacgcctacggaagtaggtatattctggaacggtgctacggggaaatgtatctttggaggtgtcgatggtacattttcaacaacgctggtaaacccgggaactggtgagactcagcttgtatttacgcgtgattctgctggtagcgcggtaagtgtgtcaacaactgcaacatttgctatgcggccgtatacaagatttaatacaaatactatcccagcagggcgtaagcactcgctgcatagggatgatatctatatcgtttggggcggtcgtaactcaactgactatgctagatatgtgtcagagttgcataccatggttgctaatatgcatacccagcgctttgttatttgccctgagtttccttatgatacggagacaacgggaactactggagctacaaatttagcagctctcaataacaacctgaaatccgcttttccagataactattgccaaattagtggcgttgatttattgcagaactttaaaagcaaatataatccatcctatgcaggcgatgtaactgatattgctaacggtataacccctcgatctcttcgtgcagatgacctgcacccatctgaaacactacagccaaatggcttgtatgtgggtgcaaaagtgaacgctgattttattgctcagtttattaagtcgaaggggtggggtgggtaa

SEQ ID NO: 384511 - DNA, 1179 bp, Salmonella enterica
atgcaagagattaattttaaaagtccatttatcacatcaagatcgagggtaatttctcatttaatcggtctttctatggtttcgatttttttgccaataaaaatatacccagtagtattcgcagtttctttgcttatgatgttgtatagaatatcactgaagtattatgttttttctttttttgcgtcattgatactattgttaattgttttcacttctacttatacaattcaggatgatgaaacagtcacagcaattataaaatcaatattaggaatatcattcttaattatatcaagtatatttagttatgaaaaaaccaatagtgttgaaatgctaaaaataatacacaaatatattagtgctattattttactttgttttatacaagttgtttttttacacgcacagtccggaggatatgggttaactgccagcgactcatatactgctgggtttatattcgacagcgattatgcgctttttggtggaaatgataaaaacatgttcggcgcaaaagttgctttattcggcatcctgcaatacatattacataaatcaatttataaaaaaggagcggtgatatggatgctaatagtattaattaccggcttcttaagcatgtcacggacaccggtggcatttcttatagccatactggctctttataaaatatcatcaagccgcggcgtcgctatgaaaatagttgctgcgttttttgtgataactgttttggctatcgcttcaccttatatatttgactacctaagattgtcctctataaatcaaggtcaactctctgatggtatgtcaataaggatattgtactggatcgctgttatttcaaatactgatgttatagggctgtttggcaatggcttattatcagcgagagattttctcccaaaatacagcgcgtattataatggagaaccaaatgtccacaatctgtatttaaatacttatttggatttaggtgcaattggcgctgcattttatatagcaatgataatttctcttttcatatatcttaaaaaccttaatccacaactagcctttgtatttattgcatcatcatttgtgatgtcttgcaccttatatacagcgtatgacatagagatgtggtgcttcctttctttatctgttgtgatctcgcgattaataagaacgtcaagataa

SEQ ID NO: 384512 - DNA, 207 bp, Salmonella enterica
atgaagatagtgattaacattttatttttatttatttctgctcatgttattgtttatttcgttgctgggaaaaatgatgttatatcaaatttaatagctgccattgagatggtgtcaataatggcattcatatattcaaaaacaaaaataaaaccagagcctgaagaaaaacaaagcaattcaaaattacagaaacgctgcgaataa

SEQ ID NO: 384513 - DNA, 480 bp, Salmonella enterica
atgagtgaacttgcatggatttctgaaggaagaaaatatatagggcaactggaaatcaaaggccctcgtcataatcctctaattctccagttctggaaggatattaaacgaggtggtatcaaagatgatgaaacgccatggtgtgctgcatacgtcggatcaatgctcgagcgtgtcggaataaaatcaacccgtttcgagtctgcaaaatcttacctcaactggggcgtcgaaattagcgaaccagcttatgggtgtgtagtggtattcaatcgtgacggtggcggacatgtcgggtttgttgtcggacagcaacagaacggcgacctgatggttctcggtggcaaccagtccgacgccatcaatattcgtgcattctcgcgttcccgtgtaactggttatcgctggcctgttaatgttgccaaagacaaccggcaattgcctttgatgaccggctcattatcggtgagtgaatcatga

SEQ ID NO: 384514 - DNA, 468 bp, Salmonella enterica
atgaaagcgtactggaaacagttgcttatcgtggcgatgcttgctgctctggttgtcactgcggtggttgcctggaatgaccatggtgaaacgcagtacgacgctgggtatgcacaggcaaaggcagaccgtaaagccgaagatgataaagctcgtcagcatgacgaacaggagaaagcgagcaatgaacgtgaagcgcagcagaggatcgaccaggcgcgcaatgatgctcttgatgctgccgctcgcgctggcaggttgcagcaacagctcgttgccatccgtgagcagctcaggcagtataacgccactttcggcactgggtcgtcagccgcagacaccggagttttgcttgccgacgtgctcagcaaatctctcgagcgaaaccgacaactggcagagtacgctgatcgggcagcagaagccggaagagcctgtgaaaagcagtacgattcgctgatcaggtga

SEQ ID NO: 384515 - DNA, 363 bp, Salmonella enterica
atggctagcgaacgcagtactgatgtgcaggcatttatcggggaactggacggcggcgtatttgaaagcaaaatcggcgcagttctcagtgaagtcgcttccggtgtgatgaacacgaaaaccaaaggtaaggtctcactcaacctggaaatcgaaccatttgatgagaaccgtgtgaaaatcaaacacaaactctcatatgttcgcccgactaaccgcgggaaaatttccgaagaagacaccaccgaaacgccgatgtatgtcaatcgcggtggtcgcctgactattctgcaggaagaccagggacaattactgactcttgccggtgaacctgacggaaaactccgcgcagcaggtcgttaa

SEQ ID NO: 384516 - DNA, 654 bp, Salmonella enterica; identical to SEQ ID NO: 12732

SEQ ID NO: 384517 - DNA, 198 bp, Salmonella enterica; identical to SEQ ID NO: 12733

SEQ ID NO: 384518 - DNA, 585 bp, Salmonella enterica
gtgggtaaagaacctgaatggaaagttgataaacaaccagcatggctggtggcagcaatacgaagaacgattgctgatttacctcatggctatgaggaagcagcagaaattcttggtttgtataaatctgatgatatcaccccagcaaaagatcaattgcataacagactgcgtagcggtggggatcaaatttttccacttgagtgggccatggttttacaggatgccagtggtaccaggcatgtaacagatgcaatagcccgtcgtagtaatggggtgtttgtgccgctggtggtcattgatgacattgacaatggtgacattaatcagcggctgatggagtcaatagaatggattggcaagcattcccagtacttacgcaaggcaactgctgatggagttattgaccaggctgagcgtgagcaaatcgaagagaacagctaccaagtaatggcgaagtggcaggagcatttaacactgttatttcgtgttttttgtgcgccggaaaagagtaacgcccgcgagtgtgcagctccgggcgtcgtggcgtcgattgcttctggttgtggagaaactaacgcatga

SEQ ID NO: 384519 - DNA, 339 bp, Salmonella enterica
atgaacagtttaacaacacactaccgtcgctcgcaactgattgcgcttcctgtaccgggtggaaaagcgaaggtggagtattgctatgcagtgaatgtaccaggtgacagggaaattgtaacccacagctttgcagagtgggctgtgggtgatttcaaccggcagaaggagacagtcctttgcgacaagttaaccgctggttcaaagatcactacggagtgcccgtcagagtcattcgttgggagccggaaacacaacgggttatctacctccgtgaaggctatgaacatgaatgcttcagtccgctcgaacagtttcgtcgtaaattcagggaaatag

SEQ ID NO: 384520 - DNA, 993 bp, Salmonella enterica
atgagcctgttaatgacatcccagcccattgtgataaatcgtgatcttgcatgccgtattggtctgaatgaggcaattgtgttgcagcagcttcattactggctgaatgaaacgaattcaggcactgagcatggcggaattcgctgggtttataacacgacagaacagtggctggagcagtttccgttctggtcagagtccactctgaaacgcacatttgcaagcctgaaatcacttggggttttgcgtcgcgagcaactcaataaatcgaagcgtgacatgaccaacttctacacgatcaactatgaaagtgagcttttagaagaggtcaaagtgaacgaatccatcaggtcaaaatgcacctctccatcgggtcaaagtgacctgatggatgggcgcaaaatgacacgatccattggttcaaaacgacacgctgtcatcgggtcaaaatggcccaatgatcttacagagaatacaacagagattactacagagaataaaacctcttctcgtccggacgcttcgcaaccggacacgcaaacggctgaacaggagtttttaactcgccatcctgatgcggttgtattcagccctaaaaagcgccagtggggaacgcaggatgatttgacctgcgcacagtggctctggaaaaaaatcatcgccctgtacgagcaggccgccgaatgtgacggcgaggtggttcgtcccaaagaaccgaactggacagcatgggcaaacgaaattcgcctgatgtgtgtgcaggatggtcgtactcacaaacaaatctgcgagatgtacagccgcgtcagccgcgatccgttctggtgccgtaacgtgctcagcccgtcgaagttgcgggaaaaatgggatgagctttccctgcgcttatcgccgtccgtcagcacgcacacagaaaaacgtgaagacccgtacttcaaagccagttacgacaacgtggactacagccagatcccggcaggattcagggggtga

SEQ ID NO: 384521 - DNA, 633 bp, Salmonella enterica
atgagtaataaatattgccaggcgctggtagaactgcggaacaaaccagcccatgaactgaaggaagtgggcgatcagtggcgcacgccggacaacattttctggggaattaacaccttgtttggtccgtttgttctggatctgttcactgacggtgataacgccaaatgtgccgcgtattacacggcggaagacaacgcgctggcgcatgactggtcagaacgtcttgcggagcttaaaggtgctgcctttggtaatcccccatacagccgcgccagtcagcatgaggggcaatacatcaccggcatgcgttacatcatgaaacatgccagtgccatgcgtgataagggcgggcgctatgttttcctgatcaaagcggccaccagcgaagtgtggtggccggaagatgcggaccatattgcttttgaactgcctgcctggtttatcccgaaggatgagaagcaggtgccgacaggcgctttcttcgctggtgctattgctgttttcgacaagacctggaagggaccggcaatcagctacatcgggcgcgatgaacttgaggcatgtggtgaggcgtttctggcgcaggttcgccagcaggcagaaaaacttgtcagggagatggcggcatga

SEQ ID NO: 384522 - DNA, 327 bp, Salmonella enterica
atgacgacgttaactcaatgccagcagcaggtgctggatatgctgatttcttaccagcaagagcgtggctttccgccaaccaatcaggaggtggcaaccatgctgggataccgttcggtgaatgcagcggtggagcatcttcgcgcactggagaaaaaaggcgtcatcacgataaagcgtggtgtggcccgggggataacgcttcataccgcggtgaaggacgacgacagcgaggcggtcgggattatccgctcactgcttgccggtgaggaaaacgcaaggctgcgtgcaactcactggttacatgagaggggcctgaaagtatga

SEQ ID NO: 384523 - DNA, 390 bp, Salmonella enterica
atgaagctaatactgccttttccgcccagcgtgaacacgtactggcgacaccccaacaaaggggcgtttgtaggtaaaagcctgataagcgaggcggggcgaaaattccagagcgcggcgtgcgcagcaatagttgagcagttacgtcgtctgccgaaaccaacgtcggcacctgcttcagtggagatcgtgttgtttcctccggataaccggatccgcgatctggacaactataacaaggcgctgtttgacgccctgacccacgcgggggtgtgggaagacgacagccaggtgaaaagaatgctggtggagtgggggccggttatcccggaagggaaggtcgagatcactatcagtaagtacgagaaaacggcgggtgcagccgcctga

SEQ ID NO: 384524 - DNA, 798 bp, Salmonella enterica
atgaataatctgatggtcattgatggtattgaagttcgtcgtgatgcttatgggcgttacagcctgaacgatctgcacagggctgccggttctcaggataagcataagcctgcattctggctccgcaatgagcaaaccgaacgtttaataagcgagttgcagatttgcaactcggtcaatatagagccagttaacgttagtcgtggcggaaataaccaggggacgtatgtctgcaaagaactggtgtatgcctatgcaatgtggatcagcccgtcattccatctgaaggtgatccgtactttcgatatggtaaccagcgcaccggaaaaattatccgggcaggctgctgacaagatgcaggctggcgtgattctgctggactttatgcgccgggagttaaacctgtctaactcatctgtgcttggggcctgtcagaaactccaggaggctgttggcttaccgaatctggcaccacgctatgccattgatgctcctgctgacgcgcctgatggctcaagtcgccctacgctgtcgctgagtgcactgctgaaacagtatggtatccgccttacggctaatcaggcatatcaccagatggcgaagctggggatcgtcgagcagcgcgaacgatacagccgtaccgcgattaacaacatcaaaaaattctggtcgctgacagcgaaaggttgcatgttcggcaagaacatcaccagtcccgcaaatccgcgcgagacgcagccgcatttcttcgaatcccgattccctgagctgttaaagctgctcgataccgttcattga

SEQ ID NO: 384525 - DNA, 1206 bp, Salmonella enterica
atggcggtagatattaaagatgtcgaacaggtcgcgcaggagctgcagcagaagtttgacgacttcaaagcaaagaacgacaagcgcgtggatgcgattgagcaggaaaaaggcaagcttgccgggcaggtggaaactctgaacgggaaactcagcgagctggaaaatctcaaaagcgatcttgaaaaagagctgcttgagctgaaacgtccggcaggtggcgcgcaaaataaactggccaccgagcataaagaagcgtttgtgggctttttgcgtaaaggccgtgaagatggtctgcgcgatctggagcgtaaggcattgcaggtgggcaccgatgaagacggtggctatgccgtgccggaagcgctggatcgcaacattctcaccctgctgaaagatgaagtggtgatgcgccaggaagccacggtgatcaccgttggcggttccgactacaaaaaactggtgaatctgggcggcacggcttccggatgggtgggggaaacggatacgcgatcccagactgccacctccagactggagctgattgaacctctcatgggggaaatctacggcaacccgcaggccacccagaaaatgctggacgatgccttcttcaacgtggaggcctggatcaacagcgagctggcaaccgaatttgccgaacaggaagaaattgcctttacctcaggcgatggcaccaagaagccgaaagggttcctggcgtatgaatccactgatgaaaccgacaaggtccgggcgttcggcaaacttcagcatattgtatccggcgaagcgaccgcggtgaccgcagacgccattatcaaactgatttacacgctgcgtaaggcacaccgcactggcgcgaagttcatgatgaacaacaacagcctgtttgccatccgtctgctgaaagacaccgagggtaactatctgtggcgtccggggctggaactggggcagccgtcctctctggcgggttacggtatcgctgaaaacgaacagatgccggatatcgccgctgatgcgaaagccattgcatttggtaacttcaaacggggttacaccatcgttgaccgtatcggcacccgcattctgcgtgacccgtacaccaataaaccgtttgtcggtttttataccaccaagcgcaccggcgggatgctggtcgattcgcaggccatcaaactgctgaagattgcagcggcgtaa

SEQ ID NO: 384526 - DNA, 324 bp, Salmonella enterica
atgcttctgacaatggaagagattaaagcccaactccggctggatgaggatttcgatactgatgaccgccatctgcaactgctggcatgtgcggcacaaaagcggacggaaacgtatctgaaccggaagctctatgcaccggatgaaaccattccggacagcgatccggacgggctgcacctgccggatgatattcgtctggggatgctgatgcttatcagccatttttacgaaaaccgctcgtcggttacggaagtggagaaactcgacatgccgcagagttttggctggcttgtcggcccgtacaggtactttccgcaatga

SEQ ID NO: 384527 - DNA, 411 bp, Salmonella enterica
atgaaaattcgtcaggcgcagaccagcgcaacctacattctgccggaccccggtgaactgaataaacgcgtcctgatccgcctgcgggtggatatgcccgcggataactttggcgtggagcctcaatacccggttacgttccggacatgggcgaaggttatccagaccagtgccaccacctggcaggaaaccgcgcagaccggggacgccatcacccattacatcaccattcgttaccgccgggggatcaccgctgattatgaggtggtctgcggtgacagtgtgtaccgggtgaaacgtcagcgcgatctgaacggggcgcggcgctttctgctgctggagtgtacggagctgggcgaatgtaggcagagtcacggaggcaacaatgacgacttcctttttgcacgttga

SEQ ID NO: 384528 - DNA, 507 bp, Salmonella enterica
atgacgacttcctttttgcacgttgattttcagcagcccgcggagatgcgctttaaccgcgcccgtgtccggcgggcgtttgtcacgattggtcagcgtcatatgcgtgatgcccgtcggctggtgatgcgccgtgcgcggtcggcaccgggtgaaaaccccggttatcagaccggacgcctggctcgttcgattggttacatggtacccagagccagtaaacatcgccctggttttatggcacgtatagcccctaaccagcgtaatggagagggaaaccgccgtatcaccggtgatttttatccggcttttttgttctatggcgtgaggcgaggggaaaagcgtcgtcgcagccatcatcgtggtgcatccggtggcagcggctggcgactggctccacgtaataacttcatggtggaaacgcttgaaaagaaccgcagctggacacgctattttctggcgcgggaattgcgtaaatcactgaagccggagcgacgacacagatga

SEQ ID NO: 384529 - DNA, 561 bp, Salmonella enterica
atgaaactgacgcctgttattgctgcactgcgtgcccgctgtccgtattttgaaaaccgggttgcaggcgcggcccagttcaaaaatctgccggaggtcggaaagctgaagctcccggcggcatatgtggtaccgggtgatgattctccgggagaaaacaaaagccagaccgactactggcaggagctgaaagagggtttctccgtggttgtcatactgagtaacgggcgtgatgagcgcggtcagtttgcctcgtatgatgtggtggacgatgtccggcagatgctctttaaggctctgctgggctggaacccggaggcgtgcggtaacccgattacctatgacggcggcacgctgctggatctgaatcgtcatgagctgatttatcagttcgatttttcggtcatcagcgagctgactgaagacgatacccgccagcaggatgatctgaacagtctggatgaactgcaaacgctggcgattgatgttgattatctcgagcccggtaacgggcctgacggcgatatcgaacatcacaccgaaataactcttccttcctga

SEQ ID NO: 384530 - DNA, 171 bp, Salmonella enterica
atgtttgtcaaacctgttaaagggcggtcagttcctgatcctgcccgcggcgaccttttgcccgccgaagggcgaaatgttgacgagaacaactactggctgcgccgtgaagcagcgggtgatatccggcgcgtgaataaaaaggtgaataccgatgacgataagctttaa

SEQ ID NO: 384531 - DNA, 1497 bp, Salmonella enterica
atgacgataagctttaacaccattccgtcgaatacgctggttccgttgttttatgcggaaatggataaccaggcggcgaatactgcacaggacagcggagcatcgctgctgattggtcatgccaataacggtgcagagattgttgccaacagtctggtactgatgccgtcggcagactatgcacgccagatttgtggtgcgggaagtcagctggcgcgtatggtcgaggcttatcgccagactgacccgtttggcgagctgtatgtgattgccgttcctgaatccacaggcgcggcggcaacggttacgctgacggtgaccggggcggcaaccgaaaccggcacggtgaatgtgtatgtgggacgtacccgcgtgcaggcaccggtgactaacggcgataacgtcacgatgattgccagcagtatccaggatgccatcaatgccgttccgaccctgccgtttacggcttcatcttcggcaggcgtggtcacactgaccgcgcgtcataaggggctttgcgggaatgaaattcctgtcagcctcaattactacggctttggtgggggcgaagtgctgccagcgggcgtacagattgccgtggcgacgggtaccgccggaacgggtgctccggttctcaccggcgcggtggctgcaatggcggatgagccgtttgattatattggcctgccgttcaacgacacggcctccgttaacacgctggtgaccgagatgaacgataccagcggtcgctggagctatgcgcgtcagctgtatggtcatgtgtatacggcaaagaccggcacgctgtcagaactggtgaccgcaggtgaccagtttaaccagcagcacattaccctggcggggtacgaaaaagacacccagacgcctgccgacgagctggcggcaagccgtaccgcccgcgcagcggtgtttatccgcaacgatccggcacgtcccacgcagaccggtgagctggtgggtatgctgcctgcgccgaaggggaaacggttcacgatgaccgagcagcagaccctgctgtctcatggcgtggcaacggcgtatgtcgaaagcggggtgctgcgcattcagcgtgatgtcaccacgtacaggaaaaatgcttacggggttgcggataacagctacctcgacagcgagacgctgcataccagtgcgtatgtactgcgcaaactgaaatccgtcattaccagtaagtacgggcgtcacaagcttgccagcgacggtacccgctttggtcccggtcaggcgattgtcaccccggcggtaatcaaaggggaactgctggcaacctaccgtcagcttgagcgtgcggggatcgtggaaaactacgaactgtttaagcagtacctggttgtggagcgtgatgccagcgatccgaaccgcctgaacacgctgctcccgcctgactatgttaaccagttgcgtgtttttgccgtggttaaccagttccgtcttcagtattcagaggagtctgcataa

SEQ ID NO: 384532 - DNA, 357 bp, Salmonella enterica
atggcccgtatcgggggaacctgttatttcaaaattgacggtcagcagctatcgctgaccggcggcattgaggtgcccatgaacaggacggtcaatgatgacatcatcggcctggacggttcagtggaccgcaaggaaactcaccgtgcgccttatgtcaaagggaccttcaaggtgccgaagaattttccggtgagcaaaatcacctcgtctgatgagatgaccatcactgccgagctggcgaacggtcaggtctatgtattgtcgtccgcctggctgcacggagaagcgaaccataatgccgaagaaggcacggttgatcttgagttccacggtgaagaaggggattaccagtaa

SEQ ID NO: 384533 - DNA, 270 bp, Salmonella enterica
atgaaagagcttgagttaaagaaaccgattatcgctcatggtgagacactctccgtactggagtttgatgaacccaccgggaaggatgtccgcgagctggggtatccctaccagatgaatcaggatgagtccgtcagacttctggcgcatgtggtgtcgaaatacattgtgcggctggcgaaagtgccgcaaagctctgtcgaccagatgtctccggcagacctgaatgcagcggcgtggcttgtggctggttttttcctccaggcctga

SEQ ID NO: 384534 - DNA, 1833 bp, Salmonella enterica
atggctgaatttgagcttaaggcgttgatcaccggtgtcgacaggctttctcccgcgctgtcgaaaatgcaaaagaaaatccggggatttaaacgccaggcggaagaagcgtcacagggtgggctggcgcttgggggcggattggcagcgggtctgacgctttccctgaaatcttatgccgatcaggaaaacgccgccaccgggctgaaagtcgccatgatggatgcgaacggcgaggttggaaagagctttcaggacatcaataaactggctattggcctgggtaaccagctacctggtacaacggctgatttccagaacatgatgcagatgctggtgcgtcaggggatcccggcagaaaacattctgggtggtgtgggtaaagcgacagcttatcttgcggtacaactgaaaaaaacaccggaagcggctgctgagtttgctgcaaagatgcaggatgctaccggaacggcgtcagaagacatgatggggctgttcgacactatccagaaggcgttttatctgggcgttgacgataccaacatgttgtccttcttcactaaaaccagttctgttctgaagatggtgaacaaggatggtcttcaggctgcacagagccttgcccccatcagcgtcatgatggatcagatggggatgaacggggagtcggcaggtaatgccctgcgaaaagttatccagtccggattaagcgttaagaaaatcagggacgttaataaagttatggcccgccagaaactcggggtacagctcgattttactgacggcaaaggaagttttggcggtcttgataacatgttcaggcaactggcaaagctgcgaaaactgaccgacgttaagcgaacaggtgtacttaaggcaatatttggtgatgatgccgaaacccttcaggtggtcaatgcactaatcgataaaggaaaggatggctacgatcagatccagcagaagatgaataaacaggccagcctgaataaacgtgttcaggcacagcttggtacgctgtccaacctgtgggaggcaatgacagggaccgcaactaacggccttgcggctattggcggcgcattttctggtgacgctaaaaatatcacacaatggctgggggagttgggggagaaattcacgaagtttgcggatgaaaatccccgggttattcgcggcgtcgtcgggcttgctgccggtcttgcgattctgaaactgggattgatgggcgtgggcagtgccatcagtattgtcagcaggattatgtcgatgacgccgattggcatgattgcgacggcgattgctctggctgcgggattaattatcactaactgggatgttgtcggaccttatttcaagaagctctgggaaaccattggtccttattttgaggcaggttgggaacttctgaagaaggtttttgcctggtcgccgctggggatggtgatcaataactggggaccggttgttaagtggtttcaggatatgtgggacaagctgaagccaattattgagtggtttaccgacagtttcggtgacacggtcgatgccattaactctgcgcagtggggcgcgggtgcttatgatgcttatgggacgggaataccggcgcggggatacacaccttatccggcggtggatccggctcagtcaaacaacgcctccgatgccacaggctcgaatcccttcatgattaacaaagcttctgtgccaaaagttgatggtgagatcaaggtatcttttgtgaattcgcctccgggtatgcgggttatggaaacgcgatccagcggttttgatgtcagccatgatgttggctatacgcggttcaggtag

SEQ ID NO: 384535 - DNA, 495 bp, Salmonella enterica
atgcgtatctttgttttttttatatctgcacttttatcttttaacttggctgcggaagagtgtaagttcagctttaatgagtcagaattaatctcttctataggtattgcaccagttaagcaagagataataaaggacgaaggaataactaagcggcaatatgaattcagaagagaattatcttctgaagaaatgcttagtgatgacgctgatgaaaaatatgagccgcagttttatatatctgtttataatccatcatgcccacaaaaggttattgtttggtttttcaaagacaataaaaacacaatggatttaagtaatgaggtccttgctggtagagcgttcaagtatttaactggtgttaatgaaagtatttttgaaaataaaatgaaaaagtttttaaaggtacagtcatttgaatcttttgatgaaatgacagattctaaatttataaagagtggtgatatttattccattgatgttcaactcagatag

SEQ ID NO: 384536 - DNA, 1329 bp, Salmonella enterica
atgacgtggaaagacaggcttcaggatgcgtcatttcgcggcgtaccgtttaaggttgaagaagaaagtgcgggaaccggtcgccgtgtggaaacacacgaatatccgaaccgcgacaagccctataccgaagatctgggaaaagtcactttccgcccgtccatcacagcttatgtggtgggagatgactgctttgaccagcgcgatcgcctgattgacgcgctgaataaacccggtcccggcacgcttgtccacccgacatatggtgagctgaaagtctgtgttgacggggaagttcgggtcagcacatcgaaaagtgaagggcgtattgtccgctttgacctgaagtttgtcgaagcaggagaactctcttaccccacatcaggtgcggcgacggcgcagacgctgatgtcatcctgttctgcactggatgactgcatcagtgacagcttcagcggtttcagtatcgatggtgtggcggatttcgtgcagaacgacgttatcggtaatgccagcataatgctggggtatgtttctgatgcgatgaaagtggtggattctgccgtatcggatgccgccaggctgttgcagggggatatctcggtacttctgccgccgccatcgtcaggcaaaaatttcgttgagcaggtgcagaaaatgtggcgtaccgggaaacgcctttatggtaacgccagcgacctggtcaccatgatcaaaacgctttccggtgtcagcctcggcagcgatctgcaaccgcgcggcgtctggaaaacggacagtaaaaccaccgccacggcgacgcagcagcgtaacgtggttgccagcacccttcgtacgaccgcaatcagcgaagcggcgtatgccgtcacccgattgcctgcgccaacaacttccgcggtgatgcagaattccgcagtggggcaggcaacaacacccgcgcagagcactggctggccttccgtcacgcatccggcactgaacaatgcaccggcggtgaaaaacacggttgacctgccgacgtgggaagaactgactgacattcgcgacacactgaatacggcaattgataaggagttgtcccgtacaaccagcgatgcgctgtttctggcgctgcgccgggtgaaagcagatctgaatgcggatatcaacacgcgccttgaacagtctgcacggatcattcagcgcacaccggatgaggttttacccgcgctggtgctggcggcgacctggtttgataacgcggcgcgtgacgcggacattatccggcgtaatgccattacgcatcccggctttgtgccggtgatccctctgaaggtgccagtgcaatga

SEQ ID NO: 384537 - DNA, 1080 bp, Salmonella enterica
atgaacgacaatgtcacgctacgggtaaatggccgggagtggaatggctggacatcggtgcgcatcggtgccggtattgaacggctggcgcgggatttcagtgtggagatcacccgccagtggccgggagatgagggtatcaccacgcttcagccgcgcattaaaaacggttcaaaagtggaggtgctgattggtgatgagctggtgatcaccggctgggtggaggcgacgcccgttcgttacgatgcccgttcggtcagcaccggtattgccggacgcagtctgaccgctgacctgattgactgtgcagccgaaccgacacagtttaatggacgatcgctggtacagattgcgcaggcgcttgctgcgcctttcggcattgaggtggtgaacaacggtgcgccgtcgggtgttattcctgatgtccagcctgatcacggtgaaacggtgattgaggtaatcaacaaaatactcggtcagcagcaggcactggcttacgacgacccgcacggcaggctggtgattggcggtattggctcaacgcgggcacatactgcgctggtactcggggaaaacatcctttcctgcgatacggagaagagtatccgggagcggttttctgtttaccaggtggcggggcagcgtgccggaaacgacgatgatttcggtgaggccaccaccaccgcgctgcgggcccgcacagaggacgcatttattgcccgttaccgtccgatgtatatcaggcagacagggcaggctacgggggcaggctgtattgcccgtgcggactttgaagcccgacaacgggcggcgcggacggatgaaaccacctatgtggtgcagggctggcgacagggtaacggtacgctgtggcagcccaaccagcgggtgattgtctttgatccggtctgtggtttcgacaataccgaactgcttgtttcggaagtcacgtttactcaggaccagaacggcaccctgacggaaatccgtgtcggcccacctgatgcttatctgcctgaacccgaagcccccggcgcgcggaaaaagaaaaaagccagagtacaggaggacccgttctga

SEQ ID NO: 384538 - DNA, 549 bp, Salmonella enterica
atgaggacgattgaagccatgcagcgacaactcctcggcctgattgggcgggccgtggtgaaaagcatcagtgccgccacgaaatgtcagaccgtggatgtgtccctgattgccggtgaacccaaagccggggttgaacatcttgaaccctacggttttacctcaagggcaaacagcggtgcggaagcggtggtgttgtttccggatggcgaccgttctcatgcggtggttgttacggtgtcggaccggcgctaccgcctgaaagggctgcagacgggtgaggtggctgtctatgacgatcaggggcagtccgtgacgctgacccgggaggggctcgtggtggacggtgcaggtaaaacgatcacgtttcgcaattcacctaaagcgcgttttgaaatggacctggaagtgaccggacaggtgaaagacctgtgcgattccggcggcaccaccatgtcagcgatgcggcttgcctataacggccatcgtcacagagagaacggtcagggcagtaacaccgacaaaccggataaagcgatggaggcatga

SEQ ID NO: 384539 - DNA, 426 bp, Salmonella enterica
atggaactgtggctgacggtgaacggtaaacgcacctgcgccagcgcaccgctggatccgctgacccgcgccgtggtgatttccctgttcacctggcggcgggcggagcctgatgataatgccgacgtcccgatgggatggtggggggatacctggcctgcggtacagaatgaccgttacggctcccgactgtggctgcttcagcgcagcaaactgaccaatcagctggtgcagacggtaagggggtatatccgcgaatgcctgcaatggatgattgatgacggcgtggtgtcccgtattgatctggatatccgccgcaccgggattaatgaactgggtaacagtatcactctctggcgtcgtgacggaccggtaatgatttcttttgatgatctgtggagtgcgataacgcatggcggacagtga

SEQ ID NO: 384540 - DNA, 1059 bp, Salmonella enterica
atggcggacagtgaatttcagcgcccgacgctggcagaaaatatcagtatgctccgtaacgatttattcgccaggctggacgtcagcgacacgctccggcgcatggatgaagacgtgcgggcaaaggtgtatgcggcggcgctgcatacggtttacggttacatcgattatctggcaatgaacatgctgcctgacctgtgcgatgagtcctggctggcgcgacatgctgcgatgaaacggtgtccgcgcaaggaggccacggctgccagcgggtatatgcgctgggaaggtgtcagcgatggcctgaaggtgactgccgggagtgttattcagcgcgatgacctggttcagtacacggcaactgccgatgcaaccagctctggtggtgtcctgcgcgtgccgatcgcctgctcaagtgcaggtgcggtcggtaacgctgacgacggtacggcattaatcctggtcacgccggtgaatggtctgccgtcttccggtgtggctgacaccctgacaggcggatttgatactgaagagctggaaacgtggcgcgcccgcgtcattgagcggtattactggacgcctcagggcggggctgacggggactatgtcgtctgggctaaagaagtgcccggcattacccgcgcatggacataccgtcactggatgggaacgggaactgtcggtgtgatgattgccagcagtgacctgattaatcccattccggaagaatcaacggaaacggcggcaagacaacatatcgagccactggccccggtggcaggctctgatttgtatgtgttcaggccggtggcacatacggtggattttcatatccgtgtgacgccggacacaccggaaatacgggctgtcatcaccgcggagttgcgttcgttcctgctgcgtgatggttatccgcagggagaactgaaggtatcgcgtatcagtgaggcgatttccggtgcgaacggggaatacagccatcagttgcttgcaccggcagacaatatctccattgcaaaaaatgaactggcggttctggggacgatttcatggacgtga

SEQ ID NO: 384541 - DNA, 585 bp, Salmonella enterica
atggacgtgacaaacgatgattacatccgtctgttgtcggcactgctgccgcccggtccggcgtggtcagccagcgatccggcgattgcaggtgcggcaccgtcattaacccgtgttcatcagcgtgcggatgccctgatgcgggagttggatccgcgcaccaccactgaactgataaaccgctgggagcgtctgtgcggtctgccggatgaatgtattcccgcagggacacagacccttcgccagcgtcagcaacggctggatgcgaaggttaatctggcgggcggcatcaatgaggatttttaccttgcacagcttgctgccctgggcagaccagacgccactatcacgcgatacgataaaagtacgttcacctgctcatcggcctgtactgacgcggtgaatgcgccggaatggcggtattactggcaggtcaacatgccagccgccaccaacaccacctggatgacatgtggcgatccctgtgattccgcactgcgtatctggggcgacaccgttgtcgagtgcgtgcttaacaaactctgcccttcgcatacctacgtaatttttaaatatccggagtaa

SEQ ID NO: 384542 - DNA, 564 bp, Salmonella enterica
atgatttacgggtatgttcgtgtatcaacaaatcatcaggatacagagttgcaacgtcttgcacttgagtcagctggctgtgagcgaatttatgaagaatatgccagtggcagaacagctaatcgccctgtgttaaaggaattaattacggtgatgaaaagtggagatgagttgattgtctggaagttagatcggatagggagaaatgtgctgcatgcgctattgatgtttcaaaatctgcacgaaaaaggtgttaattttcggagtattacagatggcgtagacctgaaaacagcaagtggtcgctataatttccgtaatattctttctgctgcgcagtatgaatctgatttgaatagcgagcgaactttagctggtttggctattgccagatccaaaggccggattggtgggcgtagaccgaagtttagcgacgagcagtggcaacagatgggagcgctcatagcggcagggaaatcacggcgttatgttgcacgtatctataacgttgggctatcaaccctatataaacgatttcctgttactggcattcaaacgaaataa

SEQ ID NO: 384543 - DNA, 249 bp, Salmonella enterica
atgcgtattgaaatctgcatagccaaagaaaaaatgactaaaatgccaaccggtgctgtggatgcgttaaaggaagaattaacccgacgcatcagtaaacgttatgacgatgtagaggtgatcgtaaaagccaccagcaacgatggcctttctgttacacgcaccgcagataaggattctgcaaaaacttttgttcaggagactctgaaagatacctgggaatctgctgacgagtggtttgttcactaa

SEQ ID NO: 384544 - DNA, 1098 bp, Salmonella enterica
atggcgtactataacatagagaaacgactaaaatccgatggcacaccacgctatcgctgtaatgtgattatcaaagaaaaaggtgttatcacttacagggaaagcaaaacattccctaaacatgctcatgccaaaacatggggcacacagaaagtgatggaattagatctatatggcattccatcatcaaatgcagttgacggacttacagtccgtgacttactacacaaatatttaaatgacccaaatgccggaggtaaagcaggccgtactaaaagatatgtgctggaactgcttatggatagtgacatctccgcgatcaaactatctgaactgacagaaaatgacgtaattgaacattgcaggctaagaaacaacgctggtgcaggtccagctacagttagccacgatgttagttatcttggcagtgttctggatgctgccaaacctgtatatggaattaattacacatcaaacccagcaaaagccgctcgtccatatctacttaaacttggtttaattggtaaatcaaatcgtcgtaatcgtagaccggcatctgatgaactggacatgctcattgaaggtcttcaacaacgatctacacataaatgctcaaaaattccgttcgttgatatcctcaaattttctgtgtggtcatgtatgcgaatcggtgaagtatgccgattacgatgggaggatctcgatcaggaacaaaaatccatactcgtaagagacaggaaagatccacgtaaaaaggaaggcaaccatatgaaagtagccttgcttggggaagcctgggatatcgtccaacgacaacccaaaaaatcagaattcatttttccatataacagcacttctgttactgcgggattccagagggtaagaagcaaattaggtattaaagatctgcgataccatgatttgcgtagagaaggggcaagtcgcttatttgaggctggttttagtattgaggaagtcgcccaggttacagggcatcgttcattaaacgtgctatggcaggtatataccgaactgtatccgaaatctttacataatcgttttgaagagctccaaaggagcagaaataagacctcttga

SEQ ID NO: 384545 - DNA, 816 bp, Salmonella enterica
atgaaaaaaacactgattgcactggcagtggctgcatctgcagtggtatccggctcggctatggcagcatggtcgacgggcggtgattttaacggtaacattaatatcggcggtaatatcactactgatgcaccagcctggctgtggaagaccggggctgatcaaggcactgcggttgatttaaaactcgcagatgctgtcgtgtctggtgataataatgtgtggagcggtgttggtaaaacttcatttcctgtattgatggggaaaacaaaagctccatactccggggtatctacaggtatggctccgcagatcacttatggtggtgagggcttctcaatttctcagcctgctgattctgcaccagtgatcacgttaagtgcttttgctaaagatgataaagcgaaggctggtacgttccagtttaaaatggatattatgtcactggctaatgtcttctggaaaggtgatggcgttaataccaatgataaaaacgcatatcagacaattggtgacacaggaaaaacttatggtaacggatttgctcaaaataaaacctatgtaaactcaatgaccccagtagcgatcaaagataaaatctctgctattctgggtgccgatatgattaccatcccagccggtgctgtaactagcggttatactgggccgaatatttttaaccgcgctgatgcaggaagtattcagggggtatatgcttctgaatatgtcgctaattctggcgtattaactttcccgaaagctaatacgcctaagagctggaacgcaaatatgactgtcactgtttcttatcagtaa

SEQ ID NO: 384546 - DNA, 267 bp, Salmonella enterica
atgcacaccgctttttcttccccgtcttctgcccctgccgccccgctgatgccggtttctgataccgttcacgaacgctttatccgtctgcccgaagtgatgcatctgtgcggcctgtcccgctcgaccatttacgacctcatcagccgggaagccttcccgaaacaaatctccctcggcggaaaaaacgtggcgtgggcgcagtctgaaatcactgcatggatggcggatcgcattgccgaacgcaaccggggctatgacgcatga

SEQ ID NO: 384547 - DNA, 942 bp, Salmonella enterica
atgaagttaaattatttcacttacagaataaccgacaatagaaatcaacaagtttattttgataacatttcagatattatcaaaaatttttgcctgcatagaaaaaaatctctttttgagaaaagtaaaggattaaaaagactatacctagccatgcctacctcatttgatggcatatactatttgaccacgccagcaattactacagcatttaaagctgtagatagagcaactggtgtagtaaatgatttggcgtctgtgctgggtaaagatagtctagagaaagttacttacttttttattgaccctaaacattcaataatcggagtaaccgagggtaaaggtaatgctgacattgatgatttgcaattctttattaacgaaataattaatcaagattttcaatcgcatatttacaccttcgagctttgcacattaaaaatagaaattaaatccacatcggctacgaaattcaaactcatcactgaagcgcgagtgaagttaaataatgattccgttggagatgtaataaatggattgtttggcaaggaaccatcagataatatggaagtgcaaattatcgtaaaaagaaaagatagaaaagagaatgtaaaagattatatacaaccattactctcaagtttatcctcatccaatgacaaagaatatgcagaaatttatttcagagctaaggcagatgagtttcaatcaaatgtgaaagagttcattctagaccagaatcagaatatttttgatataataaaccctcatctcaaggcaaagattgaagagcaaatacttgaaaaaagatacaaaaaccaagttgtgataagtgaattgagtacatatgcacaaaaatttactggacgcatacattcaggtattattgatccagtgtggaatgatctaaaaacagaaagttaccacaaagcaaaaagttga

SEQ ID NO: 384548 - DNA, 456 bp, Salmonella enterica
atgcttactaaccaagcaatagtaataattaatttagccacgtggggtgtaagcattcttattgctgttgttttttctctcattgcggtgttttgtgaaaaccaatacatagagataaaacctgaaggtataattggcatcgctacattattagggactttcagtttcacaatgactggattcattgctgcaattggcgcttatatcatatcggtgtctgataagacttcttttctaaggtggcgacagcaaggatatataaatatcttctaccatatatatgggcagagcattgtttttttattggtaacatttttattatgcatggtggctatcataatgccatttaatgttgcattaacagttttgaaatgtggtttatacattctcattcttaatattgttcacatcatattaataactgtaattacactcggtcaaatgcagaaaaaataa

SEQ ID NO: 384549 - DNA, 168 bp, Salmonella enterica
atggcgcagaccatgagcgttgacgatgtgctgcgtcatattcgtaaagcatcgctgtttattgaaggtattaccgtcagcggcggagaggcgaccacgcaattaccgtttattgtggcgctatttacggcgatcaaagccgatccgcagttacaacggctgacctga

SEQ ID NO: 384550 - DNA, 174 bp, Salmonella enterica
atgctccatttgtttctgctatcctcaaacaacgatttattgcaccaatatcatgccaatgaagttaatctgctggctcacaattcaataacctctgagcacgataaattgaaatatactctaaaggcggtatattatttaacttctatatacttctttctattttactcatga

SEQ ID NO: 384551 - DNA, 1230 bp, Salmonella enterica
atgacgattaaatttcgcatgttatgtctgttgttgtcgactctttctttattttcaccagcctcctatggatggtctgtttttgttggtgattatggcaacgtaaatagtagtaatatttcaagcagcatcagtgatatcactgtagatttcaacccgacaacttttgtaaaacctctggcaatgcatgaaggaaacggtttacgggaaattgctgtgacggatgctgcaagagatcttgatcctcataccggcctgagttgtaataaggatggtaacgaaggtcaggctgatttgcatcatgggtatatcgattctggattaacttataatggcaataagctctggaagacaaatattaccgggctctattttgctcttgaatttactagtattaactttggtggtcaatattacagtgagcaattttgggtcaactgggccagcggtgatagtgcagctaaatcctttaatatgcatactataatgggggccgatcagcgtacaaaaaatggaatgtgcgatagggctaccaactggaagtattatgcctatggtggcattgttttatggattaaatatcatatttatattgatgataaatttaatcctaatggcgcaacatccctccccatcacttttctgaaaagtagtatatatgatcttaaatttaatacaccgtacacctcagatactgcgcagcattctgtgagctacgtgttcaatagtggtacactgaatatcaattatccaacctgcacagccagtgccgttaccggtgagggcgttagtaatgctaccgtgccgtttggacgtgtttctgctgaagatattgttaatggaagcacaacgatgcagaaaacattttctattgaactcagtaactgtaaatatgttaaaaacctgaatgtgacgctggattctaccaatattggtacaacagataaaactttactaagtaatacattgacgagtagtgctgccagtgggattggtgtaatgattgagggggagaagaacccactcagcaccagcgactggacattgctcaagcccagagacagtacttcagtttataaatttaccaatacacctgattataccaacagcgatattggaaatagtacccaaacaatgaattttcgggctaccttaaaacaggatggcagtaatgttatcaatgcaggtgaatttaaagctacgggtagatttaccatcaactatccataa

SEQ ID NO: 384552 - DNA, 594 bp, Salmonella enterica
atgctgacgcgcagacagtgttattttctattttgttcagggctggcaacggcctttttatcgcgaccgggatacgccgaccataacgtcgatgtgactgcaacggtgattaataatacctgtcggttggaagtcaatgataacggtgtggtgcgactgcccaccgttaagctggactatttctcgaatgagattacagctgaaactgattatgccggcgggcaaaactttacactgcgtctggttgattgtccggtcagcgatgataagatttctcaggtgttatttaccttttccccgcaacagggagccttgcctgcggataacttacaggtatttgctaatgagttagcgcaaaataaagatggtgcgaaaaatgttggcgtggtgattttttccgctcagagcaacgctacacgttttaatgtgctggatgtcaatgggatgtcaaaagctatctatagcttgccggatagcaattacagtaattcacagtggacattctacgcccggatgcaaaaaattgtcagcatggaagatgtgtcatcagggctggtaactgccagagtgctggtgaatatatcttaccagtaa

SEQ ID NO: 384553 - DNA, 609 bp, Salmonella enterica
atgaacaggaaattactcgccgggatggtttttggtagtttattaagcacaggagttgcttctccagcctgggccggaacctcaacccttgatctcaaagtaaaaagtactatcgaagtaggtacctgtactgcggctatctacgacggtaccactcaaaccaacactatcgcactgggtaacgtgccagtttcacaggtagtgaactatcaaagtaatgcaggcaaagcttttaaaatacgtttttctgattgttctggtttgccaaacggcaaggctaatctgaaaattgttaagcgggccaatggctgtgcagggggcaactcaaaccaggctggttttgccaatagtacagccgctgcaagtggtggcgctacggctacggccctggagctatggacgggtagctcggcaggtcagggaacgcagttccactgctacacgccggacaccaccacacaggagattaatgtctcagcagcaacaggttctactacggttgattatgatatgagcgccaggttagccatgccgtcgggtaaatccctggctgatattcaggcggggtcatttcttggtgaaaccacctttattatctcttataactaa

SEQ ID NO: 384554 - DNA, 585 bp, Salmonella enterica
atgaaacggaataaatctgtacttaccgcaccattattggggctgatattaccactagccagccatggggcagcggcccctaccgaaattaatgttgattttaccgcaacggtgattgagaccacctgtaattttattattgatactgccgtcagcccggctgttaaggaaaatacgcgtaatagtcagtatacattgactatacctaatgtttctttggataaaatcattagcgaagaccctgcggcgcagtctaattttacattgaaaactgatagttgcagccctgggatttctgccattagcacaaaaatcaccagttccgcaggacgcactggcaacctgattaacaacagtctgtcaaacagtactgcggcaactaatatcggcatgggttttaaacgccagagcgatagcggtaataactttattactccggataacgccacgactatcacatggagttctgatgaaaggtcggcaggtttacccttgaccgttgccctgcgcatcgttaacagcagtggtacaacgtctaccggtgagtttgagtctaccgccaccttcaacttcacctataactaa

SEQ ID NO: 384555 - DNA, 2601 bp, Salmonella enterica
ttgtacacctttatcaattgccctcatcccttatcgcgcactaccattgctatctgcctggcattgtgtgctgttaataggggctatgctgcggaaagcattgagtttgatgaaacttttctaatgggtgatggtaagtcgtctattgatattagccgctatgccgacggtaaccctacaccgccgggggtatacaatgtcagcgtttttgttaatgataaaatcacaactaatctggaaattccgtttattgatgtcggaaaaaatgatgctgaagcctgtatcagcaaaaaaaatcttgcgcagttgcatattaatcagcctgagaagataaaaaatagcgatattttgctaaagaaagaggatgaaaatagcgattgcctgaatctgacaacgctaatagacaattcgaatattagctacgatagcagcgatcaacgtttatacattactgtaccgcaagcctggcagaatcgtagctatcaaggttatgtcgacccttcattgtgggacaatgggattaatgccgccactttatcttattcactcaatgcctatcacagtgaatatgacaatggaaataatgacaccttttatggtgcctttaacagcggtgttaaccttgcgggttggcgctttcgtgccaccggtaactataactgggccaaaaatggtggtagtaacctcgattttcagaaccgctacgttcagcgtgatattaccgcattgcgatctcagctcattatgggtgaggcctatacgacgggcgaaacctttgactcggttaatattcgcggtgctcgcctctatagtgacagccgaatgttgccatcctcgcaggccagctatgcgcctattattcgaggagttgctaacagcaacgccagggtcactattacccagggggggtacaaaatctatgaaactaccgtaccgccaggagcctttatcattgacgatcttagcccatccggtttcggtagcgatttgatcgttactattgaagaggctgacggttccaggcgaacctttagccagccgttttcttcagtgatgcagatgcagcggcctggcgtcgcccgctgggattttagcattggacagatgaaagacgacagtctgcgtcatgaacctaatttgattcagggatcgttttactacggtatcaacaactatgtgactggttatgcaggcctgcaagtcaccgataatgattactcagctgggttattaggtgtggggattaacacaccatttggcgccattgcagtggatgtcacccaatcgcaggcggaaatcaccgatgatgagtcttatgccggacagagttaccgcctgacgtggaacaaactgctggagccgacagagacctcgatcaacgttgctgcttatcgctattctacccgaaaatatcttgggctgagcgatgcacaacgcctgattgatgatgcggcacatggcgtggtgagtacgaaaatgaatacttacgagcgactcaaaaatcagtttaccgtcagtatcagccaaccgttgcaatttgagaaagaggattacggttcattctatctttccggatcctggagtgattattgggcgggtgagcatagtcgcagtgagtacaacgtcggctatagcaaagggttcagttgggggagtgcgggtattaccgttcagcgtacatggaacgaatatggtgataaagacgatgcgatgtatattaactttagcattccattgagtaatctttttggtggtacttaccgccgttcaggttttaccagccttaacgccaatattaatactgattttaacggcacccatatggtgaatatgaactcaagcggtaatagcgaagataatttgctgaattacagtgttaacaccggttatacgatgaataagaccggtagcgatcttgcctcagtaggcggttatgccagctatgattcacaatggggcagttggtctgcatccagctcatttgatactgataagagtcgacaatattcactgagtacagatggtggttttgtgctgcatagcggtggtctgaccttcagtaatgacagttttagctccagcgacaccatagtgctggtgaaagcgccaggggccaaaggtgcacgtattaacagtagcggcagtagcgtagaccgttggggctacggtgtaacctcttcgctgtcaccataccgtgaaaataccatttcactggatattgaggacatggatggtgacgtggaactgaaaagtaccagtaccattgccgtaccgcgcgatggcgcgattctcttcgccaacttcgaaaccgaccaggggcgttcagccatcataaatatgagccgcagcgataataagacattgccgtttgctgctgaggtttatgaaggtgatgcgccaattggcaatatgggccaggatggtcaggcatttgtgcgtggtattaatgatgctggtgaactcatcgttcgttggtatgaagagggtcggccgcagtcctgtcgcgcagcctatcaattcccggctcagccagccactctaccggggagtcagacattggtgttgagtaatgtcatctgtcgtatctccaaccgtaactaa

SEQ ID NO: 384556 - DNA, 744 bp, Salmonella enterica
atgttatgtcatctgagaactgcatttacggtcatcacgcttaccggcacgttactaagtaatgtcgcctgggctgatattgttatttcaggtacgcgtatcgtttatcgcggcgcacaaaaagatgttaacgtgcgcctggagaataaaggctcgcggccattgctggtacaaacttggttggataccggtaatgataatacggaacctggtgcaattaaggtaccatttaacgccactccgccggtttctcgtatcgatcccaaaaaaggccagacgataaaaattatgtataccggtagtcaaactcttcccagtgaccgggaaagtgtattctggttcaacgtactggaagtgccgccaaaagctaataaaaatgagaattcagctgcgcagaacacgctgcagttagcgtttcgcacacgcattaaactgttttaccgccctcaaggattgggcgatctggcgggtgaggctccggcaaagttaacctggagaatgaagcatgaacagggcaagtccgttgtgaccgttaataatccaacgccctattttgtctcgtttaatagtattgaactggagtcgactggtaaaaaatatatcgtcgacggtcaaatggctgctccgctaactgagaccagttttactctcaaaaccgcgactacgatcagcagtggcaaaattaactacagttttatcaatgattttggcggaattatcaacgctacagcctctctacaataa

SEQ ID NO: 384557 - DNA, 630 bp, Salmonella enterica
atgaaaaaaacattatcgttagcagttatggttatggcgatgggcgcgggttctgcaatggctgccgacgttccagtagcggctggccagatcacgttcaatggccaggtcgatccagcgacctgtatcgctaaagttgttgacggcggtaaaaccagtatcggttctgacggtactgttacactgaaaaccgtcactctggcagatatgaaagctgccgcaaccgttgcacaaaacaccactggtttgaatcctaaagatttctctatcaccgtggactgcactggcgctgatgctgatctgaaaaacgtagctctgtatatgagttctgcagacttcgccaacagcgacggtactctggctaacaataccaatattaccctgggctcaggcattaaaatggccaatggcgtaagtatcgcagtacacgaagttgaagctgccggcggtctgactctggtgaatatggttaaccactctgacaaacacgaactggcactggatgatactacccgcgccggtacctataatctgcgcgcttcctacgttatggctcctggtgtcaccagcgatgcagtgacctccggcgcggtcaccactaactctatttactctatcgtttataattaa

SEQ ID NO: 384558 - DNA, 249 bp, Salmonella enterica
atgctgatgttgcatcagggtgaccgcgtcagcgatgttgccagaacgctctgctgtgccagttcctccgtcggacgctggattaactggttcacgcagtcgagtgttgcaggactgaaatcattacctgccggacgaacccgtcgctggccttttaagcatatctgcacgttattacgtgagctggtaaaacatgctcccggcgatttttgccatcagcgctcaatgaatgagcggacacaacaatag

SEQ ID NO: 384559 - DNA, 294 bp, Salmonella enterica
atggttgctgtaagcgggaatcgtattcggtctcttttttttcttataaatcagttgcttatgatcaatgatccgagatttccgaaattttccagaatttctgtattccgggctttttcgttatatcagatccaaatccagtttaacatttcttttacagcaaaatcagagcatcacgtaagctttattatcgcgttcatcgagatagagtttcgtggtgttctcggaagtatgtcccaggagtttctgagcaaacccttcgccgtaagcgtatttatacagtcgtccggataa

SEQ ID NO: 384560 - DNA, 243 bp, Salmonella enterica
atgattgatgaatttcatgtgatgtatatgtataaaaaaatccaagcagaagcctcaacaacagatatgaaaacacttgaacagcttttgaagaagttccgtaaagtcgtggcagagcgccgggaagaatactatcaggaaattggtgagaaaaaagcacgtaagttgaaaatgaaaagagcacaaagattgcttgagaaaatggcgtgtgacctggtttcaccagaagatctcattgactga

SEQ ID NO: 384561 - DNA, 291 bp, Salmonella enterica
atgaagatagaacttattacggaaaaacagtttattgagcaagctgaatgttattataaggactatatgaaaaggctattgaggaatacgccagaggatttttactattttctaaacaataaatacaatatgaatgacattatggaaagtatcattaaaaaaacaagatatcattttttcgatgacaccgatgaatgcagaatgaatcgggtttccgggaaagtaagctacagtaaggtaaaacagcatcttcgacggctttggattgcgtataagtttgtataccgctga

SEQ ID NO: 384562 - DNA, 1242 bp, Salmonella enterica
atgccaaagaaagccagagaactgtccgccttagccgtttccagacttaaagcggaaggtcgctatgcagtgggtggtgttgacggattgtatctgcggatcgccgggcgctcacgtgcatgggtcctttgcgttgcgatgggaacccgaatcaacagggcaggtaagactgttccccggcgactgaatatgggtcttggcccttatcaggaagtttcactggcagaagcgcgtgataaggcgcgtgaactgcgcaggcagatccgtaatggcattgatccgctcaaagaaaaacatgcccaaaaagcacatcaggaaaaaacagcccgtaaacagaagacgttccacgcatgtgcggaagccgtgctggaaattaaggggcgcgaactgaagagcaaaaagcatgtcgcacagtggcgctcttcactggagacctatgcttatccggttattggtcagaaaagagtgggtgagattaccaaggccgatctgctggcaatactggaacctatctggttaaccaaaaacgaaaccgccagccgtgtgcgtggtcgtattgaaactgtgctggattacgctaaagcgaaagaataccttgaaggtgataaccccgcggcgtggaaggggatgctgaagccgttgctgccaatgccgagtaaggtgcagaacaaaaaacatcatgctgcattgccgtatggtgaacttggcgcgtttatggctgaactccgtacccggacaggtgtctcggccagagcactggaattttccatactgacggtggcccgttctggtgaaattcgtggtgcggtgtgggatgaaatcgatctggcggcaaaaacatggactattccggcagaaaggatgaaggccagtaaagaacatcgtgttccgttgtctgatgcggcggtggcattactcaaaatgctgccccggtttaaggacaataaccttgttttccctgctccgcgcggcgggcaactgtcggatatgtcattaacagcggtattaaaacgcatgggccgcagcgatttaacccagcatggttttcgctccacgtttagggaatgggccggggagaccacatcctaccagcgggaagtgattgaacatgcgctggcccatcagttggcggataaagcagaagcagcctaccagcgtggaaccctgtggcctaaacgcgttgcgctgatggatgactggaccgattattgcggatatgaacctgtcgataaggcagcataa

SEQ ID NO: 384563 - DNA, 240 bp, Salmonella enterica
atggataacctgcttccgctatcaaaatcaaaacaagcgctggcgatgttcgaagagttaaaatttctggccggagattccccttacgtcttccccaaccgacacgactaccgacgtccgctctccaatacaacgctgaactgtgcggtgcgtacgctggatctgaacgtcagggattttgttattcatgacttccggcgtactgccagcacattgctacataagcagggctacaactag

SEQ ID NO: 384564 - DNA, 576 bp, Salmonella enterica
ttgcatttgccagagcttgacgatgttgtttggatgaagggtgtattgatgctaaatgtaaggtttgattcagaaaaggctttagaggccattctgtacgtcgcctctaaagcaccgatcccagatatctatcatgtcggaaaaattctttattatgctgacaggtttcaccttgaaagttttggacgcctcataacgggcgatcactataacgctatgaaggatgggcctgtagcaagcaacacatacgatattataaaaattgctcgtggagatggacgttacattcctaatggttgtgatgtcgattctgtgcgaaaagcattttctgtatcaggtatgacgattgtgccgagccgtgaagctgatgaagacttttttagtgactcagatttagagtgtattgataagtctatcgcgatgcttggaaacatgtcctttgaagctatcagaaccatgagccatgacgcggcatgggaacaggcagatcacaatggtgagatgtctttggaatcgatagttgcacagctaaaaaatagcaaattaatactggattatctgaagaacggatattga

SEQ ID NO: 384565 - DNA, 462 bp, Salmonella enterica
atgctgggtgattgtttccctcctgattttaaggctaattttagtcgtgaaagaggtatatcacccggtgatgtattgtatcttcattgtgattttacgaccccacctaaagtaaaatatatggtggttgtttgctgtgaacctcttttagttcttctaataaattcagatataaatgaatttattaagagaaacaatgatcttatggcttgtcaggtcgaaattaatagagaggaccatgattttcttaaatgggactcatttgttaattgcattgaggctcatgctgctttcgatcttgaaattattaaagagaaaatagccatccaatatggtgacgtgctaaaaggtcgcattacagatcattgtatgagacaagttcgatgtgcagttgagatatctaaaactatggttaaacggcataaaaaactgatactcgctgctcttcaacattatgaataa

SEQ ID NO: 384566 - DNA, 273 bp, Salmonella enterica
atgaataccttgtttttactgatggctgaattcaatacccctaacattgaactctcagcagttagccaaaagtactttggcatgagtccagccacggcagaagcaaaagcaaacgcttgtaagttgcccgttccaacatatcgcatcggcacatcacaaaaagcaaaacgttgcatcaatattcaggatcttgcggaatacatagacaaaaggcgagaagaagggcgtgctgagtgggaaagggtcagaacccataaacaaaggctcatttaa

SEQ ID NO: 384567 - DNA, 1584 bp, Salmonella enterica
atgactacttttaccgacaaagaactgattaaagaaatcaaagagcgcataggcagcctggacgttcgagacaatattgagcgccgggcttatgaaatagcgttagcctcgctggaagcagaaccggtggcctggctgcattcagacaacggcttaggtattccggcaataacccggagtaaaaacattgctgacagttggttatcgaatggctggtatgttcagccgctatatatagcccagccagtaccggtaattcctgatgaggtgttgtccgcaatccgggaggttgccaggattcgcgccgatttcgatgattttgacggtgacaggcgaggtatcggtgattgtctggatgaggccgagcaagagcttatcgttaccattaacaaatatgccagtcagttggcagtagagccggtagtgcctgctgttctggaacgtttgcgaaccattgtagcggacccacgcgcattacctcgcagaaaagaatgggttagtgggcagcagtacagttacgtacttctcgaaaacgtagaagctatggttgatgaagcctgccacgctgccatgcttcagggtagccaacctgtaagccaaacttacaacttgccagaattaatcgaaggcatggaagtttccattgatgtaagcacttgtgatgctgatttaggtaatcgctatttcggcaccgtcaccgaggcgttagaacttgatacagccaagaatggttacatcctcctggttcaggacgcagagccaaacttcgatgtaaatggcaactctccgggaactccggatagttggataagctgtagtgatcgaatgcctgaaaagggccagaacgtgcttatttcggtgaatttcgatagctctctggttgaaccgctaatatgctccgcacgctataccggaagcacctttcggcgcggagatgcaacgattaagccgggtaatggtattgagcaagcaactcactggatgccgctaaccgccgcaggaggtgaagtgatgaacaacttaatgatcgaccttgagacgatggggaaaaataaggatgcaccgatcgtttccattggcgcggtgttcttcactccagaaaccggagacatcggacaagaattctatacggttgttagcctggaaagtgctatggggcaaggagctacacctgacggcgataccatcctgtggtggttgaaacaaagccctgaagcacgagctgcaatctgtattgatgatactttgtcgatcagcgatgctctctcagaactaaatcatttcattaaccggcacgcagccaatacgaaatatttaaaagtctggggtaacggggccaccttcgacaacgtaattttacgtggagcttatgagcgagcaggacaaatctgcccgtgggcatactggaatgaccacgatgtacgcacgatcgttacgcttgggcgttccatcggattcgaccccaaaatggacatccctttcgatggcgaacggcacaacgccctagccgatgcccgtcatcaggcaaaatatgtttccgctatctggcagaaattaattcctgccaccagcacagaattatga

SEQ ID NO: 384568 - DNA, 288 bp, Salmonella enterica
atggcaactttgcaggaattaatcgacctgacgccagaacaggaaaaagcgtggaatcgccttgtaaaggctgtaaaggatttcagggcagccggaggaaagttttatagcgtcctggacacgctgagcgcatacaacggcgagcacgttgccagcattgataacgataagggctaccacactgcaagcgtctatatgcctagcattgatgcgccagggctaaccagttgggctgatgattggcacggcatcacgctgaaagatggggttgaagtggatgaggactaa

SEQ ID NO: 384569 - DNA, 474 bp, Salmonella enterica
atgacaaccaaaattaactatcaggcactgcgtgaggcggcagaagcaataaaaatagtagccacaccacaaaaattgctggcatttcgtatgaaagtcacaccgcaggttgtgctggcgctgctggatgagctggaagcagcagagaagcgaaacgctgaattacaaagcgagaatgcatacatccgcaaccggtacaaagaactggacctattaatcgggaaaaacattctggtcatgcaggctgccattatcgaatggcaggcaactggcgacgctaagagcggactggcatggatttataacacactgtttggccctggcgaattaccggacgaatctgagaaagatgctcaggcctactttaatcgcaaatatgcaccgattgacgaaaagcttatggcgcttcacaagtggttttgggaacaaagtgaagccgagcgcgccgctggcattcgcatcaaaggagagtga

SEQ ID NO: 384570 - DNA, 801 bp, Salmonella enterica
  misc_feature (213)..(221): n is a, c, g, or t
atgtgcataactcatgtagttagtttttctggcgggagaacatctgcatatcttgttcacctgatggaagaacaaagaaaggctggcaataacgtctgctacatctttatggataccggttgcgaacatccgctgacataccgctttattcgggaggttgtgaagttctggggcatatcgctaactgtgttgcaggtcgatataaatccagannnnnnnnnaaaaaaatatggcacgccatacatcggcggcgcgttctgcactgacagattaaaactcacccccttcacaaaatactgcgatgaccatttcggacgagggaattacatcacatggctgggtattcgtgcagacgaacctcgtaggctgaaaccgaaatcgggcgtccggtatcttgccgagctatctgattttgataagtcggatgttatccggtggtggcataaacaaccttttgatttgcaaaccccggagcacctcgggaactgtgttttctgcatcaaaaagtccacgcaaaagctggggcttgcatgtaaagacgaacctggtctgatgcgagtttttaatgagctggttacaggtaaacacgtccgggatggtcaccgaaagacaaataaagacgttatgtaccgtggtcatctgagccttgacgggattgccagaatgtatgccgacagcgactacagaaatttgtatcaggcgatggtgcaagccaggcaattcgataccggctcgtgttcagagtcatgtgaaatctggggtgatcaattggagttgaaattcgaagaggtggtggcatga

SEQ ID NO: 384571 - DNA, 537 bp, Salmonella enterica
atgtcatttattaaaactttttccgggaagcatttttattatgacaggataaataaagacaacatcgatattaacgatatcgcggtttccctttcaaatatctgtcgctttgccggtcatctttcacacttctacagcgtcgcccaacatgcggtgctttgcagccagctggtgccgcaggaatttgcttttgaagcgttaatgcatgatgcaacagaagcgtattgccaggacatccccgcgccactgaaacgccttcttcctgactataaacggatggaagaaaaaatagacgccgtaatccgtgagaaatacgggttgcccccggttatgagtacgcccgtgaaatatgccgatctcatcatgctggcaaccgaacgccgtgatctcgggcttgatgatggctctttctggcctgtactggaaggcatcccggcaacagagatgttcaacgtgattccactggcaccgggccatgcctacgggatgtttatggaacgcttcaacgagttatcggaattacgcaaatgtgcataa

SEQ ID NO: 384572 - DNA, 1521 bp, Salmonella enterica
atgagtagggggaaattgccggaggggtggggtaaaacagtaataggtgatattgccgacgttatctcaggtggtactccaaaatcagggattgcagaaaatttcgccccctctggtgaaggtattgcctggctaacgccagcagacctgagcggatataaaaagaagttcatttctcatggagcccgagatttatctacagagggatattcatcctgttcagcaaaattgatgccagcaggagcgatactgtttagcagcagggcccccataggctacgttgcggttgcatcaaatgagatttcaactaatcagggattcaaaagtttcgtttttacaaatgatatttatcccgattatgcttattactatctccgtaatatcaggcatcttgcggaagaaatgggaacgggtacaacatttaaagaaatctcgggtagtgcagctaaaacacttcccttcgtgatggccccgctcgctgaacaaaaaatcatcgccgaaaaactcgatacgctgctggcgcaggtagacagcaccaaagcacgtcttgagcaaatcccacaaatcctgaaacgttttcgtcaggcggtgcttgaagaagctgtcagtggtagattaacggaaaactggagagatgcgagcattagtgaaaaatcagcggaagaacttctcgttaccataagtaaaacaagaaaaaaaaatcttaccagtggcgcagactctctagctacagagtctaagcgatatcttgcaaagattgacgcccatcattttaatattcctgatgttattcttccagttggatggaaatggactactttcttacaatcgatggaaaaagtggttgactgtcataacaaaacagcaccatatacagagaaaggtatttatcttatcaggacacctgatattcgtaacggtattatttcattaaaaaatactaaatatgtcaatgaagacacctataatttttggtcaaaacgatgccccccaaaaagtggtgatataattttcacacgagaagctcctatgggagaggctggaattgtacctgagaatacacgtctctgcatgggacaaagaatgatgctacttcgccccatgcagagctatctcagcaataaatatgttttgctgaatattctatcaattagttttcaggcgagaatgttgtctcaggcaataggtactggagttaagcaccttcgggtagctgatgtcgaatcattaatgtatcctttaccaccactcccagaacaacacgaaatcgtccgccgcgtcgagcaactcttcgcctacgccgacaccattgaaaaacaggtcaacagcgccctgacccgcgtcaacaatctcacccagtctatcctggcaaaagccttccgcggcgagctgaccgcccagtggcgtgctgaaaaccctgatctcatcagcggtgaaaacagcgccgccgccctgctggaaaaaatcaaggccgaacgcgctgccagcggcggtaaaaaaaactcgcgtaaaaaagcctga

SEQ ID NO: 384573 - DNA, 912 bp, Salmonella enterica
atgtacttccctttactgagaggtaagcagtacgagttgatagcattaaaagagttatcaactattgttcctaacgatctttttaaaccgataattgaacccgtacgaaaaaatctcaaacagctcgaagttgcagttaagttattgaataaaaacaaaattataccaattataattgttaactctgaaataggtgaattaaaaggtaatacaaataattttattaacaatctatataatattaaaggaatatcattcatgccgtgtattaaatacattgatgatattcaagaatttgatagattgaatggtattataaatggtgagaaagcatcctatgttgagagtggggtaaccaaagagctagtttctcgtttaaaagtgttttctattaacattatacctgaaggttctcctaatattgttttacagcagttatccaatatagtattaatggatgatccctttaaaaagaaaaaaaggaacgctgactatccttctaattcatatttttcggacttgcatgtaaggtattccggagttcataattcagtaattggttttggtgattttaatattgcgggttcagattacgctgagtctggcggccctgcatacgtagtgactattcatgtgagctatctagatagtaatgaatttgacgctatgtcagttagacatttttcttctgtagatgatggaactccttcgaatccatcaggcaaattccagcaagctttagaaaaacttgtattgcacgatcaaaattttcctaaattttttgataatacatcaggcctaagagggttcaaatcattgcatgcgcgaagacattaccctggattaggtcaggttaaacaattgtcaatgcaacatcatattgaaacgatctgtaacttcatcgcagtctag

SEQ ID NO: 384574 - DNA, 867 bp, Salmonella enterica
atgagcaataataaaaatattggacagctatttacaagtcaggctattaatgctgttgcagatggcgatttttccttactccatgagttaataggtaatgttttaactcctaaattttttcctgttaaagtatccgaaatattcgatatagcatttaagaaattatcacatgaatataaatcagaatattttttcaaaaatattatagcaaacgaagtatttttgaaaaaacataaaaaaaatgaagctgtaatgctttctgaatttcgagttggaacaaataaagctgattgtgtaatattaaatggattatcaacttgctatgaaataaaaacggagttagataatctaaagagattgccagaacaattagattcatacataagcttattcgataaagtttatgttgtagcagcaaaaactcacatcgaaaaaataaaactaatcgttccagaagctgttggtatcattgaactcacagataaaaataagctggaagaaattaaacctgcgttaaccatcaattctgaaattaatccaaaattaatgattggttcaatgagaattgcagaatataaatttatggcagaggaaatatcaggggataaaattaacctaccaaacatggatgtatattctttctgcttagaaatatttgagaacacagattcttataccctaagaaaacactttcgtaactcgctgaaaaaacatagggctaatgatattagcttcattaatacgctacctagatcactaaaatcatcggcaattagctatagtattactcagactcgtcagagatcgctgacaaaaatactatcaagctacattgaaaaggatgatatatgtacttccctttactga

SEQ ID NO: 384575 - DNA, 195 bp, Salmonella enterica
atggctacgaccctcaccccgtcacacccgcagtttgtctttgtgtttgccgccgtccgtcgcgcagaccgtaaaccccgtatctgtatgcttcgcaccgttgccggtgatgagcacaccgcacgcctttccctcattcgcgattacgtcctctcattcgctggccgtctgccggttgcggaggtgcgagcatga

SEQ ID NO: 384576 - DNA, 546 bp, Salmonella enterica
gtgagactgacccccgttattgccgcactgcgtgcccgttgtccgcgttttgagaaccgcgtggggggggccgcacagtttaaagccattcctgatgccggtaagctgaaactgccggcagcgtatgttgtaccgtcagaagatgttactggcgagcagaaatcgcagacggactactggcaggatttgacggagggtttttccgtcatcgtggtactcagcaacgaacgggatgaaaaagggcagtgggcttcttacgacgcggtacatgatgttcgtcatgagatctggaaggctgttcttggctggacgcccgatcctgacgcccatgagatcacttatgccggtggtatgttgctggagctgaaccgttatgagctttattaccagtttgattttacgatgaaatatgaaatcgatgagtcagacacccgccagcaggacgacctgaatgcgctggatgacctgaaaactatcgggattgatgtcgattttattgaacctgatggtgagactgaacaccacaccgagattaccctcccgtaa

SEQ ID NO: 384577 - DNA, 210 bp, Salmonella enterica
ttgccgcatcacgaacgcttttgtggaaaattagcactccgacaagataaccgcccctccgaagagggggctgaagtaaactacctgttactcgcgcagaactcaagcgggacgtttgactctggcgccgtcgtgcatcgcatcaaacaccagcataatcagcttgtcttccagcacaaagcgggcttccagcgcttcgccgatatctga

SEQ ID NO: 384578 - DNA, 924 bp, Salmonella enterica; identical to SEQ ID NO: 382694

SEQ ID NO: 384579 - DNA, 924 bp, Salmonella enterica; identical to SEQ ID NO: 382698

SEQ ID NO: 384580 - DNA, 1332 bp, Salmonella enterica
atgctgttgaaaacgtctcgacgaactttcctgaaggggttaaccctctctggcgtagccggaagtcttggcgtatggagtttcaatgcgcgttccagtctgagcctgccagttgccgcatccctgcagggtactcagtttgacctgaccattggtgaaacggccgtcaatatcacgggcagtgagcgtcaggccaaaacaatcaatggaggcctgccggggcccgttcttcgctggaaagaaggtgacaccattaccctgaaggtcaaaaaccgtcttaatgaacagacgtccattcactggcacggcattattcttccggccaatatggatggtgttccggggctgagttttatgggcatagagcctgatgatacctacgtttacacctttaaggttaagcagaacgggacttactggtaccacagccattccggtctgcaggaacaggagggggtatacggtgccattatcatcgatgccagggagccagaaccgtttgcttacgatcgtgagcatgtggtcatgttgtctgactggaccgatgaaaatcctcacagcctgctgaaaaaattaaaaaaacagtcggattactacaatttcaataaaccaaccgttggctcttttttccgcgacgtgaataccagggggctgtcagccaccattgccgatcggaaaatgtgggctgaaatgaaaatgaatccgactgatctcgcggatgtcagtggctacacctacacctatctcatgaacgggcaggccccgctgaaaaactggaccggactgttccgtcccggtgaaaagatacgcttacggtttatcaacggctcggcaatgacctatttcgatatccgtatccccgggctgaaaatgacggtcgtggctgcagatggccagtatgtaaacccggttaccgttgacgaattcaggattgccgttgccgaaacctatgatgtcattgtggagcctcagggtgaggcctataccatcttcgcacaatccatggacaggaccggttacgctcgagggacactggccacgagagaggggttaagtgctgccgttccccccctcgatccccgtcctctgttgaccatggaagatatgggtatggggggaatgggacatgatatggcaggaatggaccacagccagatgggaggcatggataacagcggagagatgatgtctatggacggtgctgaccttccggatagcgggacatcctccgcgcccatggatcacagcagcatggccggtatggatcattcccggatggccggaatgccgggtatgcaaagtcatcctgcgtcagaaacggggctttgttga

SEQ ID NO: 384581 - DNA, 924 bp, Salmonella enterica
gtggcaaagcaaaagttcaaaatcaccaactggcccacctacaataaagccctcatcaaccgtggctccataactttctggctggatgatgaagctattcaggcctggtatgagtcggcaacgccttcatcacggggaagacctcagcgctattctgatctcgccatcaccaccgttctggtcattaaacgcgtgttcaggttgaccctgcgggctgcacagggttttattgattccatttttacactgatgaatgttccgttgcgctgcccggattacaccagtgtcagcaagcgcgcaaagtcggttaatgtcagtttcaaaacgttcacccgaggtgaaatcgcgcatctggtgattgattccaccgggctgaaggtctttggtgaaggcgaatggaaagtcaaaaaacacggcaaagaacgccgtcgtatatggcgaaagttgcatctggcagttgacagcaacacacatgaaatcatctgtgcagacctgtcgctgaacaatgtgacggactcagaagccttcccgggtcttatccggcagactcacagaaaaatcagggcagcatcggcagacggcgcttacgacacccggctctgtcacgatgaactgcggcgtaagaaaatcagcgcccttatccctccccgaaaaggtgcgggttactggcccggtgaatatgcagaccgtaaccgtgcagtggctaatcagcgaatgaccgggagtaatgcgcggtggaaatggacaacagattacaaccgtcgctcgatagcggaaacggcgatgtaccgggtaaaacagctgttcgggggttcactgacgctgcgtgactacgatggtcaggttgcggaggctatggccctggtacgagcgctgaacaaaatgacgaaagcaggtatgcctgaaagcgtgcgtattgcctga

SEQ ID NO: 384582 - DNA, 183 bp, Salmonella enterica; identical to SEQ ID NO: 239330

SEQ ID NO: 384583 - DNA, 132 bp, Salmonella enterica; identical to SEQ ID NO: 382693

SEQ ID NO: 384584 - DNA, 924 bp, Salmonella enterica; identical to SEQ ID NO: 382694

SEQ ID NO: 384585 - DNA, 1437 bp, Salmonella enterica
atgataaagaaaaaaggatttaccttactggaagtcagtattgttttaggtattggaacactcatcgcttttatgaagtttcaggatatgagaaacaatcaggaagcggttatggcagaaaatgtcggaacacagattaaacagcttggtgaagcggttaaccgctatatcagtattcgctatgacaagatttccacactgtcatcttctcacaatcagagcagtgatccgggtccaagaacctgtacggctgctggttgtgaaatcacttaccagacgttgattaatgaaggtcttttacctgtcggctatactggaaccaacgcgcaaaaatccacgtataagattttgttgaagcgttcgggaacagcgcctgattatgtgattaatggtctgataacaaccagcagcccttggaaagaaggtgggcgcattcgctatgatctattaggcaaagcagttcaggctgcgggtgttgatggtggtatgagcagaacaaccaagatagcttctggctatggtggtcagtggagtgagaattcaggcaactacagcaatattactgacggtggattgctggcttaccgcgtgggctataactcttctatgtattctgtttacctgcgccgtgatggaacattgccaatgactggcgatctaaatcttggcggtaagagtatcaaaaatatccaagacattacggcatcaggaacaacaacgaccggagcacttaatacaacgggtaaagcgtctgttgcatcagatcttgctgttggtggaacctcgaccctgaacgggcaggtaaatatcaataataacctgaaagtgaaatccgatacttatctgaacacgctatctacaacagggctggctaagtttggtagtcgtatcgcgaccaatggactcaatcccaacgatctaccatctggttgggctggaggtgttcgcacttatgatttgtatgcgtctggaactgttggggctggaacagggaaaacagttaatgcttatattaacagcgcgggtaatatttttgcgtcaggtaatcttactgctggaacgataaaatccaatgggacaattgaagcaaccggaaggattaaggtcggtgaatatcttcacctgaatggtcaggcaacgctgaatgcgaaatgtacatctaatggtctggtgggccgagacagtatgggtaaggttttatcatgcgttagcggtaagtggtcagagctaacaccttcagcggcatcaggtatttatgttcgatattataatagtgtgaaatggtcctgtactgttcctaacagagcgacaggtggttgttcttgttcatcaggactaaacagtattttgataaatacagattcacaacagtcatgtagcggtggtaaaaacgatcactgtagaacatataccaaatatttttatgcttgtgtttaa

SEQ ID NO: 384586 - DNA, 1107 bp, Salmonella enterica
atgactaagtttgtagctatcaaaattcattatgaccatagaaaatcactcacaccatatctaaaatattccaaggtgccaacaccagaggagtatcaagaatacttaaacttatttcacgatgaaggcattggaggtgcgggatttcatgagtgcttaaattttgctattcgtgaacatgaaaacactaaaatttacttaccaccaacttgtatccccaatagcaaatatatggatgaagattttgtattcttttccttcacttacaaacatgataaggaaatgccatccagcataataggtgttcatgcggcaacgaaaattcattctattggaaaagaaccccttctacgcgatgatatagaacctatagaaggagcagaaccattctattaccatgccgaagcaccaagtgatttcataacattgttcactcccgcaattgaatacgattatagagagggattgtttaccccaatatataaatcttgggggaatggtttgagatatataaatgaagaccatgcaactaacatcattaacactgtacttaaagaagcacaaaaacgacgacctaacgcgagcatttcggaagagatcattatctcgcgtgaaataagaacattagaatccatacagaaaaaatatggattgacatcagatgacgaattattaattaataagggaaaaacatccaatcgggaaattataccagatagagaaattggtttcttaggcgaaaaagtagtgtatgaagaagagattaattatgctatcaaacataaaatcccaatcagtgaagttgagtggatatctcaatccgatccacaatctccgtatgatataaagacgattagaattattaacaataagaaaagagaacactttatcgaagtaaaatcaagtcgaattatagatgaaagtaacatttacctatcatctagacaagttaaatttttccaagaaaatgaatcttcatccacattcaagttcgtgacgttcacttcacaaaatacggttaataacatacgagaactaaattttaatcaactatccgatgaattcgatttggtaccaataaaatttaaactaaaacataaaaaataa

SEQ ID NO: 384587 - DNA, 435 bp, Salmonella enterica; identical to SEQ ID NO: 272314

SEQ ID NO: 384588 - DNA, 243 bp, Salmonella enterica
atgattattcaaaaaagtatcagacaaatgaaaaaagaggcatggacattaatagcaatattatatttatcaagtatctcattattaatattaacagtgaatgtattaccaaaaacaggattagatagcttttatattataggtggcggattgatggctttaacttcattgttatcatggaaagaagcatataagttagttaactgtataaatgaagcaaaaggaactaaaaagcctgaataa

SEQ ID NO: 384589 - DNA, 543 bp, Salmonella enterica
atgttcaacatgacaaagagaaagaaaaaagggttttcattattagagttattattggttttcgggattatcgcagcgttgatagttggtgtctttatgatctatccaaaaattagttctggtcagaagatagatagcgacataaaaatattaggaactttaaacgcaggtataaaaaatctctacgctgggcaagcagattacaccgggttatcagttgacgcagtaatcaaatcaaagattgttccagaagatattgttgatgataacttaatatgggatagctggggcgctaacgttcttatagaaccgtattatgatggtagtttttatatcgggtttgaaaacgtttcagttgatgcttgtcctaagtttgtgtctcaagctggagcaagttttttcaaaatagtagtaggttcaagagaagttaagaacacagaagcaaatcaggatcttgatatggcaactttagcaaatgcctgtatcagtaatgacgatgggtacggtggcagaccaataacagtatatttttacgacaaataa

SEQ ID NO: 384590 - DNA, 558 bp, Salmonella enterica
atgataaatagttttagattattaaaagacagaaagagtaaaaaagggttttcacttttagagttgttattagttcttggtgctatcgcagcgttgatagttgcggcttttatgatattccctaaagttcaggcttcacagcgtatcgacagagaaagcaggaacctaacagctatacaagccggggttaagtctctatatggcggcagagcgaagatctcaagcattaacactgatagcttcattgcgtctaagaacgccccggagaacatgattcaggacggaaagcttatcaatgaatggaaaggcaatgtacaggttgaatacagtggtaatcatggcaaatacaacattatctatgatgctgttcccgcttctgactgttcaaagttgatagccgctgtatcaggaaactttgtgagcatagacgtttacaacgggaacggcggtacgcaggttaagaaccttgaagaagggaagaacattgatatagcggcaacatcagcagcgtgtttttcagaagataacgccaccattatttttgcttcaataatataa

SEQ ID NO: 384591 - DNA, 294 bp, Salmonella enterica
atgaaaaaagacataacaagagagttgaagcgtttaggtttacacaacggctatgagttcatagcaaaagcagcgttgatcgacggtgaaagggcagaagcaatattagcactgattgaacgcttaggaagacgcaaaatcattcctgatgctgttcagcatggttttaatcaagtcaaagctacatatcgtttaagtggctacatcaatcaggcactgactgttatagcgtttaaagcttacgtgaacgaaccaaaagagagctttaaagcagatatttactggaatatataa

SEQ ID NO: 384592 - DNA, 249 bp, Salmonella enterica
atgataaaaaaaccattagtattaaatagattgcgatatatgaatattatagctgtaatggttggttttattatgatgtcgatatgctatataacattttcattcatgtcagaagatagtttaaaggaaagtatagggtacatatttttacttttctgcggtagtttatatttaacacttacaggattatgtccaatagtaatgaatattttcaaaaaattgtttaaaacattgagggttcaaaaatga

SEQ ID NO: 384593 - DNA, 318 bp, Salmonella enterica
atgataaataaactcataaacagattaactataaataaaccattcaagttaataatctttgtattactggaggcaccaatattattactattattggggaatatacacaacgttccattatttggtttttttatgagcgctgcatttagcggagcatttacagacacaggtgataacttttatacaccaactaacttaataaatgatttttattctggttcaatgcatttctatttaatcatttcagttttaatagtagcaaagttgatacattcaagatatggcaagaagatagacgcatttttaagggggttataa

SEQ ID NO: 384594 - DNA, 381 bp, Salmonella enterica
gtgctgaaatactcaagcctacaagaatatttggatgacgttaaaagacgagaacaacataaaaagcgtcttgctgataagttgtttcataccgtccgttccggctcatcaaatgaaatacagacagtaataaaagcatgttctgatgctgatattgattttaaaaccatcaaacatgattacttgcttgaatactttgattccttctttaaccgcacgtcaaacaccccctcaattctcatcgtaagattacttatcagttatcaaaataaaatctctcataaagctgttttatctttctaccaaaacatattttataagcatttattatcagatgaagaactaacagagctgagttctttaattacttcttacaaataa

SEQ ID NO: 384595 - DNA, 402 bp, Salmonella enterica
atgggctttccatcaccggctgcagactacactgaaaaaccactctcactggatgcgttatgcatccataaaccccacgctacgtactttatgagggcgggacaggcatatttaagggctggcatacaaaagggcgctacgctcgttgtagacgcttctgttaagccttgtgatggaagcatagtgatagtggcgttaggtggggagttcgtagtgaaacggctaagacttcatccagctccggcgctgttgccattggactacacaggaaccccggtaccgatcgatctcgatgatatggacgagaacaacgctacccggattttcggcgttatgacgtattgtgtaaacgacatgcgaacaggcgagttcgacgacaccccatatggcatagacggctaa

SEQ ID NO: 384596 - DNA, 1047 bp, Salmonella enterica
atgaataacttaaaagaaaaaatagaaaaagctttagataaatgtgatgtggttgttgtatctggtgttagcggtgtaggtaaatcgactttgcttaaagagatagcaaaagaaagacatatacattattcaaatcctacttataactgtattaagttcggcattaaacacagcgatcttattgctattgatgatgtgagagaaacagaactaaaaaacgtgatacaaaagattcaggatgctgtagctaaaacaaacataaaaactaaagcgataatagtggttgataagtttgataagtctgttcttgatagcgttgtattgaaaataaagcattacagaatggtaaagccaaaatcaaaaggtgtcttaccaaaaataaaagagtatcaggagcttttaaaatcaatagaagaacaaagatttcttactgataatgttcagatctcatgtttgaacgatttgtatcaaatggaacaagaattgaagtatttgagagatttgaatgaaaagtatgaatgcgaagctgttttacatgaccataactatactcagttatctcttgatctcgatgatagcaaagcagagaatgaagagctaataaaagagaactacagcttacacttaaaaataaaagagcttaatgatatactttatgaccaaaacgaagaaaaaatagaacttgaaggttctaatcaggagttagagcagtctctttctcaatgctttaataaaattcaaacatatcaaaatacagtagctgtttttgaagataaaaccagacttcttgaaaaagctaataacgatcttgaatgtgaaatagattatcttaatgagaaagtgcattgccttaaagaagagttagataatgaagctgaggaaacagcattttttaaagaaatgtcagaagactttattactcagattaaatggttaaacaacacgattgaagtttatcgtggtgaagttgatgaagacaccatacgcagggttgaatacaccgtccaacagctcagagaaagtttcggtgatgattatgaggtctga

SEQ ID NO: 384597 - DNA, 471 bp, Salmonella enterica
atgtcatattggttgtatttttatacggttcgtagtcttgaagagagtaaatatgaaataaaaagaactacactaagaactaaacgggttgtttcagttattgctgaaatacaagatgctaaagaaataatatgtcaacaagaacaaataagagatttcatgatccattatcttcatcaaagagatattgaggtaaaggacagtgatgatttgagctttgttgttatggatgttgatcagtataacaaatcatcatgtagattttatatagtaaatgaagaggttcgttatcatgagttcataatggactatgaagaagctttaaagataatgcgcattgataaaaggatgaaatataaacttgaaaatatcttcaatgatacaaggaagcttcttccgttggagatctcagagttcaagaaagaagattttgataacatatcgaaagaagatttacaaaaactcatataa

SEQ ID NO: 384598 - DNA, 393 bp, Salmonella enterica
atgcaatataatgaaatagtaaaagctgaggttttaggttttgttttaaataatgtggaaggttttaatatctttgataacatccatataaaaatgatagatgttcatcatccgggttatgagggaataaatcgtgttcctttttttgaaatagattatagaaaaggatttactttagcaaatacctttaatcatattgatgatgaatacattaatcaaagaacgttgaactatgcccttaacttgtgttttaacagtgagatgagctttaagtatgaacacaacagatttataagtgaatgcttctcatgcacttattattgtatctttgaaaatatgtatagaacattatcagagaaggaaagcggtaaagtgagatggtggattgattga

SEQ ID NO: 384599 - DNA, 303 bp, Salmonella enterica
atgagtaaaggtagaaagaagttcaggccagtagattttcacagcaacaacttggggaataactacataacgatagaaagcatgttatcaacgccgtttcatgagcattcacctgaactgttcgcaaagtgtttagcagaagtcccaaagataaacaggctactcatagacaggcgtaagtgtgataacgaagagcattatcaaagggtattggtaatggctgatgtgtgtttaaaaatggcaatgattgaaagaagaatgaaaatagtgaacgaagaaaacagttggtttaatcaaaaataa

SEQ ID NO: 384600 - DNA, 1041 bp, Salmonella enterica
atgactgtatctaaaaaatccaaatctaatattcttcatcttgatattgatgctttcattgctaaagcacgtaatattattcatgaagtctaccataacaaaactattctctctgttcctgattaccagactaaaacagcagcaaacgatcaggactacatcaccaaaccacttactcccctttacgcatgggctggcggcaaacgtcgccttatcaaagcgtatcgcccctatatgccagattttaagcgtattcgatactacgcagagcctttctttggcgcaggcgctatgttctgtgaagttttcaatcagcaccgtgaacacatcagaagctaccacctgaacgacattaacccggagatcatcaacctactgaacaccattaaaaggaattgttccgggttcattgacgagctgaaggccattgaagaacgcaaccactataagacgctggacggtcaaaaacacttctactatcgcttacgtgaagaataccgttcattaccaataggggttgagttttcagtgagaggaacggctatgttctacttcctcttaaacaatatgttcaggggcttatacagtcagaaaaacgggcgaattttcacgtcattccagacgaataaaaatggttttgattatgaaaatatcaaaaactggtcaacagcattacagaaagcagtgatcacatgtggaagctatgaagacgttaaggttaataaaaatacgttcctgttttgtgatccgccttatcgtgattgctcgattatgtattcaacagattttaatgatgaacagcataagcaatgctacgcatgggttcagaaaaaagtagaagagaaaaaaactgtaggtatgttgtgtaataaaaacctgaatgacggtttctttagttcactaccaaccacaacagaaagcgaacatatcaatattgaatattcgcatacaaaggcaaggttaggcgcaaacagaagcattgttgagctactaatggtattcaaagaaaaaatggctgttcctgttcttaaagcagcttaa

SEQ ID NO: 384601 - DNA, 564 bp, Salmonella enterica
atgatagcggcattacttaaccagatacgtagcaccggctttgtgcttctctcccaatttgacgctgttttgtcttccccggctcctacgccggaagaacaggaacagaaagacgcttcattaaagatgcttctcccgctgttagagaagaaccatgatgaaagatacctgataacacgtttactcgattacagcgctcaggatctgttagcggtctacctgtcaggccgttcaggtagcatgaaagcgtatgcgcttctccagctcatacagaacacatccaaattgtggccgtcaggtttctatcatgctgttgcccgttccggcctacgcctgaatgacgagctggacacatcagggctaacccctatccagttagcagccaaaacaggaaacgtagagctgtttaaattgttgctattggatggggcagatctctatcagaagaacaaagacggtatgagtgcttatgatttggtgttgaacagcaataacgcagagctgttaatgttcatgatccgctatgaaaatgctgatatttcgaactaccgtcgaaaagcttga

SEQ ID NO: 384602 - DNA, 522 bp, Salmonella enterica
atgagaaaaggatttaacaaagggtttagtctcatagagctgttgttagttcttgccgttgctacaggcgtagtagcggctacgttctacgggtatagcaaggttcaggcgcataacagggtaaacagagctacgcatgatctggcgagtatcagtaaagcgatgaatgccatcctgacgacaaggccaacgatagctgaggctaacaccatgctaaccagctcaaaggctctaccgtcttctatgaccgatagaacaggctcgttcgttaacgcttacggaggaaagctcaccataaccgctcacagtggctcagatgacttctatgatgtttcctactacaacgtaccttctgatgcttgtatagagcttgtaagcgccagcaaagcgatttaccgcactataaccaacacttcctatagcccgaagataacagccgcttcaggcgtgagtgatatagcttcattctgttccgggtttacctctaccagctcagtgatggtctttactgacgcagcctga

SEQ ID NO: 384603 - DNA, 294 bp, Salmonella enterica
atgaaaaagcttctggcggtatgcgtgatcgggctggcctccttccttgctggctgtggtgatgatgggatttatggtagctacgtgaacaaacagtatggggtaaggctcgacgttcagaaggatgttatcaagtttcgagatggcgttttcaacgttaaagaatgggatgaaagcaaaaagcctgtatacattgctagaactgaaaacaaaaatttgggttcatggacgttcaaaatagaaaaggtaaaacagggcgtagtttatcagggcgcagtgtttgaaaaagattaa

SEQ ID NO: 384604 - DNA, 318 bp, Salmonella enterica
atgaaaaaatacatacaaactgaaagctacattgatcaacttcaaaccctcattatcttgaaaaacttcatgaatgaaagatatgaagaagaagactgtgagatcctttataccactgataatggttatccgtccgttgtgttttgtggtggtatttatgaagtaagcattatccctgttgatttaaacatagggcttgaaggagaggttatgtttatagcttctgtaggttatgaactggttaggttcccaagcttaatagacgctgttgaaagtttttattcatgtatcgatgaagcaataaaacaagcagcttaa

SEQ ID NO: 384605 - DNA, 303 bp, Salmonella enterica
atgaaaaagaaaaccatgattgaagaaatgagagaaagagcaaataaactttcaaatggtgaagccctcattttattagaccatattttaaaaagagaagggcaagaggcaatgattagtatcttcatgaatgaaatgcctcaaatcaaaagcaggataagttatggcggtttcaatctggaaggttgtagaaatatcaacactcagttagctaatgagctgatagcttatatagagcgtgaaaaactcatggtaatactggaatctaatctaaaagaaagtgccataaagaaacgattataa

SEQ ID NO: 384606 - DNA, 1035 bp, Salmonella enterica
atgaaaataaaaccagtaaacctcaacaaaacattaaagttattggaaggaacagaagcagaaaagccattcattgaagatatgttgttatacatggatcaggctaaagagtacgaagaaaagaaagtattacaaagcaacttatatgaagaacttaacagcagcttagtatatcgctataaaactattgttaacaatgcgccaagagaagatttgtccataattgccatttcaggtgaagaaaccattggttctaatgttgatgtttttcttgagaatacagcagttagatttaaagtcagggataagcttaacgaaagcggctattcagtagctgtaaaggttaaagacggtaaaacagttttagacgttgatatgaagcaagcgggctttacagcacttaaaacgctctctaacgagctggaagagcttaaaccgtgggtaaatgactacatggcaacactcaaagagcaagtgagtgatagcgttcaggctcaggctttacctgatacgatagaaccctataaaacatcatgggtagagcttccagaagaaagacgtattcttgttaaagttcatcctgaaaacatggcaacgtttaaatcaaagttttcttctcctaaatgggaaaaggatttaaaagcgtggcgcatatctaatcttcaaagcaataaagataaattgaatgattttagagatcttcttgaactaagaagaagacaagaacatgaaagcccaaaagaagttttatctaaagtcgatacagttatagatggtaaaccacattattatgagttatcacacaaagtagaacatgaaagtttaacaagtaagttcgatacattaacactcgatttaaaaagtgatgatggttcatatgatggggcatggcataaaaggattggttcgtttgagtttgaaaacctatccgataaaaatgaattaaataaaaaagctaaagagtttttaactcaggcaatggatttaagagataatgatttaaaaaataaatcaccgcttaaaatgaaaatgtga

SEQ ID NO: 384607 - DNA, 387 bp, Salmonella enterica
atgaaattaaataacccacttgaagttgcaactataacaacaaacattttagcgaattatgtttatcaggcaatatcagaccttgataaagaatacttaattaaatatgacaacgttgattatatcaaagattatttagataacactattgattctttaggaactgaccgtttttatagcagcgttctaaattctttctacggcatgaatcatgattatggtcatgactattttgatacagaagaagagttaaaagagtatgttttaaaagctaacttatatcttatcaatgactctttagctgttgatgatgtagcagatgaatatgatgcttgcgagcaggttttagaaatgcttgaagctgacagaaacgatagcgatgaataa

SEQ ID NO: 384608 - DNA, 261 bp, Salmonella enterica
atgaagaaaaatatactatatgaaatatccagagtatgtggatttataagtgtggttggttatatttacccattgttattggcatatctatatctaaaaacaaatagtgccgatgactataaatattttatttttactaaagcggatttgcaattatatatagatgattattttaaaattgaccaccctcgatttattttcgccatattctttggtttgttatctattacctttcatgttttacataggaaaacaaaatga

SEQ ID NO: 384609 - DNA, 258 bp, Salmonella enterica
atgaaactgaacaattacctgagcaagttctttgatgttgaagagaatgaagtggaaaacgatgaaggtgaaaaaatcccttctctatggctctatgagaaaggggaagactctgaacctgtagttatcctgaaacaaacagaaaagcccggagaatggcgcgtaggagatatttactcagctctaacgaatgatgcccggctatccgaagagcagatcaagaagctggcaaaagctggaatgattaccaaaaactaa

SEQ ID NO: 384610 - DNA, 183 bp, Salmonella enterica
atgtcctacctgaccataacagggagattatttttactccatctgacacgtcctgtcactcacgtatgctacaacatatcctataatacaatatactattatattatagtacgctgttatggctgttatcaggggggaatgctggagctggcgatcaagggaaagtaccaaattaccgggtaa

SEQ ID NO: 384611 - DNA, 381 bp, Salmonella enterica
gtggtacatccaattatatataacaacaaaatagatttggatttacttaaagagatactgattgatgataaagaaagtctgtatgttattgtcagagggggcggtgatttagaacacttcattcttaatgattttaaggtacaggcattgataagtgaatgtatgtataacattagatactcagaaagtgagttattaatagcagtaggacatgcctccgataaatttgaagatttctttgaaatggttccagatgcgtatgaagcattaacaccgactgatttagcttacaaaataaaaggcgatattattttaaatataagaaaaagaaaatgcggtattatgaccaattcatgtattagttataacgctaaaatataa

SEQ ID NO: 384612 - DNA, 378 bp, Salmonella enterica
atgaatatagatattatcggaagtttcaataaagaaaccgctattgattacagagtgttttatacaaccgactattttgaatggttaaaagacctacataaaacaaggggtgaaaagataacgcttaaagagctacacaataacttaataaaagaatatggttcattggttaatgttattgagttaatactcagaacagatagcaatattggaagtatcaaagaatcaacattcgaaataatcgatgctgacaacattctttttgaaggcagtgaagatttaatggctgttcgattagtgatgaacatagaatatttagacatgtggattaagaaatttgatttcaataactacataaccgaggcatttaaaaactaa

SEQ ID NO: 384613 - DNA, 270 bp, Salmonella enterica
atgataatagaagaagtaataattaatgacattaagattgttttatcgagaggtaagggtggaaaaggaggtgaaaacaatgaaacatataagttctatatttatatagtgaataaggatgtttcagtttacagggttggtaagctttcaatagtgatttggcagcattcgatttacacatcagataaagccttaattcaggaagctcaggatttagcaagcgcagtattcaaatataaaacagaaaaacttaaagaggtgattctatga

SEQ ID NO: 384614 - DNA, 336 bp, Salmonella enterica; identical to SEQ ID NO: 229052

SEQ ID NO: 384615 - DNA, 351 bp, Salmonella enterica; identical to SEQ ID NO: 229053

SEQ ID NO: 384616 - DNA, 561 bp, Salmonella enterica
atgtcaaaaaacaaaggaacagattacttttactttaaacccttccgttctggttctgttagctttccaagaccaaatgaagcaatctatgtaatagatgttttatcaagagatgatatagtttactttgatgattttggatatttgatttcagaaagagcgttggaggttttaaaaaaacataacttaacaggcgtaaaggtggataatgctactgttaaatttagcgcaaaacataacataagatacaaaaaccagacattacctaaattctaccgattaatacctactgagatagttgataacgaacttagagaaatgtttttggatgaaaactataatcttataatcaacaaaagaataaaagacattataacaaataaagatttaatgcgcttacagcgttcttattttgaagagattgaacttgaagatgtattagatgattatgaggatgaagctgaaacacctgtttataaaaacgaaaacaaatcatccctaaaacagatcattatcttcaccgttgttatggcgttagtcgcatatctattttttaaataa

SEQ ID NO: 384617 - DNA, 642 bp, Salmonella enterica
atgaaaaaaataagctttaaaaatacattaaaagaaatagtagctaaaaagtatgaatatgaaacagaggcaatgcattatcttatcagaaaaatgaagtctcttggttataacatgaatgctaaagaccctgtaattgctgcctttatattagatttgaaaaacattgaacttaacagaatcagaacatcagataaaaggtttagagcacatcaaataaaaaatgaacttgggttattatataatcatataaaaatactaaataaaacattaccaacaagaactattgaaatagatgaagagtatataaatgatactgaacaaaaggaaaacattatgaatacaatcaactttaacgacatataccaaacaataaaatccaaaaatgttaatgatgggtttttggctctaaattatcttttgagagatctaagtgttttaggttttgaaatagataggaaagattctactttagctttaacttatagtgatatttttgaaatgatggagctaaagagtaatgattttaaaatagatgatatacgtgagtatttagaatttatttataaacatattacaaaatccaaaaacatagaaacaaataaacagttagtaaggatatgggagctaaccaaagtataa

SEQ ID NO: 384618 - DNA, 336 bp, Salmonella enterica
atggaatactacgaatttgtagaaacctctgtgttcacgcgagagatgaaaactctactcagtgatgatgaatacaaagagtttcaaacgttcctcatcgagaacccggaggcgggtgatctgattgtaggaactggcggttgtcgcaaggttagatggtcacggcagggaacaggtaaaagttcaggtgtccgtgctatttactacttctacaacccggcagggcgcttatacatgcttatcatctatccaaagagtgagaaggatagtttgacagcagcagagaaaaaccagctcaaagcggttgtagcgggttttaaaggtgaagagggctaa

SEQ ID NO: 384619 - DNA, 291 bp, Salmonella enterica
atgcgtaaagagctttttgatgatctgattgcttctgctaaagaagctgtagaaatccatcagggtttacgtgagccagctcgcgtgacccgttttgaacgtccagatgtaaaagctatacgggctaaggttcatatgaaacaagatgattttgccagcctgatcggggttagctcttctcttgttcaatcatgggaacaagggttaagaactccggcaggtgcagcgttaaagctgttgcgtgtcatcgagcgtaaacctgaatttgttcaggaactacgtgaagcataa

SEQ ID NO: 384620 - DNA, 537 bp, Salmonella enterica
atgaagaaaaaagtaaaagaaaccttttcagctacttctcatgctcctgttaactttgttcctgaacatgaaatttataaaatgtttggcaacagcataaaaaatattaaagataaaactaattcaagaaaaataactttccatgacacttcttatatgactgaaacggcgcaaggtctttcaatcgtgtcagaagacagagcagcagcagcacaacgtttaactatgatggcagtagctaagggatggaatagcattacgtttgaaggtaatcaacttttcttagaacaagcttatgaagaagctactaaggcgggtttagtggtaaagcccacatcagaagagcaagctaagatttttagagaaacacatgaaaatcgtaagcttgataggataatgccttacggtggattaaaagaagatagaaaagtggatattgataaaagtattgaaaaccccggacatgatcatgaacaatcacctgttcctgttcaggctccagtttataccgcaagaataccaaccagaatgaaataa

SEQ ID NO: 384621 - DNA, 228 bp, Salmonella enterica
atgttagatttattcactgtattcacaaacaacactgtagctgctgtttttcttttcatcgtaagcattatcagcatggttatgattaaaaaaatggaagaaaggacttctactaccttcggtgtagctggttcagttgctcatgtatctcttttgatggtaagcactgttagcatgtctactctttgcttttctgtttacgctattggttcttcacttatagcttaa

SEQ ID NO: 384622 - DNA, 552 bp, Salmonella enterica
atgagtaagatattaaaaaaaggagtcgataaggttattgattctaaagctgttaaccttttaatgcctgttaaaaaatcgaaagacagaatagaggatgttttaaagtttaaaacaacaagaaaacttcttaaaatgagcaagcctaaaaaagccaactatgtccctttcgaaacattatgtgagaaaaatgatattgatgaaaaagaattatgtaagcgttataggataacatcaacatttgctttgataagtttgatagccctttttggttggctagtttatgctgttttctctttggtaagaggtgattacatttctgccatcagatgttcagcaacactattagcatgtatcggtatatatttttataacgtagtagatgcttactgttatagaacgagacagacgcattctaaactatcttttctgaattctttagaacacattataccaaatccttttcacgacttcgcacaagttagcgttgtagaaaaagatggaaaagtagtaaaaaagttaaacgcttttttactatcgaaaaatgattaa

SEQ ID NO: 384623 - DNA, 1005 bp, Salmonella enterica
  misc_feature (14)..(23): n is a, c, g, or t
atgacgcttattcnnnnnnnnnnaatgaatatgtttgtatctaatgataaagatatgaataatgtcaaagtagattatttttctgctaatccgatggttatttttagctcaatggggagtcgttttttagacattgctaatggtgcggcaataacagccacaacagcttctatagtctcagctataccgttttttggtaatgtgttaactacagtagcagctgcattcggtacagcattcagtatgatgttttgggcggttgttgtgccgggattatacctgagctactacgttcagatgataccgttcttcatgtttactacagcggttgtgatgtggttcgttctaatggcagaagctttgtttgcttctcagctttgggtaatgatgttcttaacagctacaggtgatgatttcgttggtgagcaaaaaccggggctaagtttattattctccctatatatgaggccagcgctatatataataggtctgataatagcaataacaatatcttatccaatattcggatttatcaatagagagtatgtgaatcttttagctaatacccctaatggtgatcattacttatgggcgcaaataggatatggatttggttatataatgattgttcatactatcatgatgaaaatctggcaacttccgcttgaacttccagaaaatattgaaaactggatgaacattagaggttcaggatctgtagcaagtcttaaaggtgctgctcaagaaaccatgagcggaacaaatgctatttctaaaggtgctttacctgctgctgccggaacattgacggcgggtaataagataatagaagacgttagagcaggaactaaacaaaaacaaatagctgaattacaagcaagggcaagagctaatgctaatacaagttctgctggaaatggtgatgatgaatcgagtaataaaacaagttcacctaagccaactgatggcggtcaagatattacaagtttcaactctgacaaataa

SEQ ID NO: 384624 - DNA, 1269 bp, Salmonella enterica
  misc_feature (1239)..(1248): n is a, c, g, or t
atgttgtttgttaattttgcgtacgctaccgaattcggtaatccaatggctgatagttatgccactaagtacggattgccattatttgatgcggacacatctccattttcaatcgtgttatacttatttaacttagcaactttatttgttgctgctttaatatttttatataacgctgttataggaacggtatctactgctcatgatggacagatcttaggtaaaaaatggtcttctatgatgatgcctattcgattttcattagcaattgtttttatgatgccagtagctggagatggtggaggttttagcgcaatacaaaagataatatatgaagctggtcgtcaaggttcaggtatagcagatgcgatttgggcggcttacgttcctacagcattaaacggaaattcatatattccgccagaaacatctgaaaagataaaagaactattgaaaaacacagttcaaagctcagtttgtgtagctcaagcgaataaaacaataaataagtcaataaacggcatgacagcaaaactatttcctgagtataagcaaatgaatgattcaacgagatttggctataagtcttttactaaagctgaaagtgatggtcgtagaatagttggttataattggggaagaataacagcgccaaatgatatattcaagccatatacttatgatgcttgcggaacaacacagttagtttttgatacccctaactttgatccagacacaaactcaacaatattagtagatttaaagaaattagctgcggaaatgcaaaacattcaaataaaacagatggatgatttagttaaagaagctgatgttatcggaaaaagaatagtaaatgagaatacttatactaaagatgatgctttagcggatatgaaaagaatatcagagaagtattcaacagctttaaaagaagctgcgaaagagcaatttgctaaggtatcattaactaaaggcgtggtaatggctcaaaaagacggatggatgggagcaggatcatgggctttaagaattaacgacacagtgagttctgctaatagcatagtaaataatacccctacatctcagtttggtaatattgacaggaacaacatatttattagagcttttgatggtggcatatttgtacaggctggggcggcggctgcactatttgatagtgctttaagacaagatcctgattctccaaaatcccgaactggttcgaatgacgcttattcnnnnnnnnnnaatgaatatgtttgtatctaa

SEQ ID NO: 384625 - DNA, 837 bp, Salmonella enterica
atggcaaaagttaactttttcgataagcgtatacttaaaaaattttcagactacacatcaactataagtaccatattttcactttttttgatttttgtagacattccaacagaaaacaaactaacacttggcattatatttttaattattttgttcttgttgtatttcggcatatggtttaaatcaaataatctttcggaagttaatttagatgttgagggcagtattgttactgtaaaagcaggtgatttattcagacaagatggattcaaggtcattgcttttaatgaatattttgacacgcaagttgatgatgttgtcatttctcataactcacttaatggattatatattgataactatttagcagggtccgtatctgatttgaatcatcgtatttctaatcatcagtttgaagaagatgaacggcttgagatcaaccataaaagaaaagagggtaaaacacaaaaatattcgctaggaactatctttgttaataatgattatctattaactgcattttcaaaatttgacgataaaaatagagcttttcttacaatgccggattacttagcatttttaataaatttttgggacaaagttaatcgtatatatgcacaaaaaagtgtctctgttcctatctttggctctggaatcaccagaataaaggaacataaaaatattagcgatgaggatttacttaaaataatgttatggacttttagaataagtgaaatgagatttaaatttccggcaaaacttactatcgttatccacaaagataagatagataaaataaacttattggatataaaatcagcgagaaatggtctttag

SEQ ID NO: 384626 - DNA, 510 bp, Salmonella enterica
atgagttatcgtaataagacatatgtggcttttgcaagtgaagatataaagctttatcgtctaatggaagcatggaaagcaaatgaaaacatagactttaacttttttgatgctcatgatctctttatttcaagggatacaagtaagcctgaaaccataaagcgaaacctccgcgaaaggatgaaaaatgctaaacaagtagtactgttgggaagtagtaatactaagagaaaaggtagcgatggagtatcgtttcttgcccatgaaatagatcttatcgtagaatttaaccttcctgttgtaatagctaatttagacggagatagaacagtcgataagaacttcattcctaaaccgcttttagattcagagcattatacagtgtctgtttccttccaacctaaaattattaaatatgcattagataattactgtgttaactattattcaagttcaaatagtggtagttatctataccctgcatctgtttatactaagttaggtctgtaa

SEQ ID NO: 384627 - DNA, 651 bp, Salmonella enterica
gtggccgtattcgcccttcagtatcccggcggtttccttcgcgatggttttgtagcgctcgccggtcaggacgttgagcaccgcctgggtgccgacaatctgcgaggtcggggtcaccagcgggataaagccgaggtcctcgcgcacgcgggggatttccgccagcacctggtcgagtttgtccgccgcgttctgctgcttcagctggctttccaggttggtgagcattccgcccggtacctgggccaccagaatacggctgtcgtagcccttcagctggccttcaaaggcgtgatactttttgcgcacctcgcggaagtacgcggcgatgttttccagcttcaggatatccagcccggtgtcatacccggttccggcgagcgtcgccaccagtgcttcggtggccgggtggccgtaggtggcgctcatggaggaaatcgccgtgtccacgccgtcgacacccgcctcgatagccttcagcagggccatctccgccatcccggtggtggcgtgacagtgcaggtgcaggcgcacctcaaaacgttttttgatttcgctgaccagctcatacgccgccatcggtgtaagaatgccggacatatccttgatggcaatcgagtcaacgccggtttccagcagttgctctgttaa

SEQ ID NO: 384628 - DNA, 1191 bp, Salmonella enterica
atggaagttttccaaaaacacatcgaaagagagttaaagaatgcgggttataattatccgttcacaatggttagtgtttgtaaaagatataaagatgctgataaagcagaagcagtaagaaaagttcatactgatttacctaaagctatagatacctataaagaaagctttgttgattcaacaaagcttgaacttgatccagaacataaacaccatgctattttaaataaatacaatactaatatcaagacaaaacaaaatcaggctgctgatttacttgctcaacttgaaaagcttgaacgtgatattaatgttatggaagcggctaaagctgctgaaatagaaaacttatctcttactgttgaagtaaaaggtttaacagctaaagtatcggaactgactgaacaaacttcattaaaagatgaagagatcaatcaactcaaggaagatcttgaaaaagaaataaaggaaaaagaagagttcgttgataaaaacaatgaattgtattttaaaaacactgaacttgaaaaggaaaaagaagagttagcgaaagaggttaaaacgcttgaagacgaaaatatagcgttagaaaaagagaataccactcttactgaaaaagtttctgctcttgaagagaaaaacactaaacttgaagaagaattggaaactcttgatgctaatactacgcgagagattaataatttaaaaggtcaggttgaatctcttaatggtcaacttgagcaaaaagatattactcatgctgctgataaagaagctgctttagcagagttgagaaaagaacttagtgaagcgtttgaaactgaaaaacaggaagctttagctaaacttcgtgaagagttaacggctcagtttaaagtggataatgaaaaagcgcttgaagctcagaaaaccacgcttgaagctggatttacatctgaaaaaactcaagcattgaatgagcttagagaagaacttaacaaaatctttggtgtgaaagaaaacgagtataaagaagtaattaaaggtcttagaacggaatctgctgaaaactttgagttagcaaacacctatagccaaaaaatgcgcacgttcttacaagaaaacactgatcttgttgaagagaatcgtaagcttaaaaagcaaatcgaggattttaataacgggaatgaaaatagaccaaaaaataaataa

SEQ ID NO: 384629 - DNA, 612 bp, Salmonella enterica
atggaactatattttaacaacatgaggaaagcttatgatacgttgatttctgctatcagaacagatgaaatggtacaggctgtcattaaaagacaagacagccttgtcaaaatcatggaaaaagcttcttcggtttttcaggaacaacaacttacgggtaaaaaaagaatacttcaaaatgataatgacttagctttaacgatagcaaatattggtgttgaaactaactttaaagagataaattactatagaaatcttgtttcagatactttgctttttaatcttggaatgaaacttatcttttctgaaatagaacagagatatgatactctttttggttcattacgctcttatgaaaaaggtgattttgagtttcattataaagtttataaaacaataactgatgatcaaagaagctatttaagagacgttagcggtaattctttaagtatacttgaaatgtatttagataaaacgaaaaccaaaagagaatacagcaaagataaaatagagttagctcttagcagagtatataacgctttatgtgtctattatggttatcagctctatgatacacgattaaaaagagagggaagttatgaatatgaataa

SEQ ID NO: 384630 - DNA, 603 bp, Salmonella enterica
  misc_feature (33)..(42): n is a, c, g, or t
atgtttgctatgagtgtgttcaatttgaagggnnnnnnnnnnctgtgcggctattttgcttccaaaggtcagtcaacaacgttagtagactttgacccacagggaggttcacttacatgtgcagcctttgcgatgaagaacggtaaacctctaccgtttgaagtgacccgtaaaccgaaggtagcaaccgacttcatgatctttgaccatgctcccggagtggatagcggcggtcagttagcgccgttagtattggtaccgactatcctcgatgcttccagctattcaaccactctaaagagcattgataacctgaaagaaatgaacaagccttttatccttgttccaaaccgggttgaagttcagaacaaagagcaaatggctctcttgaagaaacttgaaacgtattcagaaaatcttggctattcacagccctacatccgtaagcgtgttgcgtatccacgcgcctatggtaacgggatcactatctttgatgagaaggccgcattaccgaacatcactgatgcccggaatgagtttgctcacctgatcgaaatcatcaaactgaaaatcaaagaacaggctgaagccaaaaagaaatga

SEQ ID NO: 384631 - DNA, 396 bp, Salmonella enterica
atgacagatactaagaaagacaaaacagaaaaaaacgctaaaaagggtgcggcttggctcgataactttgatgattttcagaatgtctcgctggaaacctcttttgctaaagataatggcacatactggagctatcgtacagaaagcttaggtgatattcaggccgggactacgccctatgtccgttctacggtcaaagtcactaagcatgatgatgctcgtttgattaacgtccgtattcctgctgcgctggaagagaaactaaaagaagtttcttttgatattcctatcccaactcttcttttaatttgtgccgattatttaactgatgaactcattaaagaaaacaaacaaatattagcacttccaaaagaaagcgatgaacggaagatataa

SEQ ID NO: 384632 - DNA, 570 bp, Salmonella enterica
atggcagattatttgttgttcaatagagatgttattttagaacaaaaattgctaacaaatgatagaactgatttaataaatgaaaaacttaatgagctagccaagaccgatgaatggctcaaaaggagctggttcggtagggttcatattgaggaattgattcgaaagcaccctgagtcagatgctttcagaaaaaagataatggattatgcttatagaaatataaaagatcttgtggccaccgccaatagacaaattagagcaacaaaggaatctttaaatattcctagagcagtcggtggacttgttattcttaatgaatcgataatgccttatgaatctgaaaatgtaataacagaacttaatttccttgttgagaatccacattatgaacatgttgattttgtgctctatatatcagagttacgtagatcaacacataatatgattgatatttcagcaatgataaaaagtaaatcctctagatatgagtttgtaaactggtatataaaaaacgtattctcattcgatttcgcttcattttttaatcaccccatacagtttttataa

SEQ ID NO: 384633 - DNA, 126 bp, Salmonella enterica
atgcttgaggcgggtgcaacggttgttgctactgaggttggggctgaaggtattgaaagccataaaaagcttcacattgttaataaaacacaatttggtaaaaaaatacttgagcttttggactaa

SEQ ID NO: 384634 - DNA, 687 bp, Salmonella enterica
atgattagttctaaggttttatattcatacgaaaggaatgatattaaaatatcatgcggattgtataacgaaaaaacatccgctaaagaaaaaggtatcggtagagccgggtattatgacgcattaactggagagcttattgaagctgaaactcttgaagatgttattaaaataattgctcttccagaagttgttgctgaatacaatgagcatggagatttaattcgttctttacctgccgatattgaacaagtcgttcgtaatgagcttttgttttccgatgaaaaaataaaacagattaaaatcggtgaacgcgatggtaaaaaaataattgaaaagtatcaaaaagaagagaaaaaatataatgaatatcttgaaagggtagagaaatacaaagaagacccaaacaagaacccattaccttctacggctgtagcaccgccaaaggttcctgagccattcatttacacgaactcttacaaagatgtctcatcgaaaaatccagatgccgcaatagaatgctaccaaatcattcttaatcttgaacatgttcctgttgaagaagtagaagctgtatggaaagtagcaactcatgcgatggcgcatgataactatgtatatgattatcctcaaggcggtagtaatacctgtctcttatacacatctccgagcccacgagactcctga

SEQ ID NO: 384635 - DNA, 669 bp, Salmonella enterica
atggatatttcactcactaatttaattgagttggttaaaaaggttaaccgtaataaggtacctactcctatgtctgccgaggaaataagtcgtctgcgagtgcgtaagtatcgcgatccgcaaaatacggaaaccactgatttacctgaaagcctgaaggcgctactggcctacgaccgcgatctacttagcaattataatatgcctgtgattgaaacattacaaagatctattgataaagagggagtaattcattcttactcccctgatgaagaggcgtattacggcgttggcatggatagctcaggtattgatattgaagatctgatgcctgtctggagtaacgatccccgtcttccggcattaattcgtatcgatcatgtcggcgatcaggccatttttatctatatcacagaacgggatgccaacggcgaataccctattgcccgcatggaacgtaatgaattctggctggcggagtcttctctggtggaatatctctataatattatttcgggcgctaaagacattggctttaccgaagaggatttacatcttccgcaatggaaggcacagcaaaaaatgaatgaacaacgcgatgccgctttacttgacctggaggattatcatgaggcgttttgggcaaaactggacgcgctcgtcgattaa

SEQ ID NO: 384636 - DNA, 615 bp, Salmonella enterica
atgattaaccggagccgccgtactggccttgtcatacgccgcctttaccgcgctcggcgtcgccgcctccgtcgtactggtgctgtcggtggcgttattaagcttcacgatccctttttgcgtcagcgtaccgtccggggtgccggtgatctgcccccaggcgtgagtatggctggccggggccgccgcactcgccttatccatcgccgcctttaccgcactgggcgttgccgcttctgtggtactggtgctgtccgtcgcgctgttaagtttcacgatccctttttgcgtcagcgtgccgtccgggacgccgataatctggttccagacgtgagtatggttcgccggagctgccgcattcgccttatccatcgccgccttgactgcactcggcgttgccgcttctgttgtgctggtgctgtccgtcgcactgttaagcttaacaatccccttttgcgtcagcgtaccgtccggaacgccagtgatctggttccaggtatgcgtgtgattacgcgcttccgccatcgccgctttcaccgcctttggcgtagccgctttggtttcgtcatcgctgtcagtggcgttactgagctgcgtaaagcctttctgcgttaa

SEQ ID NO: 384637 - DNA, 318 bp, Salmonella enterica
atggtaagtgatactcttgaacagcggatttatgaactggtaagaagccatgatggaatttacctttttaagaaaaaagaactgacaccgtcaacagatttggattcagatctacggttggaagatgatgaagcactggaattgatggatgatttttttacgacattcaatgtagataaagggaatttctcgctcacaacatactatccgccagaaccaccgctaaagcatttgcttaatccgtttcgcaaaaacgatattcctcaggtgccggagttcacgataggtatgctcattgcgtctgccagagctggttga

SEQ ID NO: 384638 - DNA, 381 bp, Salmonella enterica
atgaatatcaaacaactacattccttcctgatattgtgtgatgaattacattatggtcgggcagccagtcgcctgtttatcactcagccatcattaagtcagcaaatcaaacaacttgagtcatcacttaaaacaatattatttaagcgaaaaggtagaggaattaaattaacaaaagcaggcattattttgcaacgacacgctaacaaaataatgctggatttaaaaaatgcagaaaatgaacttcttccctatcaggaccaacagcgcgatactatttcaatcggcgtgtcaggcagctacctggtcctgcccgcttttcgcaactttatggcgcactgtcaaagcaagtttaaaatgtcacctctttgtgcaagatag

SEQ ID NO: 384639 - DNA, 738 bp, Salmonella enterica; identical to SEQ ID NO: 199337

SEQ ID NO: 384640 - DNA, 456 bp, Salmonella enterica
atgatggccgccgattcgctgcactttgccgcgcctctcatcgtgccatcgggcatgtcgttctactgttcgtcgccgtgtcgtcgcgcgtgcagtgcgggtgcattcgcaccgcacgtcgcgcagcatccggcgcagccgtccaacgttcaggcgtcttgcctcgaacgcgcccggcctgcggccattggcgctttcgccggcgcgctgtctgttcacgcagcagcgccgccgggccgccgttgcctggagcgacagcgaagggcaaaggcggaaggcaagacaaaaggacgcggcacctggccgcgtcgaaagccagtcagcacatggggggaacgcggcacggagcggcttcgccaccgtgccgcgtttggcgcgagggtcgcgccaatgctggcatgtccgcgtgcttcgcacgacaggacacgcccaagcttgcggggagcgcagccatga

SEQ ID NO: 384641 - DNA, 600 bp, Salmonella enterica; identical to SEQ ID NO: 199320

SEQ ID NO: 384642 - DNA, 744 bp, Salmonella enterica; identical to SEQ ID NO: 199449

SEQ ID NO: 384643 - DNA, 588 bp, Salmonella enterica; identical to SEQ ID NO: 199429

SEQ ID NO: 384644 - DNA, 828 bp, Salmonella enterica; identical to SEQ ID NO: 117483

SEQ ID NO: 384645 - DNA, 276 bp, Salmonella enterica; identical to SEQ ID NO: 36785

SEQ ID NO: 384646 - DNA, 876 bp, Salmonella enterica; identical to SEQ ID NO: 199533

SEQ ID NO: 384647 - DNA, 987 bp, Salmonella enterica
atgaaacaaaaaattagctcgacatcatttattggtaaacaaatggattttttctctatattcgattttgaagaagaggaaaatgaaataatacccatagttgagtctccgcttgaatatataaataatgcaatagcccaaaagcaaagcatgcaatcagaagaaaaacattctgtcccggaactggtgcctcatgtgtcggatgatgttgcattgctaggtcattgttccaaattactcaacaatcaaattctgcatggaattagttttgcttctgaaactgattatctcttcactttagaagaatacaatgcagaattaggtggtctggttatcgactgggctcctgaagatgtatatcagttatacgtcgtcgcaatggaagagtcgttggaaaacgttaaatatcttgtctttacaaaatcactctatacaactgatgaattcggaaatatcaaagtgaatccgcttcttgaagcagaaacacgttggtatatgtcgcagtcatttgagcttacatgtgccactcatggtatagatgctattgagtttaggtcagagcttaaaaaaagcttgtatgaatacacgcacagttttgaaagtgaaaatgttaaattatctcaatatcatcaggataaagagattattttgcatgattgtaaagaagatatgggatgggatatctttttcgaccgtgactatttattggcagaaaataaactggcagtaaaatggactgatcgggatataatggatgtctattctaaagcatttaaatcaacaattaatttgtttgaaaaacttgtcgtaaataacaagttaacattaagggatacatcaggttgggttatcgtaaaccctacatttgagcgccagttcgaatggattgaatctgaagtattcgaaattgtagggactcatcttggttacaacgttgatgctatcagaaaacagatggttacagcgtgtaagatgaccttcaactaa

SEQ ID NO: 384648 - DNA, 585 bp, Salmonella enterica
gtggagggggatgaaacacaggacttttatcaggaacaactgataatcgatttggccgatgaagctatgaaggtttatgcaaaaatcagtaaaaatgataatttgcgttccagcacgattgaccgattaaaacagatgcaagataaaatcattagctttatgttcattcataaagaggcggttgttcttgcagaagctatcaagcacgtcatgaataatttacccaaaggcgccatttcttctccccgtgatgttgcggtgttaaagcaatggttctatttcatgagtgatgcgtcaatgctgaaacgtattatttctggtgagcagaaagtaacagattggctggattccattacccggtcattcaatattgattcacaggataatacggctaactctcagaatgcttttgaggatgatgttttttcttcagcaaatgtgttcagagaagatccgcttgaagaagttgagaaaaacgcagtaactgcacctttgtctgctgttgtccctgaagaagatgtttcccttcaggccagtggtagtaatagtgcttttaacagcgaactcgaactgaacggctggtga

SEQ ID NO: 384649 - DNA, 639 bp, Salmonella enterica; identical to SEQ ID NO: 248005

SEQ ID NO: 384650 - DNA, 846 bp, Salmonella enterica; identical to SEQ ID NO: 117492

SEQ ID NO: 384651 - DNA, 285 bp, Salmonella enterica; identical to SEQ ID NO: 117491

SEQ ID NO: 384652 - DNA, 315 bp, Salmonella enterica; identical to SEQ ID NO: 199651

SEQ ID NO: 384653 - DNA, 285 bp, Salmonella enterica
atgcgacccgctcccttgcggcctgccgccgctgctgtcgctgcgcctgcgcagccccaacgctacctgaccaacgacgaagccgccgactacctgcggctgtcgccgcgcacgctggagaaacagcgcgtgatcggcggcggccccaagttccgcaagttcggccgccgcgtcatgtacgcggtgtccgacctcgatgcctgggccgaccagcgcagctacgaggcgacttccgacccggaatatgccgaacgccacgcgggcgattaccgtgatggccgctga

SEQ ID NO: 384654 - DNA, 843 bp, Salmonella enterica; identical to SEQ ID NO: 161439

SEQ ID NO: 384655 - DNA, 639 bp, Salmonella enterica
atgatcctcgctctgctcaaccagaaaggcggtgtcggcaagaccacgctcgccacgcacatcgcgggcgaactggcgatgcgcggccagcatgtcgtcctgctcgatgccgacccgcagggttcatccctggactggacgcagcgcagaagccagcaaggcttgccacggctgttcagcgccgtgggcctcgcacgcgaaacgctgcatcaggaagcgccagaactcgccaggcgggccgatcacatcatcatcgacgggccgccgcgcatcgccgccttggcgcgctccgcgctgctggcggccgagcgcgtgctgatcccggtgcagcccagcccctacgacctctgggccagctcggaaatggtttcgctgatccgcgaggcgcaggtgttccggccgctgctccgcgcggccttcgtcatcaaccggcgcgtcagcaccaccatcatcgggcgcgaggcgcggcaatcgctcgccgaacagccgctgcccgcgctgcgctcggaggtgcatcagcgcatcgtcttcgccgacagcgtggccgctggccggctcgcacgcgagacagcgcccgacagtgccgccgcccgcgaaatcaccgccctggtggacgaactgctgcggtggccgacatga

SEQ ID NO: 384656 - DNA, 399 bp, Salmonella enterica; identical to SEQ ID NO: 119662

SEQ ID NO: 384657 - DNA, 564 bp, Salmonella enterica
atggtttccggggtcgtacaaacgatggggaatatttccaccagctcgaaaaaaatctcggaaattaccgccgtcattaacagtatcgctttccagaccaacattctggcgctgaacgcggcggtcgaggcggcacgcgccggggaacaaggacgcggttttgcggtggtcgccagtgaggttcgtaccctcgccagtcgcagcgcgcaggcggcaaaagagattgaaggcttgatcggcgcatcggtcagcctgattgaacaaggctctgaagaggttatcgctgcggggagcaccatgaatgagattgtggatgccgtcaaacgcgtcaccgatattatgctcgatatcgcggcagcctctgatgagcaaagtcgcggtattgttcaggtcagtcaggcgatttctgagatggacagggttacgcaacaaaacgcgtcgctggtcgaagaggcgtccgcggcggcggcttcgcttgaagaacaggccgcccgcttgacgcaagccgttgatgcgtttcatttacaggatactggcgcgacgatgcgatcatccttcctttaa

SEQ ID NO: 384658 - DNA, 276 bp, Salmonella enterica; identical to SEQ ID NO: 101078

SEQ ID NO: 384659 - DNA, 1251 bp, Salmonella enterica
atgttaccgattctgaccggcaacgtcggcattcatggcggtaatagcggcgcacgcgaatccacttacaccattaccattgaacgtctgccggtcctggagaatcccgttaaaaccgccatctcctgctttagctggacggacgccattgcgcgcggcccggaaatgaccgccctgcgcgacggcgtacgcggcaaagataagctggatgtcccgatcaaatttctatggaactacgctggcaacaccctgattaatcagcattcggatattaataaaacccatgaaattcttcaggatgaagcaaaatgcgaaatgattgtggtcatcgacaattttatgacctcttccgcgaagtacgccgatattttactgccggatctcatgaccgtcgaacaggaagatatcatccccaatgattacgctggcaatatgggatatctgatttttatccaaccggcgacgacgcctaagttcgagcgcaagcccatctactgggtactcagcgaaatcgccagacgcctcggcgacgatgtatatcagcggtttaccgaaggccgtacccaggcgcaatggctgcaatatctgtacgccaaaatgcaggcaagagatccggcattgcccgcgtatgacgagctgaaaaaaatgggcatctataaacgcaaagatcccaacggccattttgtcgcctataaaaaatttcgtgaagatccgcaggccaatccgttaaaaacaccgtccggtaaaatcgaaatctactcaagcaaactcgctcacatcgccagtacctgggagctggcggaaggcgacgtgataagcccactgccgatttatacccctacttttgaaggatgggacgatccgaaacggagcaccttcccgctacagctgtttggctttcactataaatcccgtacccattcaagctacggcaatattgatgttctgcaggccgcctgtcgccaggaggtgtggataaatccgcttgatgcgcaaaaacgcggtatcgcgaatggcgatagggttcgcgtctttaacgatcgtggagaggtgcgtctacccgccaaggtcacgccgcgtattctgccgggcgtcagcgcgatgggtcagggcgcatggcataatgcggatatggctggcgataaaattgaccacggcgcctgcatcaatacgctcacgacgctgcgtccttcccccctggcaaaagggaatcctcaacatacaaatctggtggaaatcgaaaaaatctaa

SEQ ID NO: 384660 - DNA, 222 bp, Salmonella enterica
atggctgacgatcagcaggttctggcaatcgctaaacgcgtcgagtcgcgagataaagcgctctacgcgccgggtaaaagcctgaaaaccctcgccattggtcggaaccgcattctgccagtccgtacactaggcggcatagctttcggcatcttcatgggtgaggtcgcggtgatggcgcatttcccagtcgccaaagtacatctcattaagctcaggtaa

SEQ ID NO: 384661 - DNA, 237 bp, Salmonella enterica
atgaaaaaagttctggttttatgcggaggattctctaaagaaagagatatctccatggttacggggagagcttgtgctgccgcgcttaaagatgctgggtatgacgcttatataatagatgtagacagaacgttacctgaaaaattaaggcaaataaacccggatgtttgctttaacgctttacatggtccttatggggaagacggctctgtccagggctggaatatcagcaggtaa

SEQ ID NO: 384662 - DNA, 564 bp, Salmonella enterica
atgcgtgaggacgacctgtctcatattgatcgacaggatattgtcctgcttccggctgatgctgcttgtcagggtgccatcctggcggcgaaacaggccgggtataccccccttctgctctcaaattgttttgaaggtgaaagcagtgctctcggtcgtaactttgtggcaatcgctaaacagatcctacaggatggtcatcccgtatccagaccatgctgtgttattggtggaggagaaacgacggtattaatctcatcaggatttaaaggcgaaggtggacctaatcaggaatttgcgctgagtgctgcggcagacatgcagggaatgaaaggtctggttgtgttggggctggatactgacggtaccgatggacccacaccctatgccggggggttagttgatggctatacatttgaaagagccagcagcaatcaatgcaaaccgatggattgtctgaaaaatcatgatgtatctcaggctctgattgcggctaaagatattgtggtttctggtaatacaggaacaaacgtgaatgatttaaaattaatgctaattcagtaa

SEQ ID NO: 384663 - DNA, 420 bp, Salmonella enterica
atgaagaaatctctattcagtatcatcctgctggctaccacgtaccaagcaagcgccgaaccttgcatggtgatctttgaacatggtcagttaattacgttacctgcggctatcacacaggctgaccaggtgaaaggtatgtcaggtgaaaatcacagcaccggcttaatcctcgcatggaaaacagcagaaccccgcgcggtctggatgaaagatacgccaactccacttacagccgcgttcatcggtgctgatggtgttatccagagtattcaggatatgcagcccaacagcgacacagcgcattcatcactacatcccacgatagcaatcatcgagatgagaacggaaaaatttaaacagttcaggctatccaaaggagacaaaatcatatccagccaatgtttccccctcaaataa

SEQ ID NO: 384664 - DNA, 183 bp, Salmonella enterica; identical to SEQ ID NO: 22499

SEQ ID NO: 384665 - DNA, 885 bp, Salmonella enterica
gtgacagacaaaccattaccagcgaagcaaataaaaacggtaaacaccggcatcgcaattaaagagaatcccccaaaaggggatgatatggcgtttactcactcgatattgtgtcaggttggcctaccccgttctaaggtggatggccgcgagtttatgaggaaatcaggcgatgcctggctggtcgtccaagctggctggcttgatgaagggagcgggcctgtagaacaaccgatcccctatggttcgatgcctcgtttagcgctcgcatgggtatcctcttatgctctccgcaaaaagacccgcgaaataccgatcggtaagagtgcaaacgaatttctgcaattaatgggcttatcaggtggcggcagacaatacaaaacgttgcgcgaacaaatgcacgcgctggccgcttgccggttgcagctcggatttaaaggacgttctttcaacggtcagcccgtagaacaattcgatgcctggcagaaagacgaccaaagcggccagctaagtttatggccgggcgtgatgaccctatcagaagggtatttcaatgggctaattgatagcgccgttcctctcgataaccgcgctctgtacgcgctaaaaggctcggcattgtcgttagatgtttatacgtggctggcacatcgtttacaccgcatcgagggccgcccgattaaacttcactggatgaatttacgggaacagttcgcccaagagtacatgggtaaagaccctgacaaggatttcaaaaagaaatttcttccagctctgcgcgaagttctgaccgtatacccacaggcgaaggtagaaaaagttaccgggggaatattactttacccttccccgcccccgatcccattcaaggaagcaaaaaaatag

SEQ ID NO: 384666 - DNA, 585 bp, Salmonella enterica; identical to SEQ ID NO: 97918

SEQ ID NO: 384667 - DNA, 207 bp, Salmonella enterica
gtgtttggccttatgtttcacatcatgtttgggattgttttcatagtgatgagtgtggcttctttggttgggcttgttttacacggccatgaatacacgccgggacactttgggaatatgaccgcattgtgtatcgcatcgactctggcatgggtttgggcgctttcagcagcgaaagaagcctggtacatcctgaagagtcgctaa

SEQ ID NO: 384668 - DNA, 246 bp, Salmonella enterica
atgactcaagtaataattaaaaaatggggtaatagtccgtctgttcgtcttccttctgcgattgtgaaagccgcttcgttaaacgttgatgatgtagtggagctgtcagtagaggacggcgcaattaccatcgttcctgttaaaacgaaggagtattcactggatgcgttgatggccggtgttactaacgaaaatattcatgaggaaatctctttcggatctcctgtgggtaaagaacttttataa

SEQ ID NO: 384669 - DNA, 258 bp, Salmonella enterica; identical to SEQ ID NO: 76875

SEQ ID NO: 384670 - DNA, 327 bp, Salmonella enterica; identical to SEQ ID NO: 163672

SEQ ID NO: 384671 - DNA, 438 bp, Salmonella enterica; identical to SEQ ID NO: 21469

SEQ ID NO: 384672 - DNA, 402 bp, Salmonella enterica; identical to SEQ ID NO: 76872

SEQ ID NO: 384673 - DNA, 654 bp, Salmonella enterica; identical to SEQ ID NO: 226698

SEQ ID NO: 384674 - DNA, 315 bp, Salmonella enterica; identical to SEQ ID NO: 76870

SEQ ID NO: 384675 - DNA, 318 bp, Salmonella enterica; identical to SEQ ID NO: 21468

SEQ ID NO: 384676 - DNA, 438 bp, Salmonella enterica
atgagtaaaattattgattttcctaccggaaaaaagagggagaaaagggccaaagcgatccgagcgcgtcgtaataaagaagcgcagcagcggagcgaaataaccccctcccaattttggtgggttaagaaaataaagttactcaccgtgattaaacagtcggcacgttttctcttaatatatttagggttattaactgccgacatccttatctatctcctttttattctaggaaaactcctaaaattatttacgatgattggtatcatcgcggtgcttctgtttctggtcgtggaatataggaatgattggcattatacgcaatctgcattccatgccgcagcaatatttgttggcctgatcgccctgcgcatcgggcatgacaaactactgaatggcctaataaggcttaaatcctatctatccagaaaagggtga

SEQ ID NO: 384677 - DNA, 741 bp, Salmonella enterica
atgaagcaggttgttgcccttttcccactgttgattgctggccttttggatgccacacccgcaaatgcggaactgtcagcgccggttatggctctggcaaaacgttgtgcgccagaagtgcatcctttaactattgggtacctagttagccatgaatcgcgcaacaacccatacgcgataaacgtcaacgttcctaaaggaacaaaatcaccgttagccagacaaccgcgctccctggatgaagctgttaaaacgacaaaatggctaacggctcatggttataactttgacgtaggtttagggcaaatcaactctgcgaatttcccaaaattgaatgtttctgccgcagatttgtttaatggttgtaaaaatctcgaagctgctcaatacgttcttaattactgctaccagctcgcaacaaaagagtatgcgccggggcagtcagctttgagacacgctttatcttgttataatacgggttcactaaccgccggatttacaaacggttatgtatcaaaggtggttgctcaaattgggcaatcaaaacccgtaatccctgctctgaaagccgatgatggctccactgatgtggaaagtgttgatacagctatagatgctgtgccggtagatgctgctgatggtgaagaacaaccaaaagacgccggtatgactgatgcctttagtggctcggataaagacgcttttggtgcatctgatggtgacgctttccggcagaagtag

SEQ ID NO: 384678 - DNA, 318 bp, Salmonella enterica; identical to SEQ ID NO: 143252

SEQ ID NO: 384679 - DNA, 291 bp, Salmonella enterica
atgaatacagcgattaaacgttttttcccggtggcaatgttcatgatggttgctctgtgtgttcctgagctggcgctggccgccggtgcagataccggtgaatcatccctgagttctgttcagtcttggatgatgacgtggattccgattgcggccaccgttcttatcatcgcgagtgctatcgcatggatcgctcatatgctcccggcgagctgggcggttcgtattgttatcggtctgattgttgtcggttccgcgtcttaccttgttggccttttcgggctgagttaa

SEQ ID NO: 384680 - DNA, 315 bp, Salmonella enterica; identical to SEQ ID NO: 76863

SEQ ID NO: 384681 - DNA, 2631 bp, Salmonella enterica
atggccgtagcggaaatgaaaaaaaggggggtgaaagatttcaaaaaagaaccttcctctttgaaatatattccttactcctaccatgtgacgccccatgttatcagtacggtaaatggggagtacctttctatatttaaaatccgtgggcgaacccatgactgtgcttctgatgccgagctaattaagtggcacgctgatttgaatcagcttttaaaagggattggtagtgagcatgtaaaattatggactcacttacaccaccgcgaaattaataattatcctgacacgcattacaatatgacgttcccgcgtatggtgaatgaatattatcgtgatcagtttgatgatacccccatgatggtaaatgacctgtacctgacggttgtttataaccctgtgggggatgccgctcaaaagatgctggcaaagtttgataagccatcggccaacgagctgcgcgaaatgcaggctgatgctattagtgcgctggaagatatttgtgagcaggtcatgaactccctgcgtccttatggcattgaccgcttaggctactacttccgtgacaaacgggggaacgtcattcctgaacagaaaaaagatgatgcagaagatgatgaggatattatcgatctgcgtgaagatttgctggccgatgtggaatatcaggacgttcaggaagataaagaagtctttagtggcactcaacacacctattctaaagcgctggagtggctctattacctcgtcaatggtgagtgggcgccagtgccggtttgtcgtggccgaatccgtgaatatttggctactacccgcccaacttcttcattttggggggatggtatcgagattcgcggtaccgacgaacgccgctatacgtctgccgttgaaatccgggattacgattccgatactgagccgggtcagatcaatatcctgatggaagcaccgtttgagtttgtgttaacgcaaacgtattgctgtatgtcccagcaagcggcaagaacttacctcactaaccagcaaaaagcactactggaaacaggcgatccatcctttacgcagataaaccagatgaatgacgccgttgatggcgttgtttcacgtacctttatcatgggctggcatcacctgacggtacacacctttggcaagacgcttaaagaggcccgttcaaacgccggtgttgccagaaatatgctgaacaactgcgggctgattgccagccaggtagggttagcttcagaagcggcatattatgcaaaacttccggctaatcaacacctgtcgccacgaccttgcccgctgaatagctggaattttctttgcttctcccccttccataattttatgtccgggaaagcaaataataacccgtgggggccagcgctgacgctgttcaaaacggtggcaaatacgccgctgtatatgaacttgcatgtaacgccagaagatgaaatgtctttcggtaagcgaccgctggcgcatacgttaatgcttgggcgttcgggggcaggtaaaactacgctgcttaacttcctgctgacgcaagcgatgaagtataacccgcgcatttttgcctttgaccgcgatcagggcatgatgccgatgattaaagcgttacacggtcactacacggttctgaaagagggcgttgcttccgggtgggcacctctacagatgcctggcaccaaagttaacattgcattttgtaagcgcctgatgcgcctgtgcgctgaaattaccaaaggcagcgtactcgatgctgatcaggttaatgaccttaaccgcgccgtcgatgctttgatggatgagaactccctcattccgacagatttacgcaccgtggatatgttaattcagcagatgccgaatccatatcaaacagcgggcagtaaacaaacactggcgtcattgcttgttccgtggactcgcggccatgaaaacggttggttgttcgataacgactcggattcactgaatctcggtgaatacgatatctacggctttgacctgacagatttcattgttgcagataatgagatccctcctgcaacacgtactcctctcctgatgtatctcaatttccgtgtgcgtcagtctattgatggccgtcgccgggtgattcaggtattcgatgagtttcaccagtaccttgacgatccaattatgagtgtggaagtcaaacgtggccttaaaacagaccgtaagaaagatgcggtttacgtattctccacgcaagaaccgaacgatgcgctggatagctccatcggtaaaaccatcatgcagcagtgcgtaacgaaaattcttctggaaaacccggatgcggattatgaggactacgttactcgcctcaaattgacaccggcagagtttgacgcgctgctgtctattcctgagaactcccgccagttcctggtgaaacaaggcagccaaagcgcgatggcgcaattcaacctggccccgcgcgttaagacgccggagaacttcaggaagctggataagatccttagcatcctgtcaggggaaacccaaaacgccgaaacactggcgaaaattattgagcaaattggggatgataaccctgataaatggctcgaaccctactggaaatctgtactcgcagcgtga

SEQ ID NO: 384682 - DNA, 708 bp, Salmonella enterica; identical to SEQ ID NO: 104324

SEQ ID NO: 384683 - DNA, 237 bp, Salmonella enterica; identical to SEQ ID NO: 76860

SEQ ID NO: 384684 - DNA, 1044 bp, Salmonella enterica; identical to SEQ ID NO: 76859

SEQ ID NO: 384685 - DNA, 171 bp, Salmonella enterica; identical to SEQ ID NO: 97900

SEQ ID NO: 384686 - DNA, 717 bp, Salmonella enterica; identical to SEQ ID NO: 76857

SEQ ID NO: 384687 - DNA, 888 bp, Salmonella enterica
atgaaaaaacaattaatcgccggtttaattctggtcagcctcggcctctctggtcaggcgctggcgctggaagtgggaaaaggtagcccatacgactaccgtattaaatccgtggtgtataacccggttgacgtggtgcgtattgattccgttgccggtgttgccactcatatcgtggttgcgcctgatgaaagctatgtgacacacgcttttggtgacagcaatagttatgcgtttacccatgttgaaaacaacatgtttatcaagccgaaaggggaagttcccagcgatactaaccttgttctggtcacgaacaaacgcacttataacattgtgttgcactatgtaggtgactacaccacgaaagacgcccagggtaacgttaaagccaactttatcaagacgccgtggagtatgaaaaatgccactctccagcttacttatctctatccatttgaggatatgaaaaaggctaataaaacgctggaaagtaaccgcgtgaaaaaggcgttgaaagaccttcagaacgggccttacaacctgctttataaaatgtcagatgaagatgaatatcggacagtggccccggtgaacgtttgggataatttccgcttcacatacttcaaattccctgcgaatgctgatttacccgttgtgttctatatcggtgacgatggtaaagaacacaccgttaaccagcatccagccggggaatataacaacattgttgtggctgaaacggtagcaaaagaatggcgtattcgttacggaaataaagtcgtgggtgttctgaatatgaattacaacccaaatctaggggcgatcagtaccggcactacgtcaccagatgttaagcgcgtgaaaaagggtgagggggataaatcatga

SEQ ID NO: 384688 - DNA, 1155 bp, Salmonella enterica
atgagaaaagacagagaggaaaacttagattatctcgatgaagaagataccggcatcgaggatgagcgtcagggcttcagcggttcccccaaaaaacgtattgccggtgcgcgggcctttgtcgggctgatggtgttgataggttcggcaatggtgggatggttcatctataaccagatgcacgttaagaagctggccgacgatcccaaaaaggataaagagcaggttatgaccagctctttaccgcgccagtcttttgatgatgtgcccccgactatcgacaacacgccaaaaaatagcgtcgttcctccgttgcagacgacgcaggagtcgcagcagcaggttgcgcgtcaaacattgaataaccagaaaaaggaattatcaccggaagaaaaaattatgcgcgcccggttaggggtgtccttcaacggtgtcgatcctgagaaacaggctacgactgcgaaagaacaggagcgccggtcaggtcaggacaatacagaaaccagctcaaacagccaggcactggcgagccgaatgaaaccggcgcgtatggctgtcgcccaggcatctgtaatgccgcatccaaatctgaccattgcgcagggaacaatgattccttgcggtacaaatacggaactggataccaccgttccgggccaggtgaaatgtactgtaagccgtgatgtatactctgctgacggtactgtaaaactgattgataaaggggctgtggtcactggcgagcagaatagcggtatccagaacggccagaatcgtgtgttcgttctctggtcacgcttgcgtaacccggatcagaccattgttaacctcgacagcagcggcactaacgctttaggtagtgcgggcgtacctggtcaggtcaactctcacttttgggaacgaatgggcgatgccattttcttctctgtgctgactgatggcatgaaagccggtatcgcgtcgattaacaacaacaactccgatgtgacgtttaacacaacggaaaacagtaccgaccagcttgctactgaagcattacgggcgaagattaatatcccgccaacgctctacgctgcgcagggcgatgccgtatccatctacgtagcccgcgatctggatttcagcactgtatatgggttagaaatgaatgactga

SEQ ID NO: 384689 - DNA, 1032 bp, Salmonella enterica
atgactgagttaaccagtaatattcaagatattcgccaacgcccccgccgtgagcagggggtatggctgacgctcgaaccacttcagcgctacctgagtgatcccgatgtgtgggagctgagaattaacaagtatcagcaggttgtctgtgaaacgtcgaaaggtcgtattttccacgacgatgagaaaattacggctgaatatatatcacgcttaaccgacacgctttgtggttataacggactaccgaaagagtccgttaataacgtgcttctgccggacggctcaaggggaattatttgcttaccccctgccgtactggagggaacagtagccatcgcgtttcgtaagcatctgcccgttgataagtctcttgaacaactccgcgatgagggccgtttcactggctggaaacgaaaggttcagggtgaagtagcccttcagccattcgagcaagaattgctggagttgctcgataaagacgacctcgtttcgttttttaaaattgcggtacgcaacaagctgaacatcgttgtatcagggtctaccggttcgggtaaatcaacgtttacccgctccctgcttcgggaagtgccttataccgagcgcattgtagtttccgaggacgttcacgaaattgggtctgatctgcatcacgaaatggtttatatgctgtacggcgatcaggatggccgtctggccccggcggtcagcctgaaagcgtgtatgcgtctttctcccgaccgtatcatgatgacagagcttagggatgatgcagcatgggattacataaactcgctgaataccgggcatccgggcgggatcacatccacccacgccgacgatgcaaaatccactttcagccgtattgcgctgcttatcaagcaaaccggcgtcggccagacgctggattatgacgtgattatgaaaacgctgtacaccacgatagatgtcgtggtgtacatggaacaccgccagattgttgaggttctttatgatccagcgtttaaaaaagcgcaactttctctttaa

SEQ ID NO: 384690 - DNA, 555 bp, Salmonella enterica
atgatccagcgtttaaaaaagcgcaactttctctttaaagcggcactggttgccgccgtactttacggggcttcggccccgtctctttttgctgcatcggcgcaagtaggtttctcgccggaaggaaccgcgcagcagctcgttatcaacgtaatcggctcggcaaaagataacatcagaatgatggcctacagctttaccgcccccgatattatgaaagcgctgattgcggccaaacgccgcggtgtagacgtgaaaattgtcgttgatgagaatggcaatacgggtcgcgctagtcgtgcggcaatgaatcttgttacgaacgcgggtattccgcttcgggttaacagtaactacaaaatccagcatgacaaggtgatcatcgttgatggccgtcatgtggaaactggcagttttaactacacggccagtgccgagaaatataactctgaaaacgcgattgtgatgtgggacgcgccagaactggccgggcagtacctgaagcactggcaatcacgctggaatcagggccgggattttaccccgtcttattga

SEQ ID NO: 384691 - DNA, 483 bp, Salmonella enterica; identical to SEQ ID NO: 316081

SEQ ID NO: 384692 - DNA, 195 bp, Salmonella enterica; identical to SEQ ID NO: 97893

SEQ ID NO: 384693 - DNA, 2910 bp, Salmonella enterica
atgctgaacattacgacgattacccgccagcgtgtcgataaggttgttgattactatgctgatggcgcagacgattactatgcgaaagacggtaacgcgatgcagtggcaaggcgctggcgcggaagaactgggcttaaccggcgaggtagaacaaaaacggtttgcgaaattgcttgatggcaaagtaacggatgacatttccgtgatgcgtaaaacggccaacagcgaaagcaaagaacgattgggatacgatcttacgttttccgcgccgaaaggcgttacgcttcaggcactggtcaacggtgataaacgtatcattgaagcgcacgatcgggcggtcactaaagccatcgaggaagcggaacggctggcactaggccgctttaccgtcaataaaaaaacgcacgttgaaaacacgaataagctgattgtcggcaaatttcgacacgaaacgtcacgcgagctagacccggatttgcacacccatgcctttgtaatgaacctcaccaaaaccagcgatggtaaatggcgttcgctcacgaatgacggcattgtgaactcgcttacgttattgggtaacgtttacaaatccgagctggcaagagagctggagctggccggttacaacctgcgttatgatcggaatggtacgtttgatttggcgcatttcagccaggagcagatagcccaattcagccagcgcagccagcagattgaggccgagttagcaaagaatggtttaagccgtgaaacggccagccatgagcaaaaaaatgcggccgcgctgaaaactcgtaaaagcaaaggcgaagtagatcgcgatgtactctatgagggctggaaaaaccgcgccaaagagcttcagattgattttgatagccgggagtggaaaggtgcggccaacgacgatatagcgcggaatacgcagccagcggcgctggaaaagcctatcgagtaccaggctgacaaggtaatgacctttgccattcgttcacttaccgaacgtcaatcggtgattaccgagcgggagctgatggacgtggcgatgaagcatggctatggccgcttaaccctcgatgatattcgggctgcgagagaacgggccataacctccggcaacctcatcaaagaagaagcaacatacgcagcggccacgaccaataaaaaacagcagaacgtagcaatgacccgcgaacaatgggtaacggaactggtgaaagctggccgcaataaagatgaggcccgtaaactcgtagataagggcatcacaaacgggcggctggtacagcaaaagccgcgttttaccacacagttagctcaacaacgcgaacgcaacatactgaagatggagcgggaagggcgcggaaagatccagaccccatacactcgcgagtttagcgagggctggttagccagcagaacgttaaaacccgaacagttaaaagcggttatgggaattattcatacccccaaccagtttatttctgtacatgggtttgccggtactggcaaaagttatatgaccaaatcggcagcggattttctaaaagagcagggcgtacacgtcaccagtcttgccccctacggtagccaggttaaagcgcttcaggctgaagggctggaatctcgcacactccagtctttcctccgggcctcagataaaaaaattggccccggctcagtagtttttattgacgaagcaggggtaatcccggcccgccagatggaggaaaccatgcgcgtgatccgcgatgcgggcgcacgagcggtattcctgggcgataccaaacagactaaagccgtcgaagcgggtaaacctttcgagcagcttattaaagccggtatggaaacggcctatatgaaagatattcagcgccagaaagacccggaattgctgaaagccgcgctaaatgcagcagaagggaaaataaaggcgtcgttgacccacgtaaccagcatcgtagaggaaaaaaatcatgatcagcgctaccgccgcattgtcggggattacgtggcaatgccgccgacagaccgggctaacgccctgatcatcaccggcacgaacgacagccggaaaaaaattaatgagtacattcaggccgagctggggctaaaaggccagggtatcaattacccgcttctgaaccgtcttgataccactcaggcccagcggcagcacagcaaatattacgaaaaaggagccgtgattatcccggaacgggattacagcaacgggctgaaacgcggggccgtttataccgttctcgataccggccccggcaataaacttacggtaagcgacggcagcggcgacacaatcgcattttcaccggcgcgattttccaaattatccgtgtactcagttgaaaaaacggagctggccgtaggcgaccaggtaaggatcacccgtaacgatgcgcatctggatttagcgaacggcgaccgttttaaggtaaaaggcgtccagagtggtgaggtactgctggagaacgagaaagggcgactggtaaaaattgatgccaacaaacctatgtatttagggctggcttacgcttcgaccgttcatagcgctcaggggctaacctgcgacaaggtttttatcaatatggatacccgatcactcacaacggccaaagatgtttattacgtggctgtcacccgcgctaaacacgaagccgtcatttacacagacgatgagaagaagctggataaagcggccagccgtgaagggttcaaaaccgccgcgcttgagctggaacaactcaaacgctatgccaaagagcagcagcatgatgcccgcgaaaaaggccgagacaaaaccgagccgacgcaggaaaaagacaatgccaagcgtaaaggcaaaggtcatgacaaaaataacgacgagagagcatttacctcgctctaa

SEQ ID NO: 384694 - DNA, 1578 bp, Salmonella enterica
atgaatgaagcggataagggcaaaatttgcctgggggcattgctttttaccccccttgttacgtggtttatcgcggcgaaagccttgtatggttttacgccaaaagatgcgcgtgaacgtctggttttacttattcagcagacttttgatttatggcctttatggggtgctttattagtcggtgaaattattgccatcataggcttaatcatatttttcaaatttaatcaccagatatttaaaggtgcgccatttaagaaaatatatcgtggtacgcggcttgtttctcagcgggctttagcatccataactaaagaaagagagccacaaataacaatagccgatattccaatccctacaaaagcggaaggtacacatatttcaatagccggggcgaccggtgttggtaaatcaacaatctttgctgaaatgatgaaatgttgcttgatgcgtggaaaaatgcaacgtgttgcctcaaataaagaccgcatgataatcctcgatccagatggcgatttcctttctcgtttttataaaaaaggcgataagattttaaatccctatgatgccagaacagaagggtgggtatttttcaacgaaataaaaagtgattttgactttgagcgattcggtgtttctatcgtacctacagcgaaggattcgcaaacagaagaatggaatggatacggtcgtcttttatttaccgaggtatcccgtaaagtatttaacacaagtcgaaacccaacgatggaagaagtattctactggacaaatgaagtaccactggaagaacttgaggaatatgtcagaggcactaaagcacaggctttatttgctggtagcggtcgggccgttggtagtgctcgctttgtgcttagtaataaacttgccgctcacctgaaaatgccagcagggaacttctcaattcgtgaatggctggaagatccgaaaggcgggaatctgtatatcacctggacagatgaaatgcgtgaagccttgaaatcgcttatttcatgctggacagatagcatattttctattgtgttaggtatgagcaagagcaactcccgtaaaatctggacgtttatagatgaactggaatcccttgattacctgccatcattacgtgatgcgttaacaaaaggtcgtaaaaaaggactacgggttgtcaccggctatcagtcgtattcgcaggtcattagcatctatggcagtgatgtagctgaaacccttctgtctaaccatcgtacatcggttgttatggccgctggtcgcctgggtgaaagaaccctcgaatttgtctctaaatcattgggggagattgagggcgaaagagaaaaaacggggattagccgccgctttggtcagttgggaaccaaaaataccaatgatgatcacaagcgcgagcgggctgtaacgccaaccgaaatcgccacgctggatgatctgaccggctacatcgcgtttccaggaaatctgccagtggctaaatttgagactcatcacgttaactacactcgttctaaccctgtaccgggcgtggtcttacgtgaaagcaccgcatttgcaggaatgtaa

SEQ ID NO: 384695 - DNA, 348 bp, Salmonella enterica; identical to SEQ ID NO: 97890

SEQ ID NO: 384696 - DNA, 435 bp, Salmonella enterica; identical to SEQ ID NO: 154518

SEQ ID NO: 384697 - DNA, 711 bp, Salmonella enterica
atgaaaattgcagtaatgaattacagtggcagcgtcggcaaaaccattatttcgtcatacctgctgtatcctcgcatggctggcgctaaattctttgccatcgagacaatcaatatgtcggctgcggatttgggtgttgatgaagtgatgagcttaaccggcgataactttggtcaactcgttgaagaaatcgtatttgaagataatgccatcgtggatattggcgcgtcgaacgttgagcggtttctttctaccatgacaaaatatgagggtgcaattgacgaatttgataaatatctgattcctgtcaccccggatgataaagcatggcaggaaagtattaagaccgccctcgcgttaagtgccgctggcgttcctaaatctaaaattgttcttctgcctaaccgcattaaatcgactccgcaggaggatattgcttcggtatatgaatgggcgaaagattctaaaaaagcctctattcataaagatgccgccgtttttgaaagtgaaatttatgaatacctcgcgtatcacaaaatttcgtttgaagaactgctggcagaagatccagaaacctttaaagcaaaagctaaaacttgcaccgatgccgatgaacgtgcggcggctgcgcgtcgttatcgctggatgaaattagcattaccggttaaacgtaatcttgatcgcacctttgaaatattaacggctgaataa

SEQ ID NO: 384698 - DNA, 369 bp, Salmonella enterica; identical to SEQ ID NO: 12613

SEQ ID NO: 384699 - DNA, 771 bp, Salmonella enterica
atgatcatccctacccaggaaacttacgacgagcttcaacgcgcctacgaatttttcaatcaacgcctgtttgaaagtgcgctgccgccttgccttatcacccttcagcgcgaaaaacgaacgtatggctatttctcgaatggtcgctttgttggtcgctcaaccggccaaattgttgacgaaatcgccatgaatccggtctatttctcgatccgcacgatacgcgacacgctttccacgcttgtgcatgaaatggttcaccagttgcagcaacacaccggcaaaccgggccgccgtggataccacaataaagaatgggcggcgatgatggagcgcatcggcctgataccatccgacaccggccagccaggaggtaagcgcgtcggagagtccatgagccattacatcgaggacggcggcgcgtttgataccgcctgcaaggagctgcttaccacggagtttaaactaagctggctggatcggttcccgccacacaaaccaacgccaccaacgccaaccggcgcagacggtaaagggtatgttgatgacgaagattatgaggacgagggatacggcgacgatggcgagctggacgatgagatcacacaagccctttcgctggtaaacccgccgccagatacgccggtgaataaatcaaaccggacaaaatacacctgcccgaaatgccatacgaacgtgtggggaaagccgggcctgatcctgtactgtggtggcgaacactgcggaaaggcagaataccagccaacctaa

SEQ ID NO: 384700 - DNA, 252 bp, Salmonella enterica; identical to SEQ ID NO: 97885

SEQ ID NO: 384701 - DNA, 258 bp, Salmonella enterica; identical to SEQ ID NO: 76841

SEQ ID NO: 384702 - DNA, 156 bp, Salmonella enterica; identical to SEQ ID NO: 12609

SEQ ID NO: 384703 - DNA, 243 bp, Salmonella enterica; identical to SEQ ID NO: 76839

SEQ ID NO: 384704 - DNA, 288 bp, Salmonella enterica
atgaatacgactcttgttgttttagtcctcgccataacaggcgcgttatatctcccctggcgtcttgtgcgcgacggttacaaagaactggtgcagatgtgcctgttttgctcctgtatcgtcacgctggccgctgtatatgccgtgttagtcaatctcgatactccacacccgtttatgccaatgtttatcgcggtaacggcgttcggtacggctttcgtggctgactgcgctttatctctctggctctatcagcgtaaagctaacgctaagacggctaaccactaa

SEQ ID NO: 384705 - DNA, 723 bp, Salmonella enterica
atgaatagaagacaaagcgatcatctcatgatgataattatttctttgacgatcttaattattatccttacctactttatagaaattaattcagtggttcatggtcagggcgttatcaccactaaagataatgctcagttaatatctctttctaaaggagggacgatacaagatatttatgtagccgagggtgatactgtaaaaaaaggagaactccttgcaaaggtcgttaaccttgatctgcaaaaagaatatcaaaggtatagaactcaaaaagggtatctggataaagatgttaacgaaatatctttcattcttgataaagaaaatgagagtggattgattaccctggatggcacccgttctttaagtaataaagaggtaaaagcgaatattgaattagtgcatagtcagataagagctaaagagttaaaaaaaacctctcttgattctgagattagcggattacaagagaagctgagttcgaaagaaaaagaactcgcattgcttgccgaagaaataaatattctttccccactggtaaaaaaaggaattagcccatataccaattttcttaacaagaaacaggcgtatataaaagttaagtctgaaattaatgatattgaaagtagcatcactttaaaaaaagatgatattgagctggttgttaatgatattgaggcgcttaataatgaattaagtaatagagaagcagataaatga

SEQ ID NO: 384706 - DNA, 825 bp, Salmonella enterica
atgttatctagccgttttcgttctgcaaatatcctgcgttctgaccgccctcttaacgatgatcagatcatgcgttatgccccgtctatctttgccactgaagcgcatgaaagccgctccgaccgttacgcctacattgcgaccagcgaagtattaaatggtctgcgtgataacggttttcatccattcatggtttgccagactcgcgttcgtaacctggataaacgcgaacacaccaagcacatgatccgtctgcgtcatgctgggcaaattaacggcactgaagcgaaggaaatcatcctgcttaactctcatgatggcagcagcagctatcaaatgctggccggtgtattccgtttcgtctgccataacggtttagtgtgcggtgataccgttgctgacattcgtatcccacacaaaggcaacgttaccgagcgtgttattgagggcgcttttgaagtgctggatcagttcgataacgttgaaaaccatatggatgctatgaaatctgtcacactgaatgcgctggaaaaacgtattttcgctgacgcggcgttagcactgcgttatgacgagaaagacggccccgcaccaatcgccgcgagccagctccttgaggcgcgtcgtttcgaagatcgcaaagatgatttgtggacaacgtttaaccgcgtacaggaaaacatcatccgtggtggtttgagtgccagaactaagcagggcaaatcaacccgtacccgcgccgttaccggaatggataaggatacttctttaaaccgcgctttatggattctcagcgagcgcatgaatgaactcaaagccgcttaa

SEQ ID NO: 384707 - DNA, 480 bp, Salmonella enterica
atggcttcaagaggtgttaacaaagtaattctggtcggcaatttaggccaagatcctgaagtgcgttatatgccgaacggcggcgcggttgccaatattacgttagccacgtctgaaagctggcgtgacaagcaaaccggcgagatgaaagagcagactgaatggcatcgcgtggtattgttcggcaagctggccgaggtcgccggtgaatatctgcgtaaaggttcacaggtgtacatagaaggccagctcagaacacgtaaatggactgatcaagcgggcgtggagaagtacaccacagaggttgtggtcaacgtcggcggtactatgcagatgttaggcgggcgcccacaaaacgcttctcagcctggtaatcagccgcaagccggccagcatttcagcggtcagccacaggccaccggcacagcggcagcggcgggaaacgagccgcctccgtttgatgatgatataccgttttga

SEQ ID NO: 384708 - DNA, 303 bp, Salmonella enterica
atggcagtagaacacatttcccctgaagaatggcagcgtatcgcaccggcattacgcacatgcagccaggtaacgatcgatatggcatacgccgtactggttgacggtcgcaaacaagtcgatgtggctaaagagttcgaccggtcaaagcaaacggtcaatgctgcaatcaggcgcgttactgcgatttttaacgaagttatcccggaagatgagcagttagaatttgtgcaagtctggttgccgccagagctggcgaagcaggttaaagaaatggctaaaccatatcagaataaaaattaa

SEQ ID NO: 384709 - DNA, 342 bp, Salmonella enterica; identical to SEQ ID NO: 12726

SEQ ID NO: 384710 - DNA, 423 bp, Salmonella enterica; identical to SEQ ID NO: 104257

SEQ ID NO: 384711 - DNA, 360 bp, Salmonella enterica
gtggtactttttgcgcacctcgcggaagtacgccgcgatgctctccagcttcaggatatccagtccggtgtcgtgctccgtaccggcgagagtggcgaccagcgcctcggtggccggatggccgtaggtggcgctcatggaagaaatcgccgtgtcgacgccgtcgacgcccgcctcgatagctttcagcagggccatctccgccatcccggtggtggcgtgacagtgcaggtgcaggcgcacgtcgtggcgttttttgatttcgctcaccagctcaaaagcggccatcggggtgagaatgccggacatgtccttaatcgcgatggaatcgacgccggtttccagcaactgctcggttaa

SEQ ID NO: 384712 - DNA, 270 bp, Salmonella enterica
atgaaattaaccacgctgctgaaaaaacattttgatattgaggaaattaccgatgtggatagcaccgtaaaccgggaggtgtataccatttgggtttatgaaaaaggcgaagattgcgagccgctattaattctcaaagatgcacaggattttatgggtgtggatggctggcttgtcgggaatatctattccacgttgcaacatggcttattgctacagcatgaagaactgaaaatgatgatccgaaacggcgagattaagagccgttaa

SEQ ID NO: 384713 - DNA, 216 bp, Salmonella enterica; identical to SEQ ID NO: 12730

SEQ ID NO: 384714 - DNA, 279 bp, Salmonella enterica
atgccgcgtaccgtaccggcctgtgcggcgcggatttcggtttccatcttcatggcttccagaatcagcagcacgtcgccttcggccaccgtctggccctcggtggcaatcaccttccagatgttgcccgccagcggcgcggtgaccggggtgccggcgcctgccggggcggtggcaggagcagaagaggcagcaggtgcagccgcagtgagctggctgatatcgccgccgtcgctgaccttcaccacaaaggctttgccttccacttccacggtgtag

SEQ ID NO: 384715 - DNA, 822 bp, Salmonella enterica
atgggcgtgtcgcgtgcgcagctgtcactgcggattaaccgttctgccgactggcaggacaggcgctgtaaccggcgtaatgacgaagcagacgaagaaatactgtcggctatcctcgacatcatcagcgatatgccgagttatggttatcgacgcgtgtggggcatcctgcgcaagcaacgtcgcacagagggacagccacctgtgaacgccaaacggctttacaggataatgagcgagcataacctgttgttgttgcatgacaaaccagagcgaccgaagcgtgaacataagggcaagatagcggtggcagaaagcgatatgcgctggtgttcagatggcttcgagttcggctgcgacaacggcgaaaaactgcgggtaacgttcgcgctggactgctgcgaccgtgaggccatagactgggcagcaagcacgggaggctatgacagttcgaccgtgcaggatgtgatgctgaggtcggtggaaaagcgcttcggcgacaggctaccggaaacaccagtgcagtggctgacggataacggttcagcgtataccgcgtatgaaacgcggaggttcgcgagagagctgaatctggagccctgcacaacagcggtgagcagcccgcagagtaatggcatggccgaacggttcgtgaaaacgatgaaagaagactatatcgcgttcatgccaaaaccggatgtgagaacagcactgcgaaaccttgcagtagcgttcacgcattacaatgaaaaccacccgcacagcgcgctgggatatcactccccgagggaataccggcggcagcggacatcgttaacttaa

SEQ ID NO: 384716 - DNA, 480 bp, Salmonella enterica
gtgcttagcctggcggatgaaaccccgcttgatgcgaccagcggtatcattatgggctggaattttccgctttcccgacgcgtgaccactgggccggtcgcggcgctgcattacgacggttcgacgtcatcaatgtataacgaatatggcgatagcgcgacgacattagcgcttaccgatccgttatggcacgccagcgtcagtacgttaggctggcgggtaaactcgcagttcggcgatgtccgtccctgggcgcaaatcagctataaccaacagtttggggaaaatatctggaaagcgcagtccgggttgagtcgtatgaccgcaggaaatcaggcgggaaactggctggatgtcaccgtaggcgcggacgtgttacttaacccgcacatggcggcgtatgcggcgttttcccaggcggaaaatagcgctacggatagcgattatttgtataccctgggggtgagcgccaggttttaa

SEQ ID NO: 384717 - DNA, 210 bp, Salmonella enterica
atggagggtcaagatcagttcgatctggcgatcccgactgaactgccaggcgtggatacccacattctcgacccgcgtaacacctacgcgtcgccggaacaatggcaggaaaaagccaccgcgctggcgaaactgttcattgagaacttcgagaagtatacggataccccggcaggcgaagcgctggttagcgccggaccgaagctgtaa

SEQ ID NO: 384718 - DNA, 1134 bp, Salmonella enterica
atggagtatttagcacgactaaatatcgttgcgatgctgatgtcaacgacgttctggatcaatctggcggtcgtttttttcgtcaccctcattacttactggctcatcaactggctacttaatgtggtctataaagcgctacaacgcccggataaaaagaatgatgctcatgggcggctgcggcctattgttttcgagatgctgaaaaagaccagtaagatgctaatcttttttgccgcatttctctttagcctgcgctttgtcgtcctgcccgaccggttattctctaccctctctcacgcctggtttttagtggttgcgattcaaatggcgatttggcttgatcagggcgtacagtcatggatgcgtcatttactgtatgccccaggctccaataaaaacccggtgacgttagtcattcttggtatgattttgcgcgtgctcgtctggtctatgatgttgctctccatcctggcgaacgtcggcgtggatattaccgcactggtagccagcctcggcgtgggcggtattgctattgccctggcggtacaaaccgttctgagcgatgtcttcgcttcgctgtcgattggtttcgataagcccttcgagatcggcgatttcgtcgtctttaatgatgtagccggtacgattgaacatatcggtttgaaaaccacccgcatccgtagcctcagcggcgaacagatcgtttgtgcgaacgcgcagttgttgcagcaaaccatacacaactataagcggatgcaaacgcgtcgtatcgtgtttacttttggcgtcgccactgcgacaccgccggaaaagttacgcctcatcggcgatatggtgaaaaagattattaccgatgtcggcgaaacacaattcgaccgcgcccatctactggcctttggtcaggatcggctgacctatgaggtggtgcatatcgtcaataccgcggattacaataaatacatggatattcagcaagagataaatatccgtattattgaaaaactcattgagaatgatatcgaactggcgctgccaagtctggtcgtcagagcccctgtacaggttgaagagaccagggactacagtaataccgctgatgcaaaaaacgcagataaacgcgtcatgcagtaa

SEQ ID NO: 384719 - DNA, 1368 bp, Salmonella enterica; identical to SEQ ID NO: 382534

SEQ ID NO: 384720 - DNA, 399 bp, Salmonella enterica
atgaacaactctgtgaaaaaatttaaacctagtacggaaatactccagtttggccgcgacccaaacaaacagtatggttttgtaaatggtccaatctaccgtggttctactattatatataattccgtaagcgatatagaaaacagaaatgcacgttatgattatggaacagcgggctcgccaactattgagaaccttgaatctgcatggacgcatttaactggagcagcaggcacagttttatctccatccggtttaggcgccatcgcacttgcgctcttaacgacaacgaagagtggtgaccatttattaatgccagatagtgcctatcggccatcgcgtaatttttgtcttgatcttgaccctccatctccggacagcttttgtatcttaagttaa

SEQ ID NO: 384721 - DNA, 1983 bp, Salmonella enterica
atgtattttcagattcgaggcatcatactctggccgcgaaataaaaactttaagcctcataccattcgttttgaactcggcaaagttaatgttatcagtggtgcctcacgcactgggaaatcggcagttatccctatcatcgattattgtttgggcgccaatacctgttcaattccagtaaaaacaattcgtaaatattgtgaatggtttggaatcgtcgtggcaacagagcaaggtgaaaaactgttggcgcgaaaagaaccgggaaaccaacgtagcaccactgatatgtttgtgctagaggctgaaaatattacgtcaatccctattcgcttggaaaaaaatactaatgttattgcagtcaagagaatgcttgatgatttggcaaacctctctaaccttgacttttcaggtggtgatgaaaattcagggtttgatggtcgcccagcttttcgtgatttagctgctttcacattccagccgcaaaacgttgtcgccaacccagatgttttatttttcaaaaccaatacctatgagcatagagaaaaattgcggaagatttttccctatgtacttggcgcaataacatctgaattaatggctaaacaattcgagttgaatagaatccgcctatttttacgccgcaaagagcgagagcttaaagatgcccaggatgtatcagcacaatggcttgctgatttaaaatctaagtatagtgaggcccaagaacttggcttggttcctaaaccacaggaacagttatcccgaaagcagatgattagccagcttgaagaagtcatttcgcgaaccgatctaacgttgaaggtaacagtatcaactatttcagatgctttgagtgaattaaatactcttgaaagtgaagagcgattagtttctcgtgaattgactacaatgcgtcaccgtcttgaagaaatgaatcgtctacgagttggaatgcatcagtatgaaaatgccctattaatgcaacgagatcggcttaaaatttctggctggctattatctaatacgaatgatgagtcggattgccctatgtgtggtagtcatacggattctgctaagcaaaaactacaggctcttgtccaacgtctgtcagatgttgaggctgcggtgggggctgatgcccataaggaagttccagccgcatttgatagagagctacaacgtgtaactactgaagtggctaacgctactgaacgtttaagagccatacagtcacgtaagcgaaccttaacgagcagatcgaaggaagctcgtgagcagcagttttctactaggcgtgctgagcgttttatcggtaatgtcgaatctgcgctagagttacatagaaaactaggtagcgacagtgaacttgttgaagaagtaaggaaacttaaagaaatggtacagaccttggaaaaagagttacgtgaaaaagatgtcgaattgcgtaaaaaccaagcattaagagtgattaatgctcaagcaggtaatattcttcagggcctagatgtagaagacccaagcgcacctatttctttagaaattaatgatctaacaataaaggtgttgggagatgagcgtgatgattatctttcggagataggaagtgggtcaaattggctctcctaccatttggcaatattgctttcactccatcaattttatttaagccaaaaaaataatccagttcctagttttcttatacttgaccaaccaagtcaggtctatttccctaaaactactcagcttccaaatattgctaatgaggatgagccaaaacttcgtgatgaagacgttgaagctgttagacgggcatttaaagcaatggggaatgtggtaatcaaggaaaaaggtaaacttcaattaatcgttttggatcatgctcctcgtgaagtttggggcgaaattgatggtgttgttggattaccggagtggcgtgatggcattaaattggttccgatggaatggttgactggagtttag

SEQ ID NO: 384722 - DNA, 2046 bp, Salmonella enterica
atgcgttcatggttaggtgagggaatcagggcgcaacagtggctcagtgtatgcgcgggtcggcaggatatggttctggcgacggtgttattaatcgctattgtgatgatgctgttacctttaccgacctggatggttgatatcctgattactatcaaccttatgttttcagtgatcctgctcttaattgctatttatcttagtgaccctctcgatttatcggtatttccgtctttattacttattactacattatatcgtttgtcactcacaatcagcacatcacggctggtactgttacaacataatgccggtaatattgtggatgctttcggtaagtttgtcgtaggaggaaatctcaccgttgggctggtcgtatttaccatcattactatcgtgcagtttattgtcattacaaaaggtatcgagagggtggcggaagttagcgcgcgtttctcgcttgatgggatgccaggcaaacaaatgagtatcgatggcgatttgcgtgccggagttatcgatgcagaccatgcccgtacattaagacagcacgtccagcaggaaagccgttttctcggtgcgatggacggtgcgatgaaatttgttaaaggcgatacgattgccggtattattgttgttctggtgaacattatcggcggtatcattatcgctatcgtacaatatgatatgtcgatgagtgaggctgttcacacttatagcgtactgtcaatcggagatggtttatgtgggcaaattccatcgctgctgatttcccttagcgcgggaattattgtcacccgtgttccgggtgagaaacgccagaacctggcgacagagttgagttctcaaattgccagacaacctcagtcgctcatattaaccgctgtggttttaatgctcctcgctttaattcctggctttccttttatcactctcgctttcttttcagcgttgttagcattgccaattatcctcattcgccgcaaaaagtctgtggtttccgcaaatggcgtcgaagcaccggaaaaagatagtatggttcccggcgcatgtcctctaatcttacgtcttagcccgacgttacattctgccgacctgattcgtgatattgacgccatgagatggtttttatttgaggataccggcgtccctctccctgaggtgaatattgaggttttgcctgagcccaccgaaaaattgacggtactgctatatcaggaacccgtatttagtttatctattcccgctcaggcggattatttattgataggcgcggacgctagtgtggtgggtgacagccagacgttaccgaacgggatggggcagatctgttggcttacaaaagacatggcccataaggcgcaaggttttggactggacgttttcgcgggcagccaacgtatctctgccttattaaaatgtgtcctgcttcggcatatgggagagtttattggtgttcaggaaacgcgttatctaatgaatgcgatggaaaaaaactactctgagctggtgaaagagcttcagcgccagttacccattaataaaatcgctgaaactttgcaacggcttgtatcagaacgggtttctattagagatttacgtcttattttcggcaccttaattgactgggcgccacgtgaaaaagatgtcctgatgttgacagaatatgtccgtatcgcgcttcgccgtcatattctgcgtcgtcttaatccggaaggaaaaccgctgccgattttgcggatcggcgaaggtattgagaacctcgtgcgtgaatccattcgccagacggcaatggggacctatactgcgctgtcgtctcgtcataaaacgcagatcctgcaacttatcgagcaggcgctgaagcagtcagccaaattattcattgtcacttctgtcgacacccgccgtttcttgcgaaaaattacagaagccaccttgttcgacgtaccgattttgtcatggcaggaattaggagaggagagccttatacaagtggtagaaagtattgaccttagcgaagaggagttggcggacaatgaagaatga

SEQ ID NO: 384723 - DNA, 141 bp, Salmonella enterica; identical to SEQ ID NO: 36145

SEQ ID NO: 384724 - DNA, 132 bp, Salmonella enterica; identical to SEQ ID NO: 124592

SEQ ID NO: 384725 - DNA, 786 bp, Salmonella enterica
atgaacgtttcaactgacagcagcaacatatcgatagaagaactcaaagaagaatttatacccggtcttctgcttaatgctggggcaataagccattacggcgactcggctttatcttcgaaggctatggataagtattcaaatcttctggagaaagacgcagttaccgctttatcaggagccttgaaccgtatcgtaagtgccttagcggaggcagatccacgttctatcagtagcaatccatcctggttttcccgctttacgggcaaacaccttgaaaagcgcgttcgttaccaacacgcacgtgagaaggtggaaaatcttattaatgaggggaacggatatctgacacatgtgaatgagacgctactggctttagaagagctgcttgaaacatatgtgtcagaaatcaaacgccttaaaatttttatccaggcaggccatgagttccttagggattctaccgaagaaaaaaatagtgacgatctaagccttgtcttcgataaaccgagggaaagatttgccagacgtttagctaacctggcaacactgcttgcgtctcatgaaatggccgccatgcagatggaaatcactcgcgggacttgtatagatattgctgaccgctttaacgaaactataaaagtcctggttccagtatggcggcaacacacactttcgctgttatcagtaaataacactgaccctacgattgttagaaaagctaatcaggcccacgaggctcttctaaaaagcctgcgacaaaatttagagggattccaaaaatga

SEQ ID NO: 384726 - DNA, 1113 bp, Salmonella enterica
atgattaataatttgaccaccagaactgaggttgttgcttttactttgacttccgctgaactggaaaagttcgggctgaatgagcaagatgaacaagagattaaagccgtcgcggaatgcattaatgccgatgatccaggaacagtttatcgttttggccgggcaatgggggaaaacactgctaattatgcggatagcctgcttgagcaaattcgcaataaagatttagacgaagccgggagcaaattaactgaaattatcaaccttgcaagaaatgtaaacatctcgaacttaactgaaagtcgttcaaatctgccagttattggccctttgttggataaaatccgcacccgtgggaagaatttcgccgcacagtttgaatcaactcgtgaacaaatcgatgctctggtttcagaggtttcagttacacagaatagcctcggttctaataatatttcgctccagcaaatgtttgatgaagtcgttaaagaacaccacttaacaggtgtacatattgctgccggtaaattaaggctgggagaattacaattaaaagcagaaaatctcagagctaatgttggtaacaatcctgctaagttccaggaagtatctgatctggatacgctaattgctaatttagaaaaacgtattggcgatttagttgtttctcagcagtctgctatgcaagtattgccaatggtacggattatacaggcaaataaccaaagtcttatcgacaagtttcatagcgtcaaagaggttactgtccctaatttcaagcgtcagtttctgttagccatttctctaaatggacagcgtaacgctgtaaatcttgccaatgatatcgataatgccaacaatgagttactccgtagtaatgcaaaattactgcatcgcaatgcagtagaaactatgaaagcaaaccaacggctggttattgatataagcacccttaaagaggtgcaggatacgcttatccagacggttggcgatgttgttaaaatccagagagaaggggctattaagctcagggaaacagaaaaacaggttcttgccatgcgtgagaatttgcgcacccgactgacacaaaaaggggtagatcatggtgcgtaa

SEQ ID NO: 384727 - DNA, 894 bp, Salmonella enterica
atggtgcgtaaccttaagagtagtgacgatttttcccgtgaactgtcatttctttttcaccggtctataaagattagaaattcaggtttcgcgatatttggtgcgggcctgctgataatgatttttggtctttgcttgtggttgctgtcattacacctctcaccttcagttctggactttgatattgatgtgcccttgtcattcttcaattcatctgaaggtgaagataagttagtggtttcggattttggcgatgcatttggaggcttcctaactacatattctaagttgctattagggattatggggctattagtagtttcttcaactgcctttaaaattttaaagggggaggaaataggtgagatattcccgatgcttctaattgctggcgcttttcttatcggcttgtcagtttttacatctgctttaggttcggaagagactgatgccacttcagcttcgactgtaaaggttatcaagaaatatgtaaaacatgaaaaatacgataaacttgtcgcatatttaaatgatagtaattggccctcaggcgaagaggtatctgtaaactatttaaaggcgcaactacatataaaactcggcaagccagatgtgaagttaacacagaatgttgttagggcgtatatgtctggtgtattacagtcaaatattcccgtgaaagttcgttatgcattggaaaagacagctttagataaatccgtctcaccacttgcgattcgttatgagcaaaaacgtatgtctaaatcacataccttttcaaaagcgtcggttaattgtcttaaagtaggtagtcccgtcgcattcgttggcgttttgttcgctcttcttggtataaaaatcaggcggcgagtcagattcttagaatcaaattga

SEQ ID NO: 384728 - DNA, 228 bp, Salmonella enterica; identical to SEQ ID NO: 105671

SEQ ID NO: 384729 - DNA, 1341 bp, Salmonella enterica; identical to SEQ ID NO: 235248

SEQ ID NO: 384730 - DNA, 573 bp, Salmonella enterica; identical to SEQ ID NO: 26658

SEQ ID NO: 384731 - DNA, 924 bp, Salmonella enterica; identical to SEQ ID NO: 26657

SEQ ID NO: 384732 - DNA, 240 bp, Salmonella enterica; identical to SEQ ID NO: 117438

SEQ ID NO: 384733 - DNA, 288 bp, Salmonella enterica; identical to SEQ ID NO: 84381

SEQ ID NO: 384734 - DNA, 321 bp, Salmonella enterica; identical to SEQ ID NO: 31761

SEQ ID NO: 384735 - DNA, 702 bp, Salmonella enterica; identical to SEQ ID NO: 105651

SEQ ID NO: 384736 - DNA, 297 bp, Salmonella enterica; identical to SEQ ID NO: 31759

SEQ ID NO: 384737 - DNA, 351 bp, Salmonella enterica; identical to SEQ ID NO: 11453

SEQ ID NO: 384738 - DNA, 927 bp, Salmonella enterica; identical to SEQ ID NO: 11456

SEQ ID NO: 384739 - DNA, 1557 bp, Salmonella enterica
atgagaatgttgcctgttttgcctgatgaatccttgttcagccggttttgtcggacaattaccgtgtacggtatgtccccatcttctctgttaacgatcattttcaacaaacctgatatgaacgtccatccaattctcaattcaggattaaaggctatttctcttcatacatccgaaagtgcagatcagctctggcatgaacagactttactccctctttttgcctgggcactaccaatcagtcgtaatgaaattatggatttcaacacgacccctgccaggcttaatcgattgtgccgccttagtaatttttcactagggcagcgcacactattgaagttttgcccggtttgcgctcgtgaagatacttttcattatggtgttacttattggcatctggcgcatcagcttcatggggttacaacctgccatcggcatccggtagcgcttgaaagcatccatgtcccttcttcaccgcacatacgtattggactgatgcctcctgtttcgtatacagaacaacttagcaatgagatagacttcgattttgctaagttttgttatgagtccctaaatataatcagaagaaaagatattacacaccccaattacatggatgtacttaaaaagttgaatttattatcattggatggaaatttaaagaaaaatgtattctacgcacatgtttatgctaagtgccagttatttggggagggttcatcgggacttataccaacatccctaactgattatcattactgggagcctatactcaaagacaaatgttgtcagcatcccacaaagcatcttttgctttgttattgtttgttaaatacttgctggccaacgtatgcaggaagtcgtactaataaaaagaaagaaatctttaaaagtcataagaaatacagttttcatatagttgaaaataatactagtgttagcaaccttgggaaggaatttagtcgcagcagatgttacattaaaacacttatttataaaaaatacctgagggcgtttaagcgaaacacaaaaattaatatattcactgaattgcttatcaagtctatggctgtaagggggtttagtctggcatccatagctgagaaaaactcattatcggaaggagctgtatcctctgtaatttcatcttgttacggtttatgctcatggcgtaaaaaatgtaaaaaagattctttaagacggcgtcataagcagaaaatattaagatttatacataatcaatccgtttctataacacgaaagttagtcaaagaaagttgttatgcaagtttctattggctaaataaacatgaatgtgactggcttaattcctgtcttcctaaaacaatacgatgctataaaaataaaagagtagactggagcgagagagatattatctcatcatcattaataaatgatgttttatctcaggggcagtactcgatgtcacttacaagtctagatgctttactgggagggcatggctggcttttgaaatacagagataaactaccaatgacaatgatacttctcagaaaaatggaactaattaaataa

SEQ ID NO: 384740 - DNA, 1449 bp, Salmonella enterica
atgaaccttatacggagcgtttcagcgatatataaagaacaggagttacctgagtatcgtggcaatcccttaattgaagcacttcctgaagcgcttacggaagatgaagtacttctggaaatgagttatttccccgaaattgacgaaaaaatccgctggactgccccggcgaatgttagagagcagtatgtcgaacgtataaagaaattccgttgccctcaaaccaatcttatccaggcttataagatgatcttacgggcacttagggaaagctatgcagctcgtaatcctttaaaaagcggaacaattcaatatcttcattactatggaaatgagcgtcctgatattgagccagaaagtggatattttaaatcccaggctgaaactattacgatagttggaatgagtggttctggaaaaactaccatgattgagcaagtcatggatcatttccctcagattatagaacacagcagctataaaggagtttttcccggcttcagtaagcaaattgtatgggtaaagattaattgtccatacaattcaagtgtgagagacctttgtgaagagattttacaaaaattagatgatgcaattggtattgaacgaactacacctgagattagaaatggtgctctggctcgccagattgcacaaagaattaaatcatcatttttgggtatccttgttattgatgaaatgcagaggcttaaattttcaagaaccgggggtgagagtaagttgattgattttttacatgaaattgtagattccatgggggtatctatggttttttgtggaaatcatccttttgacgagacgctgacaaagaaaatgagaattgccaggcgggcagagtctggtggttacatgaaaattaagaatgttagatacgattcacaagactggcaatcgtttattcattatttatggccattacaatggacaaatgttgaaactccattaaatgatgagttaaacgaaaaattattcattttatctaaaggcaatattggattggctcagatgatttatcggggagcacaattaaaggttatcggtagcggcaatgaaatcatcactggcgcagtcttgtcggcctctgtaccggtactcgtgagtcatacggaggaatataaggatactccactcccgggggccgcgactgaagatgaggaagctaaatggctctctgcatctaatgagggtgatgcttcggctaaaatcatggcagagaagtccctaaagtctttgatccctggggatatagacaggccacagcacaaggaattcgtaggaaaaatagacgaggttttgcgcaatttcgacgagaaaatactgtctcttgaccacgatcttgttatcaacagaacagctgaaaagaaaaatacctacgatgctcttcagcgttgcgggcttataaatatagatccacttaataaattgtaa

SEQ ID NO: 384741 - DNA, 2124 bp, Salmonella enterica
atggatattattaggaattcagtctggctctctcaaggcactgatttgcttgcagagggactttaccgtgttttggattttgacagaaaggtcgatttgttaattttgtttaaaataaaatcagaaagaacgggtaagccaatccctttctcattttcaatgtttaaatattatattgaatcaaatagcataacttgtaaagattatatatatccttcatatatgttagtagatgagaaagaattaacagataaagacagaggaaggcgagatgaaaattacaatatcattaaagatcttgtagatgacagaatgtttctgttcgactatgcattacataaaaagtcgcaccttttaatggattactcaagaaataaaaaaatatcacaatatactatcagaacgcttctggcgttgtattggcgacatgggcaggatatttatgcattgctacccgcattctcgaactgtggcgccgctgggaaaagtagaatcaaacatgaaattaaacttgggaattccaaaaaaaacagagcattacctaatgaacgatcacgtgttttcattcttaatgaaagagatataaataatattagaaaatctctcattacgtatcattataaagttaacggagatacgataaagaaaacattagagagacatattgatttgtattttagggatgaaattaaaacagcaaacctagaaaatagagctccatatgttccttctttaaaacaattttcatactggaataaaaaactcttcactaaagatttctcgataaataagaagaacacgaaaaaagaaatagacctcaaaatgcgggcgcttttaggtagtgtggctaatacaactgttttgccgggtgatgttttcgaaatagactcaactgtcgctgatgtacatcttatttcgagtttaaacagacgaaaagtcattgggcgtcctactatttatacagtggtggatcgtgcaacaagaatgattgttggccttcatgtttctttataccatgcttcatggcgagccgcccgacaagcgttagcaaattgctttatgccaaaaaaagaatattgtagattatttggaatctctattactgatgatgattggccttgttctcacattccattaacattgatgtgtgacaacggggagatgattggtcttaaacctcaggaagagatgacccccctgacaaaacttgagtttgcgccagtcggtagaggcgacagaaaaagcattgttgaacgctgtttcggcattctgaatgatgaggttattcataggcttattggaacaacacgaaggggaaagattgttaaaggagagccaacaccgcaatccagggcttgtttaacgattcaggaggtcacgtctttactgattcgggagatacttgcacataatcagagaacgtatgaagaactggcttatatcaatcccttactgattgaaaatgatctcgtaatatcaccaaaaaatagttggatgataagcttaaagcacgggagattcagcgcaagagccgttggggccgacgaagtgatcgcacgattgttaatccctgtgaacgctaacattaccgccggtgggattcagtacaataatcttttttatgaatgtgatcctgaaattgcatcaggtgtcagagtatttggaagaaccacttgtgaagcaagaatagatgacaattgcgtagattatatatatgtaagatttgacaaaaatagcattttcaaaaaacattacctacttaagaaaagagatgtatttaaagggaaagctcatcttgatacagatgtaatggctgattgggtagatactcaaaaagaaattaatttatttactctggattcgctcagcaatatcaataataaagatgaatttaacaggaaaggtaacgaaagattaaatgaaatatacgaatctcgccgggtacatggtaaagatattaaaaagaacaggaaaaatgaacttgattcattagggcgaactcatgttgctaatggaagatctgaacccctacttccttcatccagtaatgttctgcttttgcctggccgggaggagaaacaaagatggttaaaaggtaagaagaagactgaggacgcagaataa

SEQ ID NO: 384742 - DNA, 843 bp, Salmonella enterica; identical to SEQ ID NO: 11328

SEQ ID NO: 384743 - DNA, 1869 bp, Salmonella enterica
gtgaggcgattgccggggattttattgctcactggagccgcgctcatcgtcattgcagcgctgctggttagcgggctgcgcctggcgttgcctcatcttgacgcctggcgtccagctatcctgaataagattgagtctgtgaccggcgtgccggtggccgccagccaactctccgcaagctggcaaaattttggccctacgctggaagcgcataatattcatgcagccctgaaagatggcggcgaactgtcgataaaacgcgttacgctggcgctggacgtctggcaaagcctgttgcatatgcgctggcagtttcgcgacctgaccttctggcaactcaatttccgcaccaacacgcctcttcaaagcagcgacggcgaaggcatcgaaaccagccgtttaagcgatcttttcctgcggcagttcgatcatttcgatctgcgcgatagccaaatcagttttctgacgctttccggacaacgcgcggagctggcgatcccacagcttacctggctaaacggcaaagagcggcaccgcgccgaaggcgaggtcagcctctccagcctgaccgggcagcacggcgtgatgcaggtgcggatggatttacgcgatgacgacggtttgctaaataacggcagagtctggttacaggccgacgatattgacgtcaagccgtggctgggcaaatggatgcaggataatgtggcgctccagacggcgcgtttcagtctggaaggctggatgacgctcagtaaaggcgaaatcgccggaggagacgtctggctgaaacagggtggcgcaagctggctgggcgataacacgacgcacacgctgtctgtcgataacctgacggcgcagattagccgcgagcagccgggctggcagttttatattccggacacacggattacgcttgatggtaaaccctggccgagcggagccttaaccgtggcctggctcccgcagcaggacgtcggcggtgagaatcacacacgtagcgatgagctacgcattcgcgccagtaatcttgaactggcggggctggaagcattacggccgctggcggctaaactgtcgcctgtgctgggcgaaatatggcaggctacgcagccgagcggaaagatcgccacactggcgctggatattccgctacaggcgaccgaaaaaacgcgttttcaggcatcgtgggaaaatcttgcctggaaacagtggaagctgttgcccggcgcggaacatttttccggtacgctggcgggaagcgtagaagacgggcagatgaaggttgcgatgcagcaggctaaaatgccctatgaaaccgtttttcgcgcgccgctggaaattgaaaacggcgtcgcgacgcttagttggttgaagaatgagaacggctttcagcttgatggccgcgacattgacgtcaaagcaaaggcggtacatgcgcgcggcgggttccgctatctgcaaccgacgggcgacgaaccgtggctgggcattctggccggaatcagtaccgacgatggatctcaggcgtggcgctattttccggaaaacctgatgggcaaagcgctggtcgattaccttagcggcgcgattcagggcggcgaggcggataacgccacgttggtttacggtggtaacccgcacctctttccctataagcataacgaaggtcagtttgaagtgctggtgccgctacgcaatgcgacgtttgcttttcaacccgactggccggcgctaaaaaatctcaacattgaactggatttcctgaacgacggcctgtggatgcgttcggatagcgtcgatttgggcggggtgaaggccagcaaactcgcggcggcgattccggattattccaaagagaaactgctctga

SEQ ID NO: 384744 - DNA, 243 bp, Salmonella enterica
atgcgtataacagtaagtgatatatcaaccagagaatcacagcagacggtacagatacaagctatcagaagttgggataccataccgtacctttcaatgttggatggactttatcaggacgatatctttcatgagcaaatatctaatttaccagaagaatatattaagctggatgagatggccaaagatgaagaaaagaacagcttaaatatttatgaattcttctttgagccaacacattga

SEQ ID NO: 384745 - DNA, 162 bp, Salmonella enterica; identical to SEQ ID NO: 188213

SEQ ID NO: 384746 - DNA, 660 bp, Salmonella enterica
atgttgatgcagcatatcggtgtcggctattttgggtattaccgagcaactgcttatgcgatgaaacactctcttatgcccgagattgggaagttaagaatgaaggctctgaacttctgggataagcacgggatccgtgccgcagctgatgcttttgacgtatcaacgcgaacactctactggtggcgccggttactgcgcaccggtggtccagaagcactaattccaagaagcaaagcccctctggttcgccgttcaaggcactggcatcctgatgtactcaaggagatcaggcgtctgagaactgagttacccaatctcggcaaagagcagatttttgtcaggctgaaaccatggtgtgaagcgcggcattttacctgtcccagcacgtcaaccattggaaggatcattgccggagctcatgataaaatgcggatgatccccgtacgcctcagtgccaggggcaaagcccggttgataaaaaaacgctcagtgaagcccagaagaccaaaacaataccgcccggtaaaaacaggcgaactcatagggatggacgcgattgaactcaggatgggggacctacgccgctatatcattaccatgaagtggtcaacaaaaactggccaccgcgttagagtttttccagtatcggttttctga

SEQ ID NO: 384747 - DNA, 426 bp, Salmonella enterica; identical to SEQ ID NO: 218216

SEQ ID NO: 384748 - DNA, 1134 bp, Salmonella enterica
atgaaagcagtaatttacaacggtccttatgatgtaaaagtaaaagacgtaccggatgcgaaaattgtccgccccacggatgtactcgtccgcatcaccaccaccaacatttgtgggtcggacttgcacatgtatgagggccggaccagctttgaacagggacggattctgggtcacgaaaacctgggtgaagtggtcgaaattggctcaggcgttgaacgtattaaggtgggcgactatgtttgtctgccgtttaacgtgggatgtggtttttgcgaaaactgtgaaaaaggtctgaccggcttttgtctcactaccaatccgggttcggcaggcgcagcttatggttttgctgaaatgggtccctgggagggggggcaggcggaactgcttcgggtgccatttgccgactttaactgccttgttcttccccctgatgcggcagaaaaagaagatgattatgtgatgctctctgacatttttcctaccggctggcatgcaacagaacttgccggattgaagcctggtgaaagcgtggccatttatggcgcggggccggtcggtttgatggcagctcattcggcgatcattaaaggtgcttcacaggtgtttgtggttgatacgcacacagaccggttggctctggctgaaaaaatgggggcgacgggcatcaatgctactggcgatgaagctgtacaaaaaattctcgacctgacggatggacgcggtacggattgtggctgcgaatgtgttggctatcagtgctgtaacaaacatggccatgaagataactctgtcaccatgaacagtcttgttgcgtcgacgaaagcaaccgggggaattggtgtggttggcgtctttattcctcaggatccgggggctgaatcggagcttgccagagagggtaagatgccatttgattttgggagtttctggtttaaaggacaggcaatccgtaccggccaggcgaacgttaaggcctataaccgtcagctgtctcgcctcatccatcacgataaagccagtccgggtaaaataatttctcatcgtctttcgcttgaagaggctcctgccggatataagcacttcgatgagcgggatgaaggatggacgaaggttatccttaagccttaa

SEQ ID NO: 384749 - DNA, 696 bp, Salmonella enterica
gtgcgccgggctggtggtgtaactcagggtcccctgggcgtgggcgccgtggctgcgcaccgcctgcagggcggctttcatattgcgcgggtcgttcatggcatcgaagacgcggaacacatccatgccgtttttcaccgcgcgttcaacgaagcgctccaccacatcatcggcgtagtggcggtagccgagcaggttctggccgcgcagcagcatctgcagcggggttttgggcatggcttttttgagctcgcgcaggcggacccacgggtcttcgccgaggaagcggatacaggcgtcaaaggtggcgccaccccagcactccagcgagccgtagcccacgtcgtcgagctgagcggcaatcggcagcatatcgtcaagacgcaggcgggtggcgaacagagactggtgggcgtcgcgcaggacaacatcggtaatggcaatggtcatggattcctccgtaaattaagggttaaggcggcgatggtggtggatagcggcggcaatcaccggcttgaggcgggcaaagtcgtccgcgggcacggcggcggcaggtgccagttttggcgccggagccggttcagggaagaaacggttgacggcggcggacatgccgcggatggcgaaaatcagcaggaacagaaatgccagcacgaaccccatgccgaggaacatcagagtgaagccttcacctaa

SEQ ID NO: 384750 - DNA, 435 bp, Salmonella enterica; identical to SEQ ID NO: 32303

SEQ ID NO: 384751 - DNA, 2406 bp, Salmonella enterica; identical to SEQ ID NO: 142780

SEQ ID NO: 384752 - DNA, 1077 bp, Salmonella enterica; identical to SEQ ID NO: 32301

SEQ ID NO: 384753 - DNA, 177 bp, Salmonella enterica
gtggggggggatttcaagcataccgacttcggcaagatcattttgccgtttactctgctgcgtcgattggagtgcgcactggagtctacacgggaagcatcgctcgatagccaaccagccacgattgagttcttagaagcagagttcagtgttgatttcgatgcgctgctatcttga

SEQ ID NO: 384754 - DNA, 987 bp, Salmonella enterica; identical to SEQ ID NO: 105543

SEQ ID NO: 384755 - DNA, 522 bp, Salmonella enterica; identical to SEQ ID NO: 105772

SEQ ID NO: 384756 - DNA, 300 bp, Salmonella enterica
atgtgtatcggcgttcctgtgcaggttatttcacccggtcagtggttcgccaaatgccgcgaccgacacggcgagcttatcgacgttgatattcggcttgtggctccccccttagcaggcgcatggctgctgacatttggcggcgcagcgcgacgagaaatggacgaagcggaagccgttgaggtactggcggcgctggactcgctggaacaggccatgctcacgcaaagcgatccgctgaccggttttgccgatttattatctcgcacgcctgaattaccggagcatttaaaaaaatga

SEQ ID NO: 384757 - DNA, 492 bp, Salmonella enterica
atgcgtaagagttacacatttggtattccatttggactccagagagaatcaggactctttttagatattacagaggtcagccggggtatcgactgtaactgcatctgccccgcttgcaaaactgatctgttagcaaagcagggggaggtcaagctttggcatttctcacacagtactgctgtagccggtgactgtgatggtctgatggaagccatccggggaaaaattattgaagtcatcaacgagcaccaggttcttggtttcccaaatcttctcgctggcgacgatggtgggccggtttcactgaatgaggttattggaagcggcagtatgttcggaggcacagctgatctgttcgtaaaggttaatgatttatgtgtggccgtctttctggacagggatcgtagcatttctgcgaagttaacctttgaccaccttcatccttccgaaagagttgccgcattgcgtatcgatcttccagatattgaatga

SEQ ID NO: 384758 - DNA, 615 bp, Salmonella enterica; identical to SEQ ID NO: 146752

SEQ ID NO: 384759 - DNA, 789 bp, Salmonella enterica
atgggatacgacgcttccggtgttgttgaagcaaccggaccagaggtgacgctgttcaggccaggtgaccacgttttctatgccggtgtgctcgatcgccagggagccaacgcagagtttcagctggttgacgaacgcattacggggataaagccggcagcactaagttttgaagctgcagcgtcggttcctctgaccggtctgacagcctgggaaatgttatttgatcgtctgcagttgtcagtgaacggagatgctgatcagaccctgttgatgcttggcggtgcgggcggagtcccttgtatggctatacagcttgcccgcactctgagtcgggtgaacatcatcgggactgcctcccggcaggagagtgtcagagcggttcgcgggtttggtgcgcattatgtcctggatcattcatgtgcgcttgcgccacaggttgccagccttgctggactccctcccattacccggattttctcaacgtacaccacgccatctgcctgggaaaatatggccgaaattattgccccacaaggccgtatcggactcatcgacgaccctgaaccactggatctgcgtttgatcaaatttaagagcgtttctgttcactgggaggcaatgtttacccgccccatgcatgctactgcggacatgtctaaacagcatgatattcttaacaaactctcatgcatgctggattccggtaagctcaaacctccgttgctggcagagtatggcaggctgaatgctaaagcacttcgccgggctcatgaggggctttgttga

SEQ ID NO: 384760 - DNA, 1152 bp, Salmonella enterica
atggatttttcattaactgaagaacaagaactattactggccagtattcgcgagttaatcaccagcaattttccggaagagtatttccgtacctgcgatcaaacgggcacctatcccaaagaatttatgcaggcgctggcggaaaacggtatttcgatgctgggcgtcccggaagaattcggcggcattccggctgactatgtaacgcaaatgctggcgctgatggaaatctcaaaatgcggcgctccggcctttttgattaccaacggccaatgcattcacagtatgcgccgttttggttccgcagaacaactgcgtaaaacagcagaaagtactctggccaccggcgatccagcatatgcgctagccttaacagaacctggcgcgggctctgataataatagcgccacaacaacctggacgcgtaaaaacggcaaggtttatcttaacggccaaaaaacatttatcaccggtgcaaaagaatatccttacatgctggttctggcgcgcgatacggagccaaaagatcctaaaaaagcgttcacgctttggtgggtggactcaaataaaccgggcataaagattaatccgctgcacaaaattggctggcacatgttgagtacatgcgaagtttatctcgataatgtcgaggtggacgaaagcgaccgggtcggtgaagaaggcatgggtttcctcaatgtcatgtacaattttgagatggagcgtttgattaatgcggcgcgcagtacaggtttcgccgaatgcgcatttgaagatgccgcccgttacgccaaccagcgtatcgcctttggtaaacccatcggccataaccagatgatccaggaaaagctggcgttaatggccatcaaaatcgaaaacatgcgcaatatggtgttgaaagtcgcctggcaggccgatcgggaagagtcactgcgtaccagcgccgcactggctaagctgtactgcgcacgcacagcgatggaagtgattgacgatgcgattcagattatgggtgggcttggttatactgacgaagcccgtgtctcccgcttctggcgcgatgttcgctgcgaacgtatcggtggcggcacagatgaaattatgatctatgtggcaggacgccagattctgaaagactatcagaacaagtaa

SEQ ID NO: 384761 - DNA, 1512 bp, Salmonella enterica; identical to SEQ ID NO: 118102

SEQ ID NO: 384762 - DNA, 402 bp, Salmonella enterica
atgcaacaagcttatccgcaattaggaatagaccctgtcgcctctaattgcgtggggctatcaataaagcaaatacagcaactggatttcgataaaattgatctgacggagtggattaatgatgcagttcaggtaggagaagttcctgatcaatattcaaaattctccgaagaatcaattgtggaaaacttaccattccagaatgagaactatcaacttccatcagaacgtaccaaggaagcaatgggcggtgaagaaaatatgataaaggccagacaagaaaatgctcaggctataaaagaggaaaatgtagattgtagctatttacctcgaccggccatatgtgaggtaggttcaactacgctggatccggttacgggcaagcagttgccgaaatattga

SEQ ID NO: 384763 - DNA, 513 bp, Salmonella enterica
atggaagctatcaataattacaatagcggtttaaatcgccatcaattaggtgggtttatccctgtttacgatcaattagcagggactcactattttttgattgatggcaacagattagggtttatgtttatctgtaatccatcccctggagtttttgataatcagcaagatgttcttgctgaaatgttcaaaatggatttccctacagatactgtctgtcaaatatctctgactgcattgccagacctgactttacagcttagtgcttggtcagctgtgcgaggtgggcgtatgactgggaacgataagcttaaagcagatctgcttaatggttatcagttggactactacgacagaagtatgcataagcctttaaaacctgatcatgataaccttatgttgagggattttcaggtatggatctcgctatcgattcctttacagtctgcccttcctaccgagctggaacattcgcgtatcgattcactttactctgaacttgtaagtaagtga

SEQ ID NO: 384764 - DNA, 921 bp, Salmonella enterica; identical to SEQ ID NO: 118119

SEQ ID NO: 384765 - DNA, 936 bp, Salmonella enterica; identical to SEQ ID NO: 118118

SEQ ID NO: 384766 - DNA, 879 bp, Salmonella enterica; identical to SEQ ID NO: 31774

SEQ ID NO: 384767 - DNA, 738 bp, Salmonella enterica; identical to SEQ ID NO: 117462

SEQ ID NO: 384768 - DNA, 801 bp, Salmonella enterica; identical to SEQ ID NO: 105635

SEQ ID NO: 384769 - DNA, 513 bp, Salmonella enterica; identical to SEQ ID NO: 31756

SEQ ID NO: 384770 - DNA, 1608 bp, Salmonella enterica
atgcaagaaaataccgtaattaaatatctaaataccaatatgtttatacgggaaattacacgctggtttgccagacgctcgtttcaaaaccggatatttctactgatcctgtttacatccaccatcgtgatgctggcaatcacctggtatctgaccgatatcacgaaagagcgcctgcattatcaggtgggccaacgtgcgcttattcaggcaatgcaaatatccgctatgccagaattagttgaagccgtagaggcgcatgatttgtcacgcatcaaagcgctgattgacccaatgcgctcgttttcggacgcgacttacattaccgttggcaacgaaaaaggtcagcgactgtatcacgtcaacccggatgagatcggcaaatatatggagggcggtgatagcgacgacgcgctgtataacgctaaaagctacgtatcggtgcgcaaaggttcattaggctcttccttacgtggtaaatccccgattcaggacagtaccggtaaagtcatcggtattgtttccgtcggctatactctggaacagttggagagctggcttaacttacaaatcagctcgttgctgttcccgatggcgttactgctgctggtactgttgtactgcgcccgccgcttctcgctgcatattaaaaagcagatgcttaacatggagccgcagcagctttcacaactattaattcagcaaagcgtgttgtttgagtcggtatttgaagggttgatcgccattgactcccatcaccgtattaccgccattaaccaaacggctcgccgcttactgaatctgagccaaccagagtctgaactcattggctatgcaatccaccatgtcgtgttgccggaggccttcttttacgatgcgccgcaaaaaaacaaaaaagatgagatcgtcacctttaaccaaatgaaagtcatcgccagtcgcatggcggtcattattgacaaccagcctcagggctgggttattagctttcgcaacaaagacgatatcaatacactcagcctgcagttaagccaggtgcggcaatacgccgataacctgcgcgccgtgcagcatgagcatcgcaaccttatttccaccattgccggactgctgttcctgaagcgctacgataatgcgctggcgctgattcagcagcagtcggaaagccaccagaaagtactcgattttatttcccataatttccgcgaccaccaccttgcggggctattaatcggtaaatattatcgggcaaaagagctggggctggagctgattttcgatccttcaagctttgttgaacacctgccgtcatcgctctcgcataatgaatggatttcgattgttggcaatttattggacaacgcctataacgccaccctgctcaatcgcgaaggctcgcgacagattgagtgcctgatcaatagcgaaggtaatgaagtcattattgaagttgccgatcagggatgtggtattgacgaaaatatccgccagcatattttcgagcgtggagtgaccacccacaacaacggcgatcacggaattggattatggttggtgcacagctacgtcaagcaggccaatggtgacattatcgtcgataacaattga

SEQ ID NO: 384771 - DNA, 1008 bp, Salmonella enterica
gtgttaaataaaagcacggtggctttatatttgatattctcattatgcgttttcgcgctttgcctttatatttccttcaataacccagttacatctgatggagcatctttatttttagaagcaaaagatatggcggatggaaacattctgctacgaggatggactctttctactgtatcgttttatttcactgaggcgatatggtatatgataataatcaggatttttggtgacagtatatacctgatgtatgtgttaccagccgtattctacacgattactattatgctggcctttgctctgtcacatacagatgggaaaatgaagtggtcaatcgcagcgctaattccatgcgtaatcatttcatctcctatggcgtcaaccatgacactagagacatgtgtacatgtaggaactatcatatttgctctggtgtgcttaaatatgcttaggtatgataaacatacaacaattaaactggcaagcgtcacgactctcactgctgcatctgtattcagcgactcgatattcaactactatatcactataccgatagttgttacttttgttgttcatgtattgataaacaaagactttagcaagtggcgctatgtatttgcagttattgttggcgttgtcatagcaaagtttcttgctttagtggcaaattattttggtctactaaacacccccgggactcaacctccagcatttgttaactacgagaatatatcatctaacctcaatcttttcattgttggcatcatccagtatttcgacgccttcattttcggaaaacagctttctgcaagcaatgcgatgatatttagtagatttgcagtgatgatattttggctagctcttttagttgtagctatcaaaaacaggtttaaagcttcgtttgttgatactgcattatccatttcctcagtattgctaccagccgcatatgtagcaagcaacatgcctgtagaccttggcactacaaggtatctggttttctcttga

SEQ ID NO: 384772 - DNA, 594 bp, Salmonella enterica; identical to SEQ ID NO: 119775

SEQ ID NO: 384773 - DNA, 1251 bp, Salmonella enterica; identical to SEQ ID NO: 384659

SEQ ID NO: 384774 - DNA, 141 bp, Salmonella enterica; identical to SEQ ID NO: 36145

SEQ ID NO: 384775 - DNA, 141 bp, Salmonella enterica; identical to SEQ ID NO: 272542

SEQ ID NO: 384776 - DNA, 1536 bp, Salmonella enterica
atgctgctgcgcggccagaacctgctcggctaccgccactacgccgatgacgtggtcgcccgctttgtcgagcgcgccgtcaaaaacggcatggacgtgttccgcgtcttcgacgccatgaacgacccgcgcaatatgaaagcggccctgcaggcggtgcgcagccacggcgcccatgcccagggcaccctgagttacaccaccagcccggcgcacaccctgcagacctggctggatttaaccgaacagctgctggaaaccggcgtcgattccatcgcgattaaggacatgtccggcattctcaccccgatggccgcttttgagctggtgagcgaaatcaaaaaacgccacgacgtgcgcctgcacctgcactgtcacgccaccaccgggatggcggagatggccctgctgaaagctatcgaggcgggcgtggacggcgtggacacggcgatttcttccatgagcgccacctacggccatccggccaccgaggcgctggtcgccactctcgccggaacgcaacacgacaccgggctggatatcctgaagctggagagcatcgcggcgtacttccgcgaggtgcgcaagaaatatcacgcctttgaaggccagctgaagggctacgacagccgcattctggtggcccaggtgccgggcggaatgctcactaacctggaaggccagctgaagcagcagaacgcggcggacaaactcgaccaggtgctggcggaaatcccccgcgtgcgcgaggacctcggctttatcccgctggtgacccccacctcacagattgtcggcacccaggcggtgctcaacgtcctgaccggcgagcgctacaaaaccatcgccaaagaaaccgccggcattctgaaaggcgaatacggccacaccccggtgccggtcaacgccgcgctacaggcccgcgtgctggaagggggcgctccggtgacctgccgtccggcggacctgctgaagccggagctggctgaactggaagcggacgtcaggcgccaggcgcaggagaagggcatccagcttgcgggaaacgccattgacgacgtgctcaccgtggcgctgttcccgcagattgggctgaaattccttgagaaccgccataacccggcggcgtttgagccggtaccgcaggcggaagccgcgcagccggtggcaaaagcagagaagcctgcagcttccggtatctacaccgtggaagtggaaggcaaagcctttgtggtgaaggtcagcgacggcggcgatatcagccagctcactgctgccaccccgtcttccgcaccggttcaggctgccgctccggcgggcgcaggcacaccggtcaccgcgccgctggcgggcaacatctggaaggtgattgccaccgaaggccagacggtggccgaaggcgatgtgttgctgattctggaagccatgaagatggaaaccgaaatccgcgccgcgcaggccgggacggtacgcggcatcgcggtgaagtccggggacgcggtctccgtgggcgacaccctgatgacgctggcgtaa

SEQ ID NO: 384777 - DNA, 252 bp, Salmonella enterica
atggctttatctaataaagagcgtcaaaaacaatacagaaatagtagaaatagcaggggcgggttaggtgactcacgcattaatacatttgtgacatttgaagctaataataaccttaatcggctctctcgatattataatcttagtaagcgtcagattctggaactattaataaatacagctaaccagaaattaattgataatctggaaatagactctcctgaatggaataaatattttaattgtgattaa

SEQ ID NO: 384778 - DNA, 189 bp, Salmonella enterica
atggtcttttctgactgcatgaaaaaatgcatgtttattgagtacggtgtctttaataccgtactcttgtgtcaatatgacactttttcgattaaattattcactaaaagtgaatgtttattcactattttttatctctttctcaagtctggatatgaacttgcttttatcttttatgaaatggtatag

SEQ ID NO: 384779 - DNA, 357 bp, Salmonella enterica
atgcttaaagatatacttaaacagagtcgcgaaagattaaaattgaaacaaatggaagtcgctgattacgttggagtaacaacacaaacctatatgaaatgggaaaacggtaagaatgagcccaaagcaaataacattaagaaattagccgaaatactaaacgtttcagaaacggagatatgtcgcggagaaatgtatgatattgatatatatgaacaagttgactttatgaaaaaggtagcatctttgcaaaattcaatcgacgaagtcacttttacatccctactataccatttcataaaagataaaagcaagttcatatccagacttgagaaagagataaaaaatagtgaataa

SEQ ID NO: 384780 - DNA, 1278 bp, Salmonella enterica
gtgattgaccttttacaattatcgatcccgttcaaatctgagcatgtgatcgagactctctcggcagatgagcggggagggcgttacatcgatttggaggaaatcgccagacgtaccggattgcgtctgactgcccgtgatgttgagtttgaaattagcggcgatttacaggttacagggctttcacatccctatgaatcgttgccgtctcacttctctagcctggctatgaaagtgcatcagggttctaatctggctccgcctcgcgttgagctgaaagcatctcctgctaagttgttgcaggggcacaacgtttttggcccgactgatgtttcattgtgtgctgaggcgttatttacgccgttctgtatggctatgccgttactggctgattatctggattttgagaatgcttatattgctaaaatagactgtacattttctgcgcgtctgaaaacaattaatcagactcgtcaggtaattgatattttacgtaatattgacaatggtcagactaaatcaacgaaaagcacgcgttcacaaaattatgattctacagtatactggaatgaaacaagcaatatcgtacgtcgcaaggcttatttaaagggccaggaaatacagctagatttagatagttgcaagatggctttacgtcgttcaccaaatgatgaaactttaaaacgtcgcattaatgtattaagcaatcccgatttaatcgaatgggctgcgttattagttcgttttgaagcctcactatttccaagaaaattttatgatttaaatattccgacaatcttacttgatttaatttcttatcaaagtgaatatgagagagaagggcgcaatttaatatatgacatgtggagcgccggatttaatgagctatttgaatcgtttaaaggaacggttatgaatatatatgatgatgaaaaaatccttgaattattgaagtcggtttattattcaatcacaccgaaaggtaatattacttattctaaagcgcttcgtttatttaatttctatcgctgccttgtaaatgaaggttatgacgaagttcaaaatagaacccctcgcaagtctttttacaggaatataaacgagttaattgcagtcggaataagtaaggcgcaattacagaatttacaggctgacaaatccaataatgttgttccattggttcagcttattaccgttgatttcagtaatcagtatcctgactggtatgaagagccggttatccattatgacaatgttatacagcttaaagcttcgtga

SEQ ID NO: 384781 - DNA, 276 bp, Salmonella enterica
atgattaaagttgaaataaagccctcacaagtaacgtttgatgagcgttcaggtgaaaaagatggtaagaaatggtcttctcgtgagcagcacggttatatttttcttggcggtgattaccctgaattatttgtttttcgcttacaggacgggcaactaccttacgcagcgggaatttatgaacttgttgaatcgtctattgaagtgggtcagtacaaacgccttacattttctcgttcgtttgcgttgcgtcctgtccagaataataaagcgtaa

SEQ ID NO: 384782 - DNA, 309 bp, Salmonella enterica
atgaagcttcctgatatttcagtaattaaaaaagagatgggaataccacggcattttaaatttctcggatttgttatttgcaacccgtttaaagatgattaccttgctgaatatgctgccagtactgaggcattttctttttcaacatggaagccaacgcctgaatttgcatccaagtttgattcttatgaatctgcgtctgatgcgtttaatcgccttgaattacagggtaaggctgaaattttaatggcgtttgatttgggttcgcaggttgccgcctgtgagattccttctgattacctggagtga

SEQ ID NO: 384783 - DNA, 258 bp, Salmonella enterica
atgtctttacacatgtcgttatatgattccggtgtaaaaccttctggtgtgctgtttaatgaggctgtatataattgccttattgcggttgtggaagatatagaaacgttatcatttctggcgtctatggttcctcagtcatcatctgataaggaattcgagcaaatggattctttcaggcgtttattttctaaaatggtggattcagtccagaccgattttaacgcgcttcaaaagtcgctttatgatgcccgttaa

SEQ ID NO: 384784 - DNA, 252 bp, Salmonella enterica; identical to SEQ ID NO: 384777

SEQ ID NO: 384785 - DNA, 189 bp, Salmonella enterica; identical to SEQ ID NO: 384778

SEQ ID NO: 384786 - DNA, 357 bp, Salmonella enterica; identical to SEQ ID NO: 384779

SEQ ID NO: 384787 - DNA, 1278 bp, Salmonella enterica; identical to SEQ ID NO: 384780

SEQ ID NO: 384788 - DNA, 276 bp, Salmonella enterica; identical to SEQ ID NO: 384781

SEQ ID NO: 384789 - DNA, 309 bp, Salmonella enterica; identical to SEQ ID NO: 384782

SEQ ID NO: 384790 - DNA, 258 bp, Salmonella enterica; identical to SEQ ID NO: 384783

SEQ ID NO: 384791 - DNA, 192 bp, Salmonella enterica
atgggcaagccggaatatacaaccgtaagaatgagagacgacagaaaaagacgcctagaaatggcagctatagaggttggttatgccaagaaagaaccttacaagtggacagatatacttttttacttgatagatgagcatttagatgaggctgttaaggatttaaaaaacaaaaggctaaaaaatacgtga

SEQ ID NO: 384792 - DNA, 1299 bp, Salmonella enterica
atgaacgccatcgaaaaggatcacatcaacatgaccgccccgctagaccgcgtaggccgtgcggtagccatgccaaaagcggatcacgatgaccgcccggttaatatcgactggctggcgttcgttctgcactcgtcggcggttaaagattttgtgacgttcccggagcaaaccgaatggcgcaaatacggcatgttgccaacctatcgcagccacgttctggcgcgtgacacgtttttcaatgacgtaatcaaccctaagacccgcatgtggtgcccgctcaccaataccgaaatcgaggaagccttcgacgagttcgtagacggttataagtttcctaatgaggattttggcggggattttcgccttgcaaaacaggcgcttgatactcaaatcgagatttttaaccgtaagatgatggaagcgcggatcgagatgattcgccgctggctggctgctgaatttggtctgcatctcggtgtattccgtggctatggacgctactgttatcaggaccacgcgccgctttacgcctataacgacaatacccgcgtggaactcggtttgctgtatgtcggggggaatgaaaataccgtttttattcagataaatgcccatggttgtcagcatgttttttccggtacatccccggaacatcttcacaaatggtttacccatctggggatagttaaattgcagcgcctcgatttatgcgttgacgattttgatgatgtatttaccgtccagcatgcctatagcgactatcagaatgacgcgttctaccgtggtaaaggccgccgaacgtctgaatatgagtacaccattggtactaaagaactgcttacagttggtagtcgtaaatctctgtattactggcgaatttacaataaagcgctccagctcggccttaaaatgacgtggaaccgttccgaaatagaattaaaagaggtccccgttgatttcctgcttgatatccggggctattttacgggaatttgcgactacgccgcacagcttcaccccgcggagcttcgcaagataaatccttttaatgcctcgctttctgacactcgtaaagccctgcagacgtttgattcagaagtgaaatggcttcggaaacagtgttcaaaaaagttggcttctgtgctgcacgaaatgggcaacgacatagaagcatttataaaatccgtcataagggaggaacatttagaagacgcagaccttagattgcccatacatgaaacttattcgtacatcgtaagagaccagtttttaaaaaatagcccggtgccgttttaa

SEQ ID NO: 384793 - DNA, 414 bp, Salmonella enterica
atgtctaaagaattgacttattccgttattgttactgctgtttctcatatcccgtatattgataaaaagacgggagaagcccgccttatgtgtactatggcaaccctcgcagatttagacgtagaagaccgcacggttggacgtggttttattaccgaaaatctctccgttgataacaatggcgaggtcgctttacgtctccaggaagaacttaaaaaggcgttctctcttggttacgactatattcacgtaatcccccaggttaaacggcaggcgcgtagccgtggtgacggtcaaagtgttgtaggctcctatcagcttgtcggatacggtagcttttctagtgtgcctctctccgaagttaagcagccggataataagccgactgattctaaacagcctgtcaaggcttaa

SEQ ID NO: 384794 - DNA, 363 bp, Salmonella enterica
atgatgattaagtcatatcctggaattgctgacgcgctggattatgcccggttttgtgacgttaattcgtttgacccggagtctccctatatccgccagtactataaaaaatccatttcccgccaggctaaacacgagaaagtttttagttcccgtcgcacagccggtgcgcctcgtcctgtatacgctattggactgactgctgctatagaactggcggtgagtcacctcagcgacaatcatcccgtccccgttcgtcatcgttgcgttgcctgtgatattgaatttactggtgcgcgtcaatgcccccgctgcggtaatcacgtttattgtgtggaggtggttgatgaaccttgcaaataa

SEQ ID NO: 384795 - DNA, 222 bp, Salmonella enterica
atgaaccttgcaaataaaaaagtatgtgaattattgcaatacgcatccaataataactattgtgtcgaacttcgctggagttatgccattgttgacggttttcacggtaaacaggtttttattgttgatgataatccgaacgttcttatttattccggagaatttgaagtatcttgcctgatttctcctgatgaatttaaacgcatgtttgctaaacgttga

SEQ ID NO: 384796 - DNA, 264 bp, Salmonella enterica
atgaatcaactggacaatcccttaatttgtgaactggtcaaccatgctattttcaatggctattatgtcgatttgtccaatactaaacactttgtaagggcttattatcatggtggctatgttgctctcttcgaaaactgccgtagtgaaatcgtgattattaacaacgattccagcaaacgtcgcttttctgatttcggcactgaaatagatattgtcgaattttatcgcattttttcgaagcgcataaaaggtaaggtctga

SEQ ID NO: 384797 - DNA, 270 bp, Salmonella enterica
atgaaacttaataaccctgtattgattgagatattagaatcggctattaatcaacgcgctgtcattcagatgaatgatgctttcgcgactgtgactttttatcatcaaccgcaccttaatgatttggcgattgtttactatatcggctatatctgctctgagtttgataactcattctgcatctggcgtagtgaaatgcatcgcgataatcttatttctgttgatgattttaaagaatttatagctaactattcttactatggggaatag

SEQ ID NO: 384798 - DNA, 180 bp, Salmonella enterica
atggagggcggctatcttgaaagattttatctgactgtgttcgatttatcgcagttttctgattccccgctgaatgcactgatattctactgggtattttgtttattcgcgggaatagcaaccgggttattctttggatttcttaaagatgtaatccgtatatcgactaatcactattga

SEQ ID NO: 384799 - DNA, 312 bp, Salmonella enterica
atgtttaagaaaatcgcttcttatatggcatcaaaatatcatcaggctaaggactttgtaaaagggcatgcccgtacgttcgcggcgtctgttactgtggcggcgttaacccttccgggtatcgcttccgctgcggctcccactgacccgtcagcgtttattactcaggctatgcttgattccattaagacgcctattcttgctgcgatgggcatgattgtggctacggcctttactattctggcgttccgcatgactgcgaccgtgggcttcggaatggtgaaatcattctttagttcatctgcacgttaa

SEQ ID NO: 384800 - DNA, 1782 bp, Salmonella enterica
atgaaagggctgttattcgtcattatatcgctattgcttattccattttctggcgtttcatatgctgcggttaacacatgtccggcaaacgctccggctatttccggtcatttcgataatgtgactattggctatgatggtcatgtccatacgtcaaataatggatgtgattacgtttcaactggcccgattaatcctactgtaactgttatccctgattctgatgatggcattggcccgtctgctggttatgatggtgaattaaaaccaactggcaaaactactgaggaattcgaaaaatttaactccacttatatggcaactgagcaggattttgaaaataaatataattcacatcaacaacaacaagaaagattatgtaaaatgtatggctgtgacgcttccggtaatcttctttcggatgatgaaaaggttaatcctgattttaaaactaaaatattagacccgactttcccacgctatgatgtatctaagtcactttctcaaaattcggctaattttggtgagtcaattaaacgttttaaagactataaattttccacgctttctaatgcttataattatcgtgatgatttattaaaatcttacgatacaataaccaatgaactttataaattatttcccagccctccttgcggcggctggcttaggcctactgacccccagggtatagctaattgtgctattgctaacaggcagtcaaatgcccgggctgcttttactaaccagttttataatgtagacaatcttccttccgatgtttctcgttttctttcaaacagaacttacggatatcagactacttttaatgaatattttcagactatggttgaccctctcgcggtgatggctggcaatggtcagggcagtgacggcgttaatggtcagaacggcgctgatggtaaggacgggaaagatggcagggatggacttaacggccgggacggtaaagatggcgctaacgggcttaatggccgtgacggtatcgatggtcagccgggggaaaagggcgataaaggcgacaagggcgagcgcggggaaaagggcgagggcgttgataacgaggaacttgcgcgattccatcacgattctgtagtagcctccggcaatattattgaccttcttggtcggatacatgatgccgtcattggttcgggcagcagttcccttccgtccggttcttcccccgtgtccccgtccccgtcgattgaccagggcggtagctctgcaacgcccggtcagtcgacggggcgaccttctggctcatctgatggcaatgactccggtttactcaatgaggtacaggggttccaccatgacgcaaatgaaaatgcgcgtaaacttattgaggcgttatcaggtcagaataaaaccggtgatgatactgatgatagtgatggtgttgatgattctgatgaaataaattcccttaatgattctgctgaggaattcggtctactttctgataaggctttgcatgattacgaaaatctgattaacaatgtaaacgttcctgatatggatatctctaagggctttactgacatgtttaaaggcgctggcggtgcctgtaagcctttttcttttgaaatacgcattcctctttataattctcgtgtattagctcaacgtgtttcgctggataatttctgtttcttctgggatacatacgcgcgggctttgcttaatttttcgtttgatattgcggcgtttattgcctgttatcttattcttatgcgtggtataaggcggtatgaatga

SEQ ID NO: 384801 - DNA, 378 bp, Salmonella enterica
atgaaaggtttatataaatggcttaaacgtttaaccgactgggttttgggtcttattggtatttctggaacggtatcaacggcggctttttttattcgtcttggtattaaattttcgcttattgttgcacttgttgcgtttgtttccggccttgtttcgccgatggttgtttcttatctcggcatcaacccggaattgtggacgttctttatatctctggtgccgtctcatcttccgtatgatgtcgctgcggtattttccacacaattagcggttatggttggtaaatataaacttgatgccattccgaaagaactcagtacatttaatgaacttcgtaagagatggaaattgccaccaatcaaggggaaaaagtaa

SEQ ID NO: 384802 - DNA, 1353 bp, Salmonella enterica
atgtcggtttatcttgttgaaggctcaatggggcagggcaaaggaattttcgccgcttaccgtgcgtgtcagtattatcgtaaaggtttaagggttgcgtctaattatccctttgatacttattatcttggtcaggattctgaaaacgtgattgactgtttgcctataatacctacggcagaatcgcttttatctcttggttttggttctcctgatactgactctcataatggcgcgctttttcttgatgagggcttactttttcttaattcccgtaattttgccagtaaaggccggactcaatttaatgagctttttactcagattcgcaaattacgctgggatgtttatatcatggtacagggtatagacatgattgattctcaggtgagagaaaatcttgttgattatcatgttgtggttgaacgtcttgaccgtcgtcgtgttccgtttattacgtcgcttcttgaattatttttcccgtcccgttatggtttgcttgctgataaaaagtctttattgccgcatgttgttatggcgcatacttatttaaagcgcaaagagcatcgcgtcaagcctcagcagactgaaacgcttaaacctaagcgctattatgcgatgtatgatacctattttcgttttagccccagcgttccctataattttctcggtcatgattataatctggctcttggcgatgattataggttaccccagacgactcatgcttatacaatgctttccggtgcttatctccgtgatgcatataaaaaatacagtcccgcgcctttttatcctgatggtaaaaacctgccatctcttaacgttaccagttctaaacctgtattcagtataaaaatgttattcagcctgataactcttgtatttcttggctatctgctctggcattattttcttcctctttattttggtacagatgaaacggaaactgatgacattgcttcggttcccgttgtcattaacggtcatacgtatacggcggcccaggttaaacagatacagcagataatgaaacaatctggtgatggtaatggcgtggccgttctcccggcagcagctccgccgccaccgcccgaactgtctcagacatggcgactgactggctatattcatgttcccggttctgagccgcgctatgttatccgtgatttgtccggtaatgttcgctatgttccgtctcacgttccctataatgcacaatattctgaaattgttgttgatggtgaacgtgtgacgttttacagcggttcatctggtcagaataaaaccccggattcattgcctgttactggttcgcttctttcaatactcccgcagggtaaggataaataa

SEQ ID NO: 384803 - DNA, 1227 bp, Salmonella enterica
atgcctaagcttccgattatgacggctgtttccattcctgttattgccgctattcttttttcatcgcgtatacacgctaaaggcactgatttcgatattaatgccatccctgtatctgatgcggtttcgttactctggaatcaggttttacataaaccgtttatgttgtcgcctgaactggcagcagatacccgtaaacttacttttcacatatcccctgataatgatgaacgtgagtttattacccgatatttgctgaatatgaatattaaggtgacaactaaaaaaggcgttgattatatttcttcatttacgccgcccgcgccacgtcctcatctggtgaattatgtttatacgccacgttatcgcagcgtggggtatttaactcgttcattatcgatgttgtttaatgatgattctggcgttactgtaaaggcgtctgattctcaggctaatcaggctccccaggataaggcgggatttatgagtaatgacagtgacacgcttgtatttcgtggtacgtctcagcaggtggcgcaattaaaagatgtattaccattggttgatacccgcgcctctgaaatagatgtcactgcctatgtttatgaggttaacactaatgagcgtaatggttccggttttgcactggcggctaaactgcttaatggccgttttgatttcaggctgggaacgggcgaggggtacggtaattttattaaactctccacaccctcgattgaggcgctgtatgagttattccgcactgacagccgtttcagcgttgtcagtgctccccggttgcgtgttatttccggtgatgagggtaaattcaatgtaggcgcgtccgttcctgtactgggttctgtgagctaccaggacagaaacgccgttcagtccgtcgattatcatgattctggtgtgatttttacggttcgcccgtcgattactaatgatttgataactctccgtattcagcaacaaatcagtaatttcgccaaaactgaaaacggtgtaaacaactcgcctacgttaattaagcgcgaggttaaaacggcagtcagtttaaaagacggtgaaataattgttctttccggtctggctgaaaataaaacatctgacgctaatacaggttttacatttctgcctaaatcatggtcgggtaaatcaaaggacaacactaaaacggatattgttatcattcttcaggttagaaaggttaaggagtga

SEQ ID NO: 384804 - DNA, 162 bp, Salmonella enterica
atggattacgatgatgtttttgtctggccggatgattcctggctttatcgttatgaatatagcgagttgacagaccgttggcgcggtcttgattttgaaattctttatatcggcacggatgaatataatgctttttttggtgatttatgttctgagggttag

SEQ ID NO: 384805 - DNA, 279 bp, Salmonella enterica
atgaataaatttaataggtttgatgttttgtttatgctggatgttattgttattctgttttctccttttgctctctggaaatttacttatttgttgttattttctgattcatctccatttatgggcgataaagttgcggatttagccgttcctgatttttttaatatgttgataatttccgcaattgttctttttgtttatcattttgttttcatgcattttattcaatccgtttcttctgtggtttcgtttgttattaacagaaaggactatcgataa

SEQ ID NO: 384806 - DNA, 150 bp, Salmonella enterica
atgacgcgaaattcgctgattctggccgttatcatagcggtgacggttctggtgtttgcccgtatggagcgcggatcattgtgtgaaatgcgtctgcatattggcaaagtggagttcgcggcacttctgaactacgaaaacagaagttaa

SEQ ID NO: 384807 - DNA, 1401 bp, Salmonella enterica
atgttcattcccccattttacttacaccagccgttacattatggtgatgtaacctttctcatttggatccccagaatggcacttccaagacaaaaactcaccttcgagcgcattcgaaaatttgctttaactgaagggaaaaaccaagcatttctttgggatgcggatgtaacaactctggcatgccgggcaactcgcggaacaaaagcttttgtgttccaaagcgtatatgcgggaaaaacccttcgcatgaccattggcaacattaacgattggaggattgatgatgccagggccgaagccaggcggctgcaaacattaatcgatactgggatagatccgcgtatagctaaggcagaaaaaattgctgaagcggaatcacagcaggctgaatctcgtaaaacgaaggtaaccttcacaagcgcttgggaagattaccttgaagaattgagaaccggaatcagcgcaaaaactaaacgtccttactctgcacgctatattgccgaccacgttaacttgtccagccgtgggggcgaaagtaaaaaaagaggccagggcccaacctcagctggaccattggctagcttactcgacctacccttatcggaactaacaccagagaacattgccgcatggctaagtaaagagagacaaaatcggcctaccgtcactgctcatgcctaccgtctgttgcgtgcatttatcaaatgggctaattaccagaaaaaatatcagggaataatccatggcgaccttgcacaagatcataacgtgagaaaaatggttccagtatcagcaagtaaagcgggagattgcttacaaaaagaacagttaaaaagttggttcagtaccgtgcgtagcctcaataattccattgcatcggcctatctccaggtacttttgctcaccggtgcacggcgtgaagaaattgcgtcacttcggtggtctgacgtagatttcaaatggtcaagtatgaggattaaagacaagatcgaaggcgaacgtatcatccctctcactccttatgtttctaagctgttaaatgcgctagcgcaattcccaaattctgacgtaaataaggaggggtgggttttcaaaagtaacagcaaaagtggcaaaattattgaaccgcgttcagcgcacaacagagcgttagtgctggctgagttgccacatatcagccttcacggtttgcgtcgtagttttggtactttggccgagtgggttgaagttcccactggtattgttgctcaaattatgggacacaaacccagcgctcttgccgaaaaacactatcgccgtcgtccgttagatctattacgaaaatggcacgagaaaattgagacatggatcttaaatgaagcaggtattaccataaaaaacaacgttgatatgcgttga

SEQ ID NO: 384808 - DNA, 447 bp, Salmonella enterica
atggcaaccccagcaactgtatccatagaacccactctggcagctatcagagctcgctggtgttttaattcaagtagaacaactcaatcctttaacgatcctgcgtccatggaagaggttgtcgagtatctcaaaggaacatactcagctcttcgcaagtctgtcgcgtgcgccaaactgaaaattttacatcttaaacaaagaatgcaaaatgctactaactttctcgcgcgtctgatgtcatgtaaaaatcaggcatccagatcgcatcacagtacggctaaatcagctaaaagtgccttatcatcagattcaggtgatggtaatgaccccgaccccgagcccgagcccgaaacgtttccttctgccttcattactacccctactaattcaataatgcttaaagctttctttgccaatatctcaatcactgaggtggcaaaatga

SEQ ID NO: 384809 - DNA, 225 bp, Salmonella enterica
atgagcgcattcaaactcccggatacatctcaatcacagctcatttcaacagctgagttagctaaaatcattagctacaaatctcaaaccattcgtaaatggctttgtcaggacaaattgcctgaggggctacctcgcccaaaacaaatcaatggccgccattactggttacgtaaagaggtcctcgattttatagatacattttctgtacgagaaagtctataa

SEQ ID NO: 384810 - DNA, 627 bp, Salmonella enterica
atgaaaacatataaaggcccacatggagatcatgttctgcagtattgggtcaagattaataaattaatctgccgcttgactgactgttatcccagactaacggcggtacgagtggatctccattatccgaagatagtcgataacggagacaatatctcctgtttccctaatctggaacctggtgtgatatcccggatgcgtgaatctctcagagctaagctggaggctgatcgtacccgtaaggagcgtgagggtaaacgcatttaccgttgccctttatttattatatgggcgaaagagtattctgagtcaggtaaatgccactaccacatttgcctgttgttcaacaaagacgcttactaccacctcgggggctacgaacgcgaagataacctaagggggatgattacaggggcgtggtacagcgccttaaagttacaccgggaagatcacccgagtctggtacattttcctgataactgtaagtatgtgctggacaccaatagtactgacttccagcagaactaccaggcgttgttaacccgcctggactacctcaccaaagtcgaatctaaagtgtttggtgaaggggatcgtaacttcggatgcagccaaatcgatttataa

SEQ ID NO: 384811 - DNA, 225 bp, Salmonella enterica
gtgatttacactacgaatgttatcgaatcggtacatcgccagttcaggggactgaccaaaaccaaaggtgaattcccgaatgaaaacagcctgttgaagctgctttatctgggtctgatgaatgcacaggagaaatggataatgcccatccagagctggaatttgacattgtcgcagttagccatttattttgacgggcgactgaataatgtgatgacgctgtag

SEQ ID NO: 384812 - DNA, 981 bp, Salmonella enterica
atgtcccagcccttcgatttcaacaaagcgcttaaggtactccagtccgatcaggcattaaccggcaaagagggtatcttaacgccattaatcaaacagttaacagaagctgctttggccgctgaacctgattcccatctggcttcggatgtggaagctaaccgtaaaaacggctccggcaaaaagaccattaaagccccgaccggcagctttgaactggcaaccccgcgcgatcgtagcggtacttttgagcctcagttggtgaagaagcatcagaccacgctgtccgacgagatagaacgcaagatcattcgcctgtttgcgctggggatgagttaccaagacatcagccggaagattgaagagctttatgccttcagtgtttccactgtcactatcagtgcggtaaccgataaagttattcccgaacttaagctatggcagcagcgtccactggagaaggtttaccccttcgtctggctggacgctattcactataaaatccgtgaggatggtcgctaccagagcaaagcggtttataccgtgctggcgctgaatctggaaggcaaaaaagaggttctgggtctgtatctgtcagaaagcgaaggcgcgaacttctggttgtcggtattaagcgacctgcaacatcgtggtgtggaggacatcctgatagccttcgtggtcgggctgacgggcttcccggaggcgataaacagcatttatccgcagacagaagtgcagttatgcgtcatccaccagatacgcaactcaataaaatatgtcgcgtcaaaacaccataaagcgtttatggtggatctgaagccgttttaccgtgcagtacaaaagaagcggcagaaacggcgcttgatgagctggaggcgaaatgagggcagcagtatccggtggtgctccagtcatggcggcgtaagtgggaaaacctgtcggcgtacttccgttatccggcgactctccgcaaggtga

SEQ ID NO: 384813 - DNA, 1269 bp, Salmonella enterica
atgagccatccagtttctgaacagttacagaaatggcgcagacagtttcaccagatacccgaaactggctggtcggagtttgtaacctcggcaaaattgatcagtatattgcgtgatatggggtatcaggtactctgcggtaaggagtttcttaataccgggaccatactgggacggcgtcaggaggatgttgatgcaggtctggcccgtgcgaaggctttgaaaattgatcctcaactgatagatgaaatggaaggattgactggttgtgtggcgttactggatacaggtgtggcaggaccagcgactggaatgagatttgatattgactgtgtttctgttgaggaaagtcaggaaaatagccatctgccgtatgaacagagattctcgtcacaaaatccaggttatatgcatgcctgtggtcatgatggtcatatggctgtaggactgggaatagcgcaatggctgatggaacatcaattgactctcaaagggcgctttaaactaatatttcagccagcagaggaaggtgtgcgtggggccagacctgtagctgatggaggtattctggatgacattgattatttcttttcagcccatttggggatgggctgccccagtggagaaattattgttaacccgttgagttttctgtgcaccactaaactggattttcgattttacggaacatccgcacatgccggagttaatccgcagggtggagccaacgcccttgctggtgcctgtcactgtgtaacccagttactggccatccctcgtcatggtgaaggaatgacccgtattaacgttgggattttaaaagctggagaaggacgaaatgttatcccagccagtgctcagttacaactggaggttcggggtgctgattcgcagataaatgactatatgattaaacgtgctttaaatattggtaaaggaattgctctgggatttaacctgcgctttgagcatgaagtaatgggggaggccattgatttacataatgacacagaactgattgatttggtgagccacatcgcccgggatgaagtgggactgtcgcttcgggaaggtgaatttggtggtagtgaggatgccacattgctggtccgacgggtacaggaacatggtgggaaagcgatctattttgtactgggctctgatatcagtgcgggtcatcatgagtcttgttttgattttgatgagtcatcattatcattcggggtccggatattcaccgggtgtatatccgtgttaaataaacgttaa

SEQ ID NO: 384814 - DNA, 1290 bp, Salmonella enterica
atgttaaccatcatatttggtgttttggtgctttttgccaccatttttttgttaattaaacgatatgatacacgggcaacacttattggttcaggggtaattctgtgtattatttccttatcaccaatgagtgcttttagcgctttttcaatacggatgactacttccggattgattgagtctatttgttccagtatgggatttgcctatgtgatgaaatacacaaagtgtgatttggcgttagtgcagcttctgacccgtggtttatccagaatggggcttttattaatcccggcctctgtcgccgtaacatttgtagtatgtattgcaattccttcagctgccggggtctctgctgctgtaggggcgactctgatccctctgttaattgctgcccgtattcatccggcaatagcagggggagcggtactttctggtactctgggagcatatctaaatcccggacttgctcacaatgtattcatttcccatatatctaatactccattgatgaagtttgttttttatcatgctcctgtaactattacttgtggggtgatttgtgcaatatgcctgactttggtcgctatatttgccagagaactcaactataaacctgccctacaacctgcacaggagactgcacctgatatcagggatagtacccttacagaaacacatgacttgtcatttcatctgaaggttatcgcaccatttttaccagtgatattgctggttatggcaggtatcggttggtttggtcagataaaaatgaacgtacccgcagcaatgattattggagccatatatgcattattaattacacgagccaacccgggagaactgaccaaaagtttcttcgacggtatgggaacatcatatgccaatatactgggtattatcattgccgcagcggtgtttattgaaggactgaatactgcaggtattattaaagagtttattcttttactgaccagttatcctgaatttgcccgctggggagggacgctgggaccgttctttatggggctgattactggaactggcgacgcaacggcatttgcatttaatgaagcagtaacacctcatgccaccagttttggttatggtgtgaataatcttggtgcttccgtgatgctggcttctgctctgggtcgtaatatgtctcctctggccggagctgctattgtgtgtgccggattagcaggtgtcaatccggtcgaaattgccaaacgtactgcaccgggtgcaattgtagctgtactttttattgccatctttttcttataa

SEQ ID NO: 384815 - DNA, 942 bp, Salmonella enterica
atgaagtacttacccaagcttcaacagattaaagttttcaatgaagttattcgcagtggcagtatacgggcagccgccagaacaatgcatcagtcacagccggcactaacccggacgttaaaggagcttgaacaccatataggggcaactttacttgtaaggagtaatgaaggtgtgactctgacggaggctggaaaatcttttgctatccggtcacactttattttagaagagttagataaggcgattgaggagattaaggagattaatcaaaatgcttattgtcgaatagcttttggaatatcttcgctattcggagttactattctaagtcggataattgaaaacttcaaaaaatcaaaccccggaacgctgaacaatataaaagaggcacaactatcaacactattacccagtcttcgtgagggtcgacttgattttgctttgggaacgttaaccgatgatatgccactgggcgattttattgttacgcctttatttgacgcacctttttgtattgtcggcagaaaaaaacatccattaattaattgcaattcagtacaggaactggcgaaagccagatggctccttccggaaacagacatgggttattatcagtacattaaacagtttattcccataaattattcagattgtcagtcagctccagtactgacagattcaacggtctgtatcatgaatctggtgatgaatagtgattatctgacagttctggctcaagcccggttgaacgagcctcgttttggtgatgtactcagtatcctgccaatcggtcactcgctactgcccgttagtcactatgggttgatttatccacgaaaaaggccactaacccaggcagccctatcaatgactgaacagtttaaatggcattgccaacagcataactgggccccgtacttaaatgacaatacaatttga

SEQ ID NO: 384816 - DNA, 333 bp, Salmonella enterica
atgaattttctcaaagcatataatgattttaaagaaggtctaaatggaacagatagttatgttgttcttgagcgtaatatgaccttgcttatcaatgaagaccaacgtaatgctgctatttattttactatccgtagatttgcccatacttacgttcttctatatgcggatcaggcggtaacaacagagtttgctgatgatgtaaaatatgaaatgcaacaatatttaaatattacattacaagtagttaataatgaatactcacctgaaaggtcatgggtggctctaaataaaataattatcgactatgaacatagtaaaaaaatcttttaa

SEQ ID NO: 384817 - DNA, 378 bp, Salmonella enterica
atgtttgaacaattgaaaattcaacaccgtacattgcgtgaacatttccccgctgaccttaatctgcgtgtacatcgtgctttaagctggttacagcgggctgaaatggctgaggatgaagatgggcgttttatttttctctggattgcctttaatgcagcttatgcaaccgaaatagatgataattatcgtctgtcagagcaggtctctttcaaaagctttctgaagaaattgtgtgggctggatgaaaacaaacagattgaacatcttatatggcaggaattttcaggcagtattcgaatcctgctggataccccttttgtgttacaaagcttctgggattaccacagcggtaagataagcgaaacacagtggtaa

SEQ ID NO: 384818 - DNA, 1239 bp, Salmonella enterica
atgctgagtcctctgaaaaactggacgcgggtgcagcggaatgtcgctgccgcctgcttttccgcatggatgcttgatgcttttgacttctttattctcgtctttgtgctcagtgatttggcaggttattttcattgcagtatcactgatgtctccctgtcgattatgttaacactggccgtaagacctgtcggtgcgcttatttttggtcggctcgctgaaaagacaggtcgacgcccggttctgatgctcaatgtactgtttttctctgtgtttgaattactgtctgcctggtctccctcttttgccgcatttctcgttttccgtgtaatgtatggcgtcgctatgggaggtatctggggagttgcctcttccctggcgatggagaccatacctgatcgctcaagaggtgtgatgtcaggcattttccaggcaggatatccctgcggttatctgctggcttcagtcatctttggactggtatatagtgtcgtgggatggcgagggatgttcctgatcggggcattacccatcctgttgttaccctggatttattttaaagttcctgagtcaccagtctggctggcagcacgggaacgcaaggaggatatcgctttacttccggttattcgcagtcactggaagacctgcctttatctggtagtggtcatggcctgtttcaattttttcagccacggaacacaggatctgtatccaacatttttgaagatacagcatggatttaacccccataccatcagtattatcgccatcttttataacatagccgcaatgcttggtgggatcttttttggcgcagtttcagaatctattggcagaaaaaaggcgattattatcgctgcgtttctggctttgccggttctgccactatgggctttttccagtagctctctcagcattggcctgggcgcgtttcttatgcagtttatggttcagggcgcatggggcgtggtacccacctggcttaatgaactggtaccgtcaaatgcccgggcggttctgcctgggtttgtttatcagttgggaaatctgattgcctccgtgaatgccacactccagtccggaattgcagagcataataataacgattatggattcgctatggcatgtgttgccggggttgtttctgttctgatctgcattctggtctcaataggccgtgaaacacggggaatggtcattaccggtcagtcatctctttccggtaacaataaataa

SEQ ID NO: 384819 - DNA, 186 bp, Salmonella enterica
atgacccgtcgcggttgctgctctgtaggagtccttgtcggatacctttccggtctggcaatgcgcctcatcgccgacttacacgtcggtgaagcctcaaccgatgcccgtgatgcggtcatcatcgccggggtcgtccgtaccctgtctcacgcgctacgcacgctgaagctggctgacgagtaa

SEQ ID NO: 384820 - DNA, 219 bp, Salmonella enterica
atgaccgaatccagcgattacgaatcagtccaggtctttattggcgttgatgctggtaaagatacccatcacgccgttgccgttaatcgttcagttaagtgcctgttcgataaaacattacccaacgacgaaaccaaactcaggttgctgatatctgacctgaaaccgcatggtcagatactgctggttgttgaccagcctgccaccatcggtgcatga

SEQ ID NO: 384821 - DNA, 327 bp, Salmonella enterica
atgacgtaccgcagactcagtctttcagttctggggctggcttttttgtccgggcaggcgatggccaccgcgcccgccccggaaaaaaatgaccagcccgccagtgtcttcacgccggagcaggaggcccgtatcggggagattgcggcagattatctgctggcacatccggatattctggtgcaggtcagccagaggctgcaggctcagcaacaggatgaacaggttaaaaacataacggcggcagtcctggccagtcaggatgcgctggttcccgttactttatttatatccattataatggggtgtcagccagaccctgcatga

SEQ ID NO: 384822 - DNA, 150 bp, Salmonella enterica
atggtcagtaacagaaaaatgaaacaacggctgggtataaaaggaaaaatcagcaacagtcgtcgcagcacggcgttctgccaggacacacccggtgttttcagcgtggtcagtacagagcgttttaagcagaaaaccgctggagaatga

SEQ ID NO: 384823 - DNA, 237 bp, Salmonella enterica
atgttccctgaatacaaagcgctgatatcacggctgaaaaaagataacacccgttttgctgcacttttccatgaacacaatattctggatgcagatattaagaaaagagaaatggtggccggtttcagcgatgcggaaaccgaaacgctgaaaaaaaagaaactgcatataaaagatgagctgtaccggatattaaaatcatatggcactaaaaatgaggtgacgcatggtcagtaa

SEQ ID NO: 384824 - DNA, 327 bp, Salmonella enterica
atggttgtctcacagcagtccgtccgggaagttcgctgcagtgtctggataaatcagcctgaagggccggagacagagttatacagcctacatcccaatagtgtgacgacaggacgtttccccggcagtcatgcagtcccctgcggattgtccgtaggggggagtgattatcgttacctggagaacatggacgaatctgacctttatatactgtcggaggatgaactggattattttaactcatcggcagaccaccgtctggctgagctgacgatgaaccgtctgtatgacaaagtgccggccagcgtgtggcagtttgtccgctga

SEQ ID NO: 384825 - DNA, 669 bp, Salmonella enterica
atgaaactaaataaaacttatataaatatcagagataaatggtggggactaccgctcattctcccttcgattttactacctgttttaagtagcgcaaatacttatgcgcttaccagcactggaaatgtggttcttttttacctgccgttagcttttatgcttagtctgatgctctttttcggctgggcagcactgccgggcattgtgcttgctatcttctggcgcagatacccgcagacaggactgtatgaaaccctttctgtgacgatgcactttatcattactatcgtgctaagctggggcggctatcgtgtcttttccccccggcgaaacaatgtttcccacggcgacgcccacctgttgtttcaacgaatattctggcaggtattttgttcagcaacattatttctggtcatctaccagtttgccgcttttgttggcatgtacgaaagcaaagccagcctgatgggggtaatgccctttaatatcaacacgctgattaattaccaggcgttactggtcggtaaccttgtcggcgtgccattgtgctattttattattcgtactctccgcaatccgctgcacctgcgggggtattatcagcaattaaagctacagattgatagcaaggccactaaaaaagagatcgttaattattatattatttaa

SEQ ID NO: 384826 - DNA, 1032 bp, Salmonella enterica
atgtttaaaaagttactaaaggttattattgttattttaatagttttatttgtcgttggatacttttctgataaagaggataaaacatctagcaactcaactacatctacatcatcgagtgataaagttgaaaataaagtcaaaaataaagccaatgatccttatgcaggttatcctgataaagaggtaaagtttatcaggttagtagaagatgctaaaaattcagcgaaggatgcttcaaacgatatgcaaaggggtggaataaaatctgacagggatgatgcgatttgtaatctattgacttccaaaacagtcaagggatggataggtgtagttgatgatattgattcaaatagtgatggtcttggcgtgttgtcaataaaaatagcccgtgatgttttcgtccagacttctaataatgcgatctctgatattgcgtatggaacattaatagatcctcattctacagtttttaaaaaggcgtcaacactgaaaaaaggtgatttagtaatgttttccgggcgtttttttgcatcagaagatagtggttgtcttggcgagtggagccttaccttaaacggcaaaatcaaaaagccagaatttgtgttcaaattcacagatgtcaataagtataaaattcctgactttccgccagaagcatgcaacgctgtagcttcaaacttaaaaagcactgacaccttaatgaataatttcatgaattcaagctttgttaatgtgaagaaaggaggaaagcccaaccctgaaactatatctaaatttagaagttctggatttgatgaaaaaataaactctttatatttcgattattcagaactatctagtgatgatcctagaatggattttaataatattctttccgatgttaagcaactaatttcggccacaagtcaatattctattgatggtaataaaaatgctatgcggcaagctaacaatgatttccaaaactcagttataaaaattcaacaaaaaattgtcgaaaaatgcccttctacgcatttttctttttaa

SEQ ID NO: 384827 - DNA, 141 bp, Salmonella enterica
atgctgcaaaaaccgttattcgtcatcacaatttttgtggtgatagtcctcacattctccatgctgcatggatctttatgtgaagtgcggatgaagttttggggcgcggagtttgcggcgttcttacagtgtaagcagtaa

SEQ ID NO: 384828 - DNA, 1689 bp, Salmonella enterica
atgaaaccaattcgtgatctcagaatcgacggtaagccctttcccgtcgtggaagaaaatattgtgctgcgtctcaatggcgcgggaacggggtttatcaccatcaacgccagcgacgacgaaggcccgttgcggggtaagtcagtagagctttccatcggctacaacgaccagccggtcaaatggttttcgggctacgtggaaaacgacagccgcaccggaaaggggctgcgtaaactgatggtgcgcgaagccgccgccattctgcaatacccgctcaacgtctccatgcagcacccgacgctaaaacaggtcgcaaaacacatcgaagacaacaccgggctacgcgtgcaactccctgacgcgaactacaccaccacgccgatcccccacctgacccacaacggcaacggctatcaactgatagccctgactggacgcgcattcagcatcccggattatgtctggtatccgtcagtcgacggcattatctacgttggcagctttgccgattgccgctttgcaaaacgcccggtacaaatgccggtcgagataaccaaagatgaccacggggccaacggctggacggtgcagaccatccccatgattcgccctggcgtggtcatgaacggccaccgcataagccaggtacagctacagggcgacagcatgataattagctggagtgatggccgtcagtcccccatgcagcgccaggttgaaaccctctacccggagctgggcaacaaaacccatctcccacgcatgggccgcgtcattgccccgaccgaaaacaccactcagggcgatttacacgatgaatttcgcccgcgctacgccgtcaacgtgcagccgctcgacgagaacggcaacccggcgaaagacacgccggtctataatgccgtaccggttcccgtaccgatggccggtagtgagtccggcctgttccagtacccgccagcgggaacgctggttacactggcccacgtcgacggcagaccggataaacccatcatcaccggcacccacgcccacggtcagacactgccggacattaagccaggcgaacagctacagcaacaacgcgcggaggtattccagcgcgtacatactgacggtagctggcagcgtgaaaccgatcaggctattcgtgagaagtccaccgaccgcaccatagagaacaccacggagacgcgcaccagtaccacgcgtaatgtgaccgtgaaggccaacagcaccatgacggtacttggcactcataagctgatgagcggccatatacagcacatcgcagacggagactacgccgtagccgctaccaaaaagctgatgcagcacgccgacagtgccgaactcgatgttacccaccagtggcagaccagtgcggagaacgccacccacaacgtggcaaaagtgctggaagagaaagttggtcagattaaaaaatccgtcgctggccagcttcaacaaatcaccgccccgcaggtctggtttggaagcgacaccgtcaacacgcttaacctgatgctggatctttgcgacaccgtgcagcaactggcgcaactcacagcccagcacacgcacacgaactacggcagttcacagcccaccaacagcggcagcataagcgccacggcgtcaaaggctggcgacctgaaagcgaagtacagtaccgtgattaagcagtaa

SEQ ID NO: 384829 - DNA, 567 bp, Salmonella enterica
atgaaacagagcaccaccaccccgctactggcccttaacggccagattatcccgctaaagcgcttaagcgtcagtgtgaaactgaacatcaaggacaaggacgcgtccggcaagtcatccagcaccgccagttcagaacagggggtaaaggccaaagagttacaggtgtccggcctgatcccctttgagacaccggaagccctgaccctgttatttcgcctggcggaagccaaagcggccagtggtgcgcagcaggtttaccgtatcgccaacatggacgccaaagcggtcaatatgcagcaggggatcttttccggcgcggttggcgcagtccctgaaatgggcctgatggcctggaaagtggactttaccctgaaagaaaaactcagcagtgccgaaaaagccatcggacgcggcccggctggtagccagagtgccgaacagcacgcacaagccgccaaagcaggcaccaaagacggcaagccggaagaacacggctggttctggaaaatgtccgacaaactcaacaagtggataggcccggcaggcaatgaaaccaattcgtga

SEQ ID NO: 384830 - DNA, 252 bp, Salmonella enterica
atgaacaccaccaccttaaccctatccacgcagtggcaaaaagtcagtgacgacagcaaaaccgttgtactgcaactgatgagcggtgacgcggctttctgcgtcagtgtcaataaacccgccgacgacgctgactggcattttatgccgcatcttgagctgataaccatcacaccaccgacaagcatatgggcgagaagtacgcatacctacaaaacagatacccgcctgacggtgagtaccgtggagtga

SEQ ID NO: 384831 - DNA, 522 bp, Salmonella enterica
atgaccatttacaccggctttaatccaccgaatccagtaaagggcctgcatgttaagggaatgattacgctgggatctgacgtggttattcctgattcgctccttctgaaactgaaaccgcagaacagtaccgggctgggttccccgtctgttctgggcaatacgaccaatacccagattccggagcgccgtatccttaatgtggtcaacacatatctgaaaacgccgctgaccgatgaagagatgaacctgatactggcaaaccgctataagtttgagttcacgattggcgcaggcgacaggcgggaggtacttaaagggcgattcaggctgacaaccaactggcacggcgaagatgtaactaatttactgcttagtcccgaaccgtgggacggctggccgccttacgatttcacccttaatttttccggcagaacgggcagtatgaaactgacagacagccacgccagcggaaacacttacggtgctatacgttatctgactatcagggttaagccatga

SEQ ID NO: 384832 - DNA, 696 bp, Salmonella enterica
atgtggaagcgggtaacttttgctattccccataatgcgacacccgtcacctgttcccaggtggctgtccatccgtgggacgcagaatacggacacagcacgccggacggcagctatctgaaccccgtcaacgcgatcgctgcattatccggcaaactgagtaaattcagcgccggatctgacgttatcattttgatggtatgcgccggaagcgcaacagagttcgcgcagcagcttgacaggctttcggctgtattgccacttccggcactgaagcagacggcaagacgcgcccgcacacagataactcaggcaacggaacgtatgataattcccgcaacgccggttaacgtacccgcgccggaatccctgaatgtcagtacgttaagcgatatcctgaaccgcagcgccagcgccgccgccatgagtgcgccaggcatggcggacataagcggcataaaaagcgccctttctgcgtttcgccagcatcgggcgcagctcattcagcaggccgctgaatccatacaaacgccacccacagccgcgcaggtatgggctttcgtcgcacgcggtgatgttgctctcgccggggtggatatgctgaaaaatgtcccttcaccctcatcatcactgacgtatgtacacatgttcaccggcgatctttcctcaatgatgaactggataacagagggctaa

SEQ ID NO: 384833 - DNA, 606 bp, Salmonella enterica
atggaaaatatcatcaccgcagtacgcaatccgtactacaacgataacggcacaattaccgcagacgtgcagtttgaaggtgaaaccaacagcgacggcacgccgcgttatatgcccttcaccgcagccgaacacgatccacaggattacgggcgggagttattttccgatttgaaatcgggaaaatatggtgaagtaaaaccctttaccgttacccctgaaatgctgaccgcagcaaaacaggcaaagcacgctgaaatcaacgcgtggcgtgacgcacaggagaacggcagtatcattttcaccctcaacggccaccgctgggactgcgacaaatcctctcaggaacgtcttggcgcagcccttgccgccgctcgtgcaaatatgcttcctgctgattttttctggacggacgcagacaatatcgatgttccggttaaggcggcagaccttgagtccatgagtacagcaatggtcgccacgatgttttcgcagggcttcaaaatccacgaacgccagcgacagatgaaagaagacctggataaactgacggactgtaacgccgtcagacagtacgtcgttggctggccggatggcggagaataa

SEQ ID NO: 384834 - DNA, 1167 bp, Salmonella enterica
atgtcacaatcagcacaacaaagggtgttgcttcagggggtattaaccgccagcgacggaaaaatattaccgggcgcatcgctcacgctgaaagaggcggacagcggtcagataatcacccttacaaccagcagcagcgcggcatacagcttttttgttcagccgggtacgtggtgcgttacggtacagcaacctgatgataccccgcgcaatattggcgtactgtcagtgaatgccgccacaaaagacggcgcactgaatgacctgcttaccgcgctgacgccatcatctcttgatatgagcgtactgggcttcatgcgcggactggtcagtgaagccgaacgcgccaccgaaagcatcaatctgaatcagtccgctatcgaccagaacctgaaggattctgaaattctggcgacgcagacaaagcaggccgcacaggacgcacaacaggcgctggaagaggcgaagctgatagccaaaacacccggcaaggacggcgcaccggggcaacccggattacccggagcaccaggacatgacggcaaatcagcttacgaaatctggaaagagaatcagccagcggatgctgacacctccatgacggcgtatctggcgatatatgctgacgtcaaaaatctccgcagcacgaatattggtggcaaaaatataccgtcaatcacggttgaccagataaaacaaatcagtaacctcccttccggcaccatcgccaaagtacgggaaacttcagggacatttccgttatatggcacgtcataccttagcgttattgctaatgatgaatacgataatgctggcatatttgttttatacggaagtgaagaaaaaagtacgtttgttggatacagggatgtcgggaaaataatctggaaagagctgggaggcagtggcggcggtgcttccctggctgatattaagcctggtgaagtcggttccattatcctggggtcacgtaatgacaatggcgtagtccttgccggacaagacattgatggacaatcagtacaaaacccctctttgcgctgggaaggcgaatatggacaggaactgaagttaatagcaactccccgggagagttatgtaggtacctggacggccttacagaacacgggggcatctggtatcggtttattcgtcaggaaaagatga

SEQ ID NO: 384835 - DNA, 591 bp, Salmonella enterica
atgtaccactacagtccttcacaaaacacgttctatccggaagacctgaaacaggcgtatatcgatgcaggttcatttccggacgataccgtcgaagtcagtgatgatgtatggctggagtttgccggtaatcatccccctgaaggtaagcaacgcgcagccggtaaaaacggtctgccctgctgggtggatattccactgcctgatattgaggacgcccgccgccagaaacacgacgagatcaaccgctggcgcagtcaacaggaaaacgcaaattacacatttcagtttaataaccataactgggactatggcaaagccacccaggagcggttaagcatatccgtacagatggctaaacagaacaaattacccgccggttttatctggacagacgccgataataacgacgttcccatgacggcgggagaactgcttaacctcagtgacgccatcgaccaggcgatgtttaccagggggcttcaaatccacatgcgccagcgggaaatgaaagaagaaatcgacaaacttactgatgtaaaagccattcagagctacaccatcggctggccgcagaaagggggtgcgtaa

SEQ ID NO: 384836 - DNA, 1848 bp, Salmonella enterica
atgccacagacaaccaccactttagcgtttgagcgctacaaggctcaggaagcggcgggcggtcgccgggtagtcctggatgaatttgtgttcgccagtatccccggtctggacgtggcgcagttgccttcctcttctgaaggcctgcccgatgaacaatacatcgtacaccgccagagcgttgatcatggcggcatggtgaatgacagtaccgttgtttataccgtcaccctgccgtcaacggcgggcaactttacgtttaactggatggcgctgattaatcacgaatcaggaacgccggcggtgataacgtacctgtacccgcagcaaaagattaaaaacgctgacggcgtacagggcaacgtgctgacctattcagaactcatgcgctacagaggggccagtgccctgaccgggatcaccacccccgccagtacctggcagattgatttcaccgcccgcctgcacggtatggatgaagccacccgcaaggtggcgctggacatatacggccaggccttgttttttggcgacgcctttaaagtcacagccactaacacccccggacgggcagaactcgcccccggcgcggcttatctcagggggctgcgtactgagcttgacggcgtggcaacgctgacatttgagacgggcaaagaacagactatcagcctggactccgcgctgatagggtcgctcacgggagagaaccgcaccacctttaccctgattagccatgagacagcggactataccgactcgctgggctttcgccattatgttgaacccatcgcccggattgccgcagacggcacgattaccgatctgagaaataccggacgatcgataagcgagcagcttaacggcgattttttaacccgcgccggaaatctcagcgaaatagcggataatggcgataaggctaaggctgatgccaggaagcatcttggactcggcaacagcgccgtgcgcgatgttggcacggcggcggacaccgtagccgcaggtgacgacagccgcattattgccgccaaaaaagccattgatgacacacaaacaggcctcccggaacagcctgttatgtggataagcagcgctgacgaactaagctacctgcccgctggcgctcgccgctttgctcacaacaagcccggagcctccgttctgccagtagataactattgctacattgaagtaacggcaaagcgtgacatggccaacggcggctgtatcagggttgttgattacagtaatcccggcagcgtatggaatggtacgcgcaacaccgttcccgatgaagccgccttcacctgggtacgtcagtacaccgaaacctacaagcccccacagatggcaatgccggacgcgctgctgtgtgacaataatctgtcagacctgaccaacccgtcactggcaattgaccgtcttggattgcgggataccgtcaaccgggccgcgcacgtctacgccagcgacggcgatttaaacggttccatatggggcggttatctcagcacctacctgaaccgtttcgcgtcatcttcatgggttaatcagtatttcgcaggtaaaagcacagcatcaagatcgacgaacggctggtttaaagacgcgtcgaccgggctaatcatccagtgggggactgcaccaggcgggactggcaccagtaccgtttctttgcctgtcccgtttccgtcagccggactttgggcgctgggctgggtcgctggcgcgttgtggtacggtaacgatgactggtcaaactcagccgggcttatcaacaactcgcaaatcagtgttacggtcgatcatggctcggccactgcatggcttgctataggatattaa

SEQ ID NO: 384837 - DNA, 570 bp, Salmonella enterica
atgcctgataaattgccggacattaagttgccttcatggctgaatcgcggcgacgttgtccgcttcaaaaacacgcttatccgtttctggaaaaaggtacacggctgggtaacgtggccgctgagtcagaccgacccgctgacgtgcgctgaaatcatcctgaacctgatagcctggcagtacgacattacgcgctttgatggtgagccgctgacgctctttcgcaagcgcgtgaaatacgcgtttattaacgcacaggatgcgggcagcgtggcgggctttaaggccatttttgagcgtcttgatatcggctttgtggaaattcacgaacgcaaccccggcattgactgggacgttattttgttgcgcctcaatgacagccagatggcgcataacaccgagctgcttaatcagattgttcgccagtacgggcggacatgcagacgctatcactttcagataatcataccgtcagagttcacggtcgaatgcggctttgtacatggcgggtatcactgtttttattcggaggctgacaatgccacagacaaccaccactttagcgtttga

SEQ ID NO: 384838 - DNA, 1179 bp, Salmonella enterica
atgcagaataatatcgactttaaaaaaatactgcgtgaaagcggaatgccggttgatgaacagacggtacgcgacaccctgcaacaggcggcggatgatgaaaatctcgttaccaacacgtcacgcatgtcgccgttctggcgtctgatccagttgctggttatcaggccgtacatgtggatagtcgacacgctggttaacaatgtactgcgtaatctgttcctgatgaccgcagccgggccgttcgtcgacctgtacgccgcagcgctcagactgcaacgcaaggacgccaccgccgccacaggcaaaatcacctttaccaaaagcgccgcagataacaccgtaaccataccagcggggacagtcattcagacggagcgcattaacggcaccatctacagcgtggcaaccacccggcaggctgttatccctgccggaacggcaagcgcccttatcgatgtgaccgccaccgacagcggcgcggcgtttaatctggcgccgggctactaccagatactgcctaaggctatcgacgggatagcagcagtacgcaacgatgaagactggctgaccacgccgggcgctgaccgtgagagcgacgacgaactgaaagaccgttgccgcaaccagtttaaccttgcgggcagctaccacactgacgccgtttaccgcagccttatcgccgcacaggccgggttaaccattgaccgcatcttctttttacatgatgccccgcgcgggccgggtacggctaacgcctacctgctgctggataccggggtaatttcgcagccctacgttgacagcgtaaaccagtacattaccgatcagggccaccacggacacggtgacgatatgcagtgtttccctatgccggaaacccgccacgatctggcggtcacggtgtacgtcgaaaatctgtccaatatcagcgaaaacgacctcaccgccctgaaatccggtattgaaaacctcatccgttgcgcattccgcgagaacagcaactatgacgtgttgcgcgtctggccatacagccgcttttccttctcgcagctcggtcgcgagatccaccggcatttttccctggcggagtcgctggctttttcattgcaggacattaaaagcgatctggcggttccccgcctgaacagcctgacaattgaggtgcaaaatgcctga

SEQ ID NO: 384839 - DNA, 336 bp, Salmonella enterica
atggataaatcgctttatatcgacctgctcgtgaccgatggcgatcttacgctcaattccgccagtgagccggtcttgtgcgacaaccgtcagagcatcggccaggacatgatccacgccctgattgaaagcggtctgccctaccgtctgattgcggagaacagccccacgctcagggccgacctgtttacacagatggtgattttgctggaagaagacgagcgcctgatacccggcacagtatttattgacgaagaacggcgcggacatttgctggtaacagccgacacctacgattttggcccgttaagccgggggataagctatgcagaataa

SEQ ID NO: 384840 - DNA, 2178 bp, Salmonella enterica
gtggccgctgaacttgatttcacattaagcctggttgataagctgacaaagcccttaaaacaggcgcagtcggctttaaccggctttgctgataaaacagaggccagctttaagcgtatcggcgggggtgctattgccctttggggtgtcaacaaagcgctgatgggcatgatgcgccccgcctacgatttgcaggacgccttagatgattcggtcggctcaggcttcgccgccgcagggctgaataaactcagaaaggccgcgaatgatttcgctatcgactatggccgctcgtcgctggagttcgtcaagaacagcaccatgatccgccgcagtatcggcggcattaccgataacgatctgcccgcctacacccacgccgcgagcgtactcggcgttgccatgcgcaccggcacggaagacgccgttaactatctgtctcacatgactaatctcatgccgcagatggtcaaaaaaatgggtagcgtcgattttgcgggcgcgatggccggactggctacccagatgaaaaacagtttcaacagttccctcagcgatatcagcaccatgattgagcagtcgaaaggcacaggggccgcatttggcgtgtcgctggccgagcagctcggcacgatgggaacggcaagccaggttctcggcagcggcgcaagtggcggttacgaccagttattgcgccatctcggcagcggtgacgccaccaaagcaaccggcattaactttcgtgacgcgcaggggcagatactgccgatcatgtccattctggacaaactcaaggccaaatacggcgagaatatcgacggcaacgcccgcgcacaggccgcaatggaaaaagcctttggtaagggggcggcggttatccgggcgctgtggaacaacacggacggactgagccagagcatcaacgcgctgggtaaaaatccggggttaaaggccgtcgaagaccaggcaaaaaagaccgtcgtaccgtgggaacagttcagcgccattctggaggcgatacgcgctgaaatcagcctgcgaatgctaccgacattcgggccgttctttgacatgctggtagattgcggcaaagagtttgtgaaatggctggaagccttccccaaccttgcccgctggattgggtatatctcggtgagtctgttaatgctcgccgcagcgggagcgattaacaatatcgttatgggaaccttcagctttattgctaccggccttaaaccgctgattaaggggcttggctgggcgctgaacctcaaggcccgttacatgacacttgccgcattcgcgaccgaatactacgagaaagtgatgaagaagctacgcggtacgcttgcgggcgcgtcgatgatgtttaaatctctcggcgtcagtgaactactcgcactttggcccattctggcgatcggcgtcgccattgccgcgctggtcattgctgtgatcaagttctggcaacccatcaaagcatttttcagcggctttattcaggggttctcggaagccttcgaaagcgttggcccgctgcatgacattctcggccccatcgggacgctgttcagcttcatatggcagcaggtgaaaaagctggttagctggttcggcgacttgttaagccccatacagttttctgatgaggcgctcaaaggtgcaacggacaccggcgtttcgtttggtcgcttcgtggcagaagccatcggctggatactgaccccgataaatctcgctatcagcgcctttaacttcctttgggatgctataggcattgtggcccgtgcggccggtaaaatatgggacgcctttgacgcctccgatatcaccggcagcttaaaacgcattaagggcatattcaccgacacctttgatgacctttggaaagcacttaaaacccagtttgcaggcgtctttaactccatgattggcatgctcaacaagatcccaggcgtcaatattgacctgatggaggttgcgccaaccactgcccccacactgaccaccggcaaccgtgccgccgccatccagggcgggccggtcagtcaccagataagcaacaaccggggcgataaagtcaccaataacaatgttaagcaggatatcacgatgcacgttgacaccctgccgacgccgggacaactggcggaatataacgaactggcggcggggtga

SEQ ID NO: 384841 - DNA, 273 bp, Salmonella enterica
atgaaaaacgaaagcgtcaccaccatcaccctgaccattgcaggcgctgatattcgtttcaccccgaccgaagccatctacaacaagtacgtgaacgaaatggcgatggacaacaaggtagcacctaccaaaaactacctgatgcgctgcgtacacccggaagacaaggagaatctggaaaaaataatccacctccctaacgcagctatccagattgccgcaaaactcaatgaagattttgtcgtcgatctggatatcaccgtaaaaaaataa

SEQ ID NO: 384842 - DNA, 465 bp, Salmonella enterica
atgaaccgcacaacgctcgcctttatcgtcttcatggtcgccgccgtggccgttctcggcttcacgactgaccactggcacagccgcttcaccagggcagaaaaagcccgcaaggaagcggtagtgcttgccgacgctcgccagcagaccattgacgatatgacgcagcgccagcgccagaacgccgcccttgacgcgaaatacacgaaggagttagccgatgcaaaagccgaatctgaggcgctacgcgctgatcttgtcgctggtcgtcgccggttgcagctccacgccgtctgtatgcccgccacagcgggtaataccgccgccaccggcgcaactgatgcagccgccgcccgacttactccggacgctgaacgggattatcagcgtctcagaaccgaagccagagtcgttacagcacaagtaaacgacctgcaacagtacataaatgaacagtgccattaa

SEQ ID NO: 384843 - DNA, 417 bp, Salmonella enterica
atgactaattcaccgcgtggcattcgtaacaacaatcccggcaatattcgctggggtgatgactggaaagggcttgtaccgaaatcacagcgcactgataaggatttttgccagttcacgacgccggaatacggtatacgggcgatgatcgttattttgcgcaactaccagcgtaagcacggtctgaacaccattaccggcattatcaatcgctgggcaccgacgaacgagaacaacacgcaggcatatatcgacagtgtagccaaatcaacagacgtcgcgcctgatcagcatatcaacaccgccgacagccggttcatgatgaaactgctacaggccattatccggcacgagaacggcgtacaaccctacagctttgacgtgtttgtcagagcggtcgaactggctggcaattaa

SEQ ID NO: 384844 - DNA, 339 bp, Salmonella enterica
atgaataacgggccgcatacctgggcggactggtggctgatggtcaagggctggcttgatggtgatatcccgctggacagcctgttaatgaccgctgccgttgcagcgctcagggtgttctatacgggccgtggctggcgtcgccttttgctcgaagcgccgctatgttgcctgcttgcggtcgctgctttcaccatcatcaagccgatccccgtcacctggctgacagaagactggcgcgtcggtatcggcgcagcaataggacttatcggcgttgagcatatccgggcgctcggcgtgatcattacaaagaaatttgcaggaaaaacagaacaatga

SEQ ID NO: 384845 - DNA, 459 bp, Salmonella enterica
atgtacgggaaccacattagcggcatgagttttgatgtgtcatttgatggtcgcattatccacgtcaagaccgtcaccctggacattaccgacaacaccaaagccattcaggagcgcggtgtgcctaatggctgggtggatggtgacgtggaagccagtggcgaaattgaactggataccgtcaatttccagatattaagggaagttgcccgcgccgcaggaagctggagagccattaagcccgtcgattttctgtttttcgccgataccggcgacaacgaaatgaaggtagaggcttttggttgcaagctggttatcagcaacctggtgaacattgacagcaaaggcagcgaaacgatgagccacaaaatcaagttcatggtggcgtcgccggacttcgtgaaaatcgacggcctgccgtacctttcggcacgcgatacccgcgatctgatggggtaa

SEQ ID NO: 384846 - DNA, 1125 bp, Salmonella enterica
atgccatttccacaggtcacgattaaccagctcaacacccgcagcggcggcaggcgcgacattgcccgcaccctgctgatggtgggcgagaacactaaagcgattccgcctacgccggtcactgcacagaccgaccttgacgccctgttagggtctaaagactcgccgttacgcagcaaccttcaggcgtttttagataatgccggacagaacgccatgatctggctggcaaccgtacagacaccccagcccccaggccaggctaagacgtgggccgatgtggttatggatgcacagaacaccgtttcagcggaaggcgttgttgttgttcgccctgatgccaccgtcgacgatatcaatcgcgcacaacagctacgcgaggaactcaacaacagatatcagcgctggacgtggttcattctggccgttcgtgggtgtggtacaggtgagaaatgggccgaatacgtcaccaccatgaccacactacagaaaggcattgctgcatacgcggtgcagcttgcgccgatgctgtttggtaatgagccggggatactggccggtcgcctttgcaatccgtcagtgacgattgccgattcccccgcccgcgttgccaccggcgcactggtcaacatgggccgcagcgataaaccgcaggacagcgacaagcgagaactggacattgccaccgttaaggccctgaaccgggcgcgtttcagcgtaccaacctggtatccggactacgagggttactactgggccgatggcgtcacgctcgatgttgacggcggcgactatcaggctattgagtatctgcgcgttgccgacgaaatggcccgccaggtacgtctgatggctatccccaaaattgccgaccgctcgctgaactccaccccggcaagcgtggccgcgcaccaacagcttttcgcgagacccatgcgcgacggtgcaaagagcctgaaaatcaacggtacggtattccccggcctttgcatgtcaccgcgcgacggcgacgtaaaaatttcatggccggaaaaagacaaggtgcagattgcgatcgtggttcgcccgtacaactgcccgaaaggtatcactatcagcatcatgctggacgaaagcggagagtaa

SEQ ID NO: 384847 - DNA, 744 bp, Salmonella enterica
atgaccgccccggcactggaagtgcgcggcgcactgtcaagggtgcagatgcgccagttaaagaacgctatcgaccgttacgatctgacgccagcgaagcgtaagcgcctgttatggcgtattgccaaaaatggcgtgattggcgcaaccaaagcgaacgcgaagaagcagcacacccctgacgataagtcgtggccggaaagggcgaaaggccacggtcacaagaaaatgatgcgcaaactaccgggaatgcttggtgttcgccaggtagacagcgacacggtgaaagtcgttttcaggggtggcaaacgcacaaaagcggcggtcattgcatgggcgcagcagcacggcgcaacgatccagatgaaccgcagccagttgaagggtaacgggaagggacagaagggacaccccgctacaaagctccaggcaaagaaactgaatgcgctgggcttcaaagcccccgtcatggtgacgaaaggccgcaaagggaagtacacgcaccgcagggagtatcgcgcggtagcccaaaaatggattacggagcatctgaacatggcgcaggcgggcttaatcatccgcaagctggaaggtaaagcgccggttgatagctggactatccatctgcccgcccgctcgttcctgggtattaccgacgatcagcttgccgccagtatcgcccgcgaactacagggcattcagtacggttcgaacataaagaaacaggacattaagaggaaataa

SEQ ID NO: 384848 - DNA, 483 bp, Salmonella enterica
atggaacatctcaacaccaaccagttagcttcactgacccgctacctcactgacgcgctcggtgagcgggttatgcagacgtgccaaatcgacacaagcgaagtgcgcatgataaacgccgccaaaaatcttggtctgggctttctgcgtaccggctttgacgtgtttgacgcggaatatgcctggtacgactggccgtatcgccagtttgatccggatctgcttacttccctgcttgaggcctggcttttcgacaacagcgagatgcgttaccagttagatttacctgaccctgtttttgacgtagcgacgggcgacgatgacaccatgacggtgacgatggatatcaccctgtacaaagaccgcgtcatcaaagaagacgataacggcattattcgcaggggtggcaaacgctacaacctgcaaataccggaagtgtgggtggccgaagacattgatattaccgtggagaatcgcccatga

SEQ ID NO: 384849 - DNA, 501 bp, Salmonella enterica
atgtacagcagcaaaagcactgactaccagagagccactatcaccaataacggattctggccggatattgcggcgggcgagttcgaagaggttcgcgccattccgacgcgtatcagtcatgagtcagtgcgtgatgcgcttctggcggctgtcagtaccgttaacctgcgacttggaacactccagcagggatggcagacgctgggatacagtcgggccagtgatatcccagcacctcacgccgtcatgatggcgcagggtgctattgatactgaattacaggtcacgaaagcccgcaacgctgtagaggcgctgtatatcaaggccgtttatgcccaggctaaagccgatctgatgccggaattttccaccaccggcatgaaggacgtctggccgggagagaacgccccggatgcacgccgggggctgctgaccgaatccgcaatggccatccgcacactgatcggcgtaccccgcgcgtcagtagggcttatagggtga

SEQ ID NO: 384850 - DNA, 720 bp, Salmonella enterica
atgagcggaataacgccgatgcaacgctggatgcagggttgccaggaagcacaacaggcgcgtgaggcaataaaacacccgcgcctgcttcaggccgaagacagcatgcatatcaagcttgctgctctcgacatcgacgttaaaaagttgcgcggtctgacacggatagcagaccgcatcgacatgaagcgcgacgaactgttaccccgttgggagccggtcgcccgcgagtatgtggaaagcggaaaagcttacgctaacccgatcctggtctactgcattatctggctgattgacgtgaggcggttcgacaccgcgctggcatgggcagatctggcgattgagcagggccaggaaatgccgcccaacatcaaatcaaagatgcccgcctttattgccgccagtatctacgactgggcggagatggaagcggaagccgggcgcacggttgagccttacttccagcaggtgtttgacaaggtcgcccaccactggcggcttaacgagcgtatcgccgctaaatactaccgcttcgccgcgctttggctgttgcgcgaccatgacggcaagccccgcgccagcagtatcaacgatgtggcgttgctggagaaagcggacagactactggcgagagcctcagaattacacccgagaattcaggttaaaacgatgcgcgagcgcatcgccgcccgcataagggcattaaccgagcgggtttaa

SEQ ID NO: 384851 - DNA, 1095 bp, Salmonella enterica
atgatgaacttaccgttctacgcgggaatgagtccgcaatactactcgcagcaatatctttccatgctgcaacagcagtttgctgactgcccgaaaacgtcagacaactactattcgctgacgccgccacgctcaaccgcgctgcgtaatgcaattctggaaagcgccggactgctgaaacagctcaccgtcatggacgtaccctacccacaagggcaggtcgtcaccgttggcgagtccacgttgcgcaccgggcgcaagaaaaccggacgttttactaaaggctccggcatttccggtaacgagttccagctcgtcgaaaccgattcatgctgcgtcatcacgtgggaacaactggccgtatggggtaacagcgggtcacagggccagttcatccagatgatgaacaataccgccgtgctgaactttgctaccgacatgttgcgcatcggcttcaacggcacacacattgctgaagactcagacccggacacttaccagaacggcgaagacgtcaacatcggctggcaccagttcgttaaaaactgggcggcggaagatgccaaaaaacgcgctaaccgcattatcagcgccccggtacgtctcggcgtgggtggcgactacctcagtcttgatgcggcaggttctgatcttgttcgtgcgttgccgaccaaataccaggacgatccgggtctgattattctcgttggcgctgaccttgtcgccgctgaagaagttcgcctgtacaaccaggaagacaagccgaccgaaaacgtcgccgcgcagaaactcagcaagaacatcgccggacgcccggccattgtgccgccgttcatgccaggaaaacgcatggttgccaccacgctgaaaaacctgcaaatcctcacgctgatgaactcccgccgccgcaaggctgaagacgtgggcgaccgcaagcagttcgaaaactcctactggcgctacgagggttatgccctgggagatccggactgctacgccgcgctggacgaaaccgccgttgaactggttggtaagccagggccaatcgctaaacagccagcagtagcaaaaccagaagcgaacgcaggagcgtaa

SEQ ID NO: 384852 - DNA, 1128 bp, Salmonella enterica
  misc_feature (714)..(755): n is a, c, g, or t
atgatgtggccctatcacgtctcgtcacccgtttaccgctggaatgcaaccaatttcggcaaaataacggccctgaaagcagaagaccggcaggacgctacctatttactggcaaaacttcagccaaataaatttgcccttgccgccaaccgtgaccgtcagaagatttttacctccgcagagttcgaaaagaactacatgggaaccgggaagagctatctgagtgcgctcgccttaaccgatgttcccgcctcaccgtggacaaccgaactcatgttcagccaacaggcacacgacagcatttatgggcaaccggaagttttttcactgggtgccgaagataacaccgaggaaactctcatgaatcaacagcaatacgacaccctgctgggcgctatccataacaaaagcgttcaacttaacgacctggaagcccgcgtaaaccagttttcgcaaatgctgaataaggcgagtacacagcctcagcaattcgccgcacagcctcaaccggcatatgcgcagccgcagcagttcgccgcacagccgcaaccagcgtatgcgcagccgcagcagttcaccgcacagccgcaaccagcgtatgcgcagccgcagcagttcgccgcacagccgcaaccggcatatgcgcagccgcagcagttcgccgcacagccgcaaccggcatatgcgcagccgcagcagttcgccgcacagccnnnnnnnnnnnnnnnnnnnnnnnnnnnnnnnnnnnnnnnnnntcgccgcacagcctcaaccggcatatgcgcagccgcagcagttcgccgcacagccgcaaccagcgtatgcgcagccgcagcagttcaccgcacagccgcaaccagcatatgcgcagccgcagcagttcgccgcacagcctcaaccggcatatgcgcagccgcagcagttcgccgcacagcctcaaccggcatatgcgcagccgcagcagttcgccgcacagcctcaaccggcatatgcgcagccgcagcagttcgccgcgcagcctcaaccttattttgcgaacccgcaacaattcgccgcgcagatgcaaacggcatgcgcacagccgcagcagttcgccgtacagccacagcctacggacgcgctaaataa

SEQ ID NO: 384853 - DNA, 1806 bp, Salmonella enterica
atggcttattcgcaggaaattatcgacaaagcccgctcgttgtatctacagcgcaatacgccgcgtgagattcgcgaccggctgaagctcgccagtgtgcgggtggtgtactactgggctacaaaatttgaatggtatacggcgcttgaacgtgatggcgtggaagaggtgatcgccgaacgtgttgcgctgctggcaaaacgggatcacaaaacgccggaagaggccgacgaattcgaccggctgatagggcatcacgtcaaactcatggggctgcggtacaaacatcttgaggcaatggccggggtgtctgcccgtgctgctgttgccagtgacgatgatgatgcggagtcctttattgccagtgaatccgggcgcggtggcaacgtcaaaaagggcggcaaacgcaagcggccaccaaaggccaatgacgtttcggaactgacggcagacagttttcagccgattgttgataagctgtacggcttccagaaaacgctacgggagaacaagcaccgacgtcgccgcaacctgcttaaagcgcgtcagattggtgccacctggtattttgcttttgaagcgtttgaagacgcggtactgacgggcgacacgcaaatattcttatcagcttcaaaacgtcaggcgctggtttttcgtacctatatcaccaaaattgcgatggagtatttcggtattccgatcaagggcgacccgatacgcctcagcaacctggcagaaatcttctttcttgccaccaacagcaacaccgcccagtcaaacagcggccacctgtacattgatgaatatatgtggataccgcgcttttccaccctgaacactgtcgcgtcagccatgacaacgcgtacaaagtggcgcatgacctggttttccacgcccagcgctaaaacgcatgagggctatttgctctggagtggggataactggcgcaagggtaatgccgcccgaaaagaggttgagttcccgtcttttgatgaatatcgcgacggcgggcgcgagtgtccggatggtgtctggcgctacgtggtcacgattgaagatggtgttgcaggtgggattgacgatatcgacgttaacgagctacgcgagacgtacagcaaggcagattttgacatgctgtatatgtgcgagtttgttgacgataaagacagcgtgttttcctttaatgaactgcttaaatgcggcgtcaatattgccacatgggaggactttcaccctgaagaagatcatccgtttggcaaccgggaagtgtggggtgggtttgacccggccagaacgggagatacggcaacctttgttgtgattggtgttcccctggtggcggtcgagcgttaccgcgtgctggagattttccgctggaacgggttatcgcttttctggatggcagaacaaatccgcctcatcaaatcacgctacaacatgacctacatcgggattgacgttaccgggatggggatcggtgtgtttgagatggtgcagggattcgcgcggcgtgagtccaaagccattcattacagcgtggaaagcaaaaaccgcctggtgatgaagatgaaggatgttatagaaaataaccgcatggagtggaacgaagatcaaaaggaaattgcaaccgcatttcttcaggtgaaaagaaccacaaccgccagcggcaacgccatgacctttatagccgatcgtaacaatgaaaacggccatgccgatctgttctttgccattgcgcacgcgatggataatgaaccccttaactaccgcactaggcggaaatcaacatgggtactgccatcatga

SEQ ID NO: 384854 - DNA, 1056 bp, Salmonella enterica
atgggtactgccatcatgagcaaaaaacgttaccagaagcggaacaaccgccagttttcacaacaggacgctaaacccacctttgtcacttttggcgaccctgaaccggtggcctactggggaagttatggcggcacgctgtgggatgcatacagcggctattacctcccgccgattgagcgcactgaccttgtgatgttgtccaatatcgccgcctatcatggcgctattctgcgctcacgcgtcaatatgattgccaacggctttaaggggggcggtggactgacccgcgctcaggtacaggcggcggtgctgaatctgttgatgttcggtgataccggactgctcaaggtgcgcaatggtttcgggcgtattaaccgtctggcggtgctgccgtcgctgtatatgcggcgcaccatgaagcaggaaacggtgattgtgcagtctgccggggaagatgtgacgtatgccaatggtgaggtgatattcatcccccagtacgacccacaacaacaggtctacggcgtgcctgattatatgcatggcatggagtcggccatgctgaacgtcaacgccacgcgctttcgtatccggtactacaagaacggggcgcacatgggctacgtgttcttcaccaacgatcctgatatggacccggaatttgagacaaaaatgcgggaggaaatcacgaactcgcgcggggccggtaacttcaaatcaatgtttatcaatatccctggcgctgataaggaagcggtgaagattatcccggtaggtgataccggcacgaaagatgagtttttgaacgtcaagaacgtcagcgcccaggatcagcttgtcgctcaccgcttcccgcccggactcgccggaattatcccggagaatgcggccggactgggcgacccgttgaaggcgcgggaggcgtattaccgcgatgaagtcattccgatgcgtagttttttgatggactgcatcaacgccgatcctgaaattgtacaggtcggacgtgttgaatttgatttgaacgtcatcgcagacagcaacaacgggcagtga

SEQ ID NO: 384855 - DNA, 330 bp, Salmonella enterica
atgaaaaatagcgtaaaatccactcatcggatgagtaacaagagacgctgctatatgtcacgaccacaaggcagaacatgccgctattgcgggtgccgttctattattgagcgcaccgaatggaagacggaaagcaaaacggatgtggctaatctttatgtgcggtgtaccaacctggagtgtgggcatacctgggttgaaaatgtcacttactcacatacgcttgtccccagcgccctgaaagatggcgttgtcagattgttgcttgaccgcctgaagccagaagaacggcaaatagctctcgatctccttactaatgacggtgcgtaa

SEQ ID NO: 384856 - DNA, 450 bp, Salmonella enterica
atgaacaagtcaacgctttttatcaccgcctggaacatagcccgcgacgcagccgctaaattcggtggctcagttaaatcttatttcgctgaatccctgaagctggcctacgtccgtactcgcgtagtaacacttgaggcttgcctgaaaattggcggcaagctttgggaaaaaaacgggatgtgccgcgtttattttaacagtgatattgttgccgctgctgttggttttgaatacgacacgtacaaaaccggcaacatcaaatgggcctgcctgggtggtaatcccctggcgaacgggagagctaacagcgttcgcacgatgatttgtttcggtaaattctggttcgatacggcggataataaaattcatgcacgtggcgacgaatgccgtgacctgagcctgattagcgttgtccgcgcactgaaagccgccgccctggctgcataa

SEQ ID NO: 384857 - DNA, 390 bp, Salmonella enterica
atgaataacaccgaaaaattgatggctgtcggaaaacttgtttacggcgataactggcagtccccgatctcccgcgatattggcgtggacagccgcaccatccgctatgccctgaaaggggagcgagaaatcaaccacctttcttcgcgcctgaaggaagcactggagcaaaaagcagaaaaacttaaatcagcgattgagattataaacagcgacaaaatgagcggtgatgatattgacgtcgatattatcagcgatatcgttgacgggtatgaatactccgacgagcaatataaaaaggccgcttttgacgaaattaacaacgctgtttgcgctgatacctggctgtcagatctggattcaatcgcccgcaagtggagtaaatattaa

SEQ ID NO: 384858 - DNA, 393 bp, Salmonella enterica
atgctggggtataaaaactccacggggctgatgtacagaataaaatctaatggcattcctgaaggtggtgatatttctcatttacatacgtgcaggagtaaaatgtttgttgtgaatgggcaggaggtaagcatcactgccgccgctggtattctcggttatgatcagtcaacgctttcaagaaaaatagcctccctttcccttcctgaaggcagtgatatttcccatctgggtaaagctttttacatcgttaatggcgaaaagatggatattccccgcgccgccgctgtgcttgggtacgatcgctactggttgtctaaaaaattaaaacgttgctcagtacctcccggtagcgacatctcccacatgacgccaggaaaacgccgccagtaa

SEQ ID NO: 384859 - DNA, 312 bp, Salmonella enterica
atgagaaaatacaccgcctaccgtccgggcgaagagcgctttgacgggcagttataccggacaatggtacgcgcggaacgccgggcgcgggaaaatccccgcgtgaacatgccgccatcaccaccgccagtgccggaagttcaggaggtgaagccggaaacaccgcccgtgatttgccctgcccgccaggtcatgaacatctacagggaaatggaagcggaaaaagagcgggcgaagctggaaaaagcccgccagcgcctcgcttcaaaggcgaggatagcggagctatacctgagcaataaaaaaagctga

SEQ ID NO: 384860 - DNA, 2526 bp, Salmonella enterica
gtgaccacctcccacggacgctacgcacccacacccccgccgccgtatccgggcaaggccccggacacgaccgattacccgtatccgtggaataaaccccgcgaggcaatcggcgttgaccgttcatcattagaagatatcgcggcagcagcacgcgagaaggaagcccgcgaaaaactcgacgagagtatcaggcgggcaactcaccccctgccgctgttcatgcgtatgcgtatcgaggcccgcattgatgaacactgccagcaaaaaggcgtttacatcgccggtcttaaattccgtgatttcgttcgccgcgaactgccgttactcaacgcggtaaacaataaataccgcattgccattgataagcccatgccgcccgtctggtcatggctggaaagtggcaccacaaccgcccaccacttcgccgatctccaggggttaacggaacggtttaaccgcctgccggaatacaccgaagacgatatcgagttgctggcacaggatatcgctatctatatccggggtgaaatcgccgatatggtcgacgcaaccgccgatatggacgatatgacctgcgcccgccagttatacacgtgcgccctgcatgtggcggaacatttcaatatgccaccggccaacgctgagaaattccggcgctacaaacttgatattctggatacgtctgtcgcggttcagaagatgatggatgaaaaaatctggaaacgccgcttaaagcgcctggcctaccgctggcgggagcacctgcaaatcacctacggcgacgtgggccgcgcggcgtcagtgtattgcagcaaaaagcaaatcagcctttgggaagaacagcgccgccgtaaccgtctcatcatgagcaatctggagctggaagacgaggacagcggcgatcgtatatcgctcgctgacacgatagacgcttccgtcgctaacccggcgctgcgccgtgttgaacttatggttcgtatcagagggtttactgatatagcgaaaagcgcgggttatgaaacacgcttctacaccatcaccgcgccgtcaaagtaccacgcacgccataactacggcccgcgtaacagcaagtggaaccacgccagcccgaagcagacacaggactacctcaacaatatctggaagctgatccgcgccgaccttgcccgcgatggcatacaggttttcggcctgcgtgtggcggaaccacaccatgacggcaccccgcactggcacatgatgcttttcgtgcgccctgaacaggtggacacgctcactaagacgctggaaacctacgccatccgtgaagaccgggacgaactcaacaccagtgagggaattaaaccccgctttgacgtgaaggatatcgacgaggaaaaaggcgacgccgccgcctatatcgccaaatacatttccaaaaatatcgacggctacgcgctggataacgaggttgatgatgaatccggcaagccctgcaagctgacagccaaacacgccaccgcgtgggcctcattgtggggtatccggcaatttcagtttgtgggcggtgcgcccgtttcggtctggcgtgagctgcgccgtatgcgcgacgaggaactggcggcgaaatttggcaccacgtttgccgaaatgcaccaggccgcatccgtggagggggactggggaaaatacatcacgttacagggtggcccgtttgtcacccgcagcaatctgaccctgcgcccctactatgaaatccgcaaagccaaccagtacggcgaagaaaaccccgtaatcaagggtctgcgcctccagcttgaaccggaaaccacacccattatcacccatgtcaaaaactggaaaatggtcaaaaaacaaccgacgccggatacggcggcgggcctaacagggtgttcatcttttgaccttacggtcgcgtccgcgaccgctaggactcgtgtcaataactgtactttgtacaaaaaacaaccaacaaacggcgataaatcgaacagcaacaccgagccaattcagcagacaattgaccagcaaataatcagtacgctggccagagaccaggaaccagaccagaacgccgcgccggacagtcgcagcgcggatcacctttcccttttgcgggttattccgccgcgcaaacacgaacaaaaacccgtcgccagcgataaaaacgcggttctgcgcctcattaccgagctgcgcacgcgcggtatcgacagcgacgacgagatcgggcacgtgctgaaaggccggatgatcagctacggccctgacgcctgccttcaggtcagacacggcagcatcgtgatcattaagcgccagcgctggtgcggacaccgcgaatgtcgcaacccactgaatgaagaagacctgcgctacggcgacgaggcacgctgcctggcacattccgatcctgaccgggtggcagaacgccgcaaacaacaggtcactgagcagcaaaaacagcaacaacagaaacgcgacagcattttgtcgcgagtgaacaaactgagggggttaaaatga

SEQ ID NO: 384861 - DNA, 1011 bp, Salmonella enterica
atgactactacagatccgcgttgcaaatcagacagcacaatcaacgttatttccatttcaggaggtaaggacagtctcgcccaatggctgttagcgattgaaaatgacgttgttcatatccctgtatttgctgatacaggccatgagcacccgcaaacaatggcctatctggattatctggaaagcaggctggggacaataaggcgggttaaggctgacttctcaaaccgcattgcaaataagcggttatttattgaaaagaaatggcctgtttcactggttgaagagtgcggcctgaccgtcgaacaggcagagactaccgtttcccgcgcgctggaagtactgcatccgaccgggattccttttctggatctatgtttgtggaaaggccggttcccgtcaacccgcgcccgcttctgcacgttcgacctgaagcacattccgataaaagaacagattatcgatccgcttcttgatgaatatgacaacgtcataagttggcaaggggtacgcgctgaagaatcaccagcccgtaaaaaccttcctgaatttgaggaagacgcagacgggaggcccggcctttgcgtataccggccaatccataagtggctacatgctgacgttttcgccatcgccagacgccacggcataaagcccaacccgctttatcaacagggatgtagccgggttggctgtatgccgtgcatacacgttaacaaagccgaactcgccgaaatatttcgccactggccggaagagatcgcccgcgttgctgaatgggaacgcctggtcgccgccgtgtcccgccgtggtaattccacgtttttcccgtcaacgaatgatccgcataagtcggaacgtcgcattgaatgcatttctgtagaaacgcacggcattgagtcctatcgcgactgggctatgaccaccaggggggggcggcaattcgatttactggcggatatcaacagcaacgccgcctgttccagtatttacgccggggtgtgtgagtga

SEQ ID NO: 384862 - DNA, 561 bp, Salmonella enterica
atgatgactttgaaacctatgggaacgccggggaaatgcccggcacatgaacgagcatggacgccggaagaagaagagttggtgataagtctgtacaggaaaaaaagcctgacagaaatcgccgcgcttctgccagcaccaggcagatcagccgacgctgttgcacacaagcttcaatttttacgtgagcgttttccggatcaaatcggttacatgagaccccgatatacacaagaacaagacaacttcatccgcaaaaattgccacacgatgaccgcagaagaaattggcaatcaactgacaccacgacggacgataagctcagtaatgcacagagcaagacgtctgggtatcagtctctataaatgcggtgataattcccctcataccaagtacgaggacgaagatgttgaactcatccgcgggttacgtgacagctccgatctgacattcaaggagattggcgaaaagtttgccatcgataaagacacaaccagatggctgtatcaccaccgccatactgccattgacaccatcgcaagggagtatctcccgcgatga

SEQ ID NO: 384863 - DNA, 960 bp, Salmonella enterica
atgaaaaagccatctctcatccgttccccgctcaaatgggcgggcggtaaatgcaaagttgtgccggagctgcgcaagcatttacccaaagcgaagtacctgatcgagccgttcgttggcggcggttccgtattcatgaatacggactatgaccgctacgtattgtgtgacagcaacgccgcgctgatgaatttctaccggcacatgacgtataacacggcggcgttaatcgatctcgcgtggaaactcttcaaggatgacggaaaccaggaagcctacaagcgcaaccgccaggcgtttaacacgatatccactgcctataacagatcacgccgtacctcgctggtttgggcggcgctgttcctgtacctgaaccgccacggcttcaacggcgtgtaccgtaccaatctgaaaggtgaatttaacgtcccgttcggcaagtacgatcagccgtacttcccttatgtggaaatgcgcctgtttgccgaaaaagcccacgataccggaacccgctttgtgtgtgcagacttccgcacaacgcttaaagcgcttcctggtatttgccccgacatatcattccatgccgataaactaagcgatgcagttatttactgcgatccgccttatctgccactcggcgataaagacagcttcacccactacaacggcaagtcgtttaccgtaaccgaccatcgggatcttgccgcgcatctgatagcggcggcacggctttacggcgttaagtccgttatttccaacagcgacaccgaagcgacccgcgcgatctattcaccgttcagactccacaaactggacgttaaacgatccgtcagtgccagcgccaaaggccgcaaaaccgcccccgaagtgatcggcgtactggatggccgggaaaggtatgtaagcgcaccacgccaggagggaaaggcattcgccgccgcaatggaggccgcatcatga

SEQ ID NO: 384864 - DNA, 240 bp, Salmonella enterica
atgaaactcggtgctatctggatttcctacatcaacgatatcgacggaaagcgctatcgcacgcgtaagcagaatatcaatttagaccgctcactactggacgatatcaggggccaggacgaaaaacgcttcatctttttcaatgacggatcgcaggtatctgcccgcaatatctgccgtgaaatcattctggaacccaacacctacaccccgaaaaaacaacgagggggccgctcatga

SEQ ID NO: 384865 - DNA, 534 bp, Salmonella enterica
atgctacagatgaaatttcacccccgcttcattgaagcattccgcagcggtcagaaaatgacctcgctgcgcatgatgcagtttaaatgcttccggtcagacagagaggacaaagaggaatattttcacgacgacaccctgactaaaaacataatcattcctgactacagtgctgacgcaaccatgtggtttagtaaaggggcgagatttacccacatatcgaaccttgccggactgctgaaaaggcaaccctaccagccctcaagcaatatcaccctggtcactgaaatcgaaggcggcgaaatagcgccgttcgccatcgctttcatcaaggacatttccgttatcaagggcgaccagatagaggctattgacgccattcatgacggcttcaaccctgaaaatcatcccctcgccgaactcttcgtattcatgcgggacgtttaccccaacaaagacccgttaaacgaaatgtactggctgtacaccttcaccaacgtgcagatgttgccgcagtggggaggtgaagcatga

SEQ ID NO: 384866 - DNA, 255 bp, Salmonella enterica
atgaagctgattatccccggacgttaccgccagagcagaaacaagccacggggaaaacttgagaagaaagcacgggcggcatttgaccgcctgaaaaaaaacgactggtcacatgtgcgacggctggaacgagtaccccgcgcccgcgtgatcaacgtggacagttaccgactgttaagcctgaacgaaggccggacatgggaactgctcaaccacaacgaatacgtgaagaggattagacgatgctacagatga

SEQ ID NO: 384867 - DNA, 441 bp, Salmonella enterica
atgattaatcccaataaaagctttgcccaaaaagccttagccggtgcgcaatttttgcgtatacacgccgaagcaagcgctgccgacgccgatttttttatcgcgctaatgtctgagccttacaccatcgccgccagcgccatcgagcagctcgttgaagaaaacgaaaaactccgcgcccagctcgtcgctttccagaggacggccaacgccgctgttgccgttgacccagcaagcggcccggacactacagcctattacacatctctcttaaaaggcactcgcgtacgcctgaagacagccccttacatgcgcggaacggcgggcctaacaaaagttaatgaacgcggcatcccgttctgttctgtgcattttgaagccccgtatgaagacacccgatgggtaaaggcagagcgcctggaatcaatccccgacgaatga

SEQ ID NO: 384868 - DNA, 192 bp, Salmonella enterica
atgaacgacattaattcaagaatgacgataagcgcacggattcagcaagtgattggtgaattacatgctgcaagactcaacctcgcaaatagcgactatgccgaagcatataaaaatttaacctgtgcagacaaagaaacaatattaataaaaaggcgtttccgggaactttttaggtcgccaaaaccttaa

SEQ ID NO: 384869 - DNA, 228 bp, Salmonella enterica
atgaacgcattacccgtaacgcaatcatatttattactcattggctcaatagtgctggccgtgtttattgtccagcttccgctattgattaacgactattgccataagcgacgccaacgtaatagccgcaacattaactggcaaaaagtgcctaatactgcgcatggcaatgttaaacgcagtgatcaccagaaaatagctaccggaaactatgaggccaggcgatga

SEQ ID NO: 384870 - DNA, 243 bp, Salmonella enterica
atgaccgaatatatgcgcgggaaagtaaaattcgcggtgaaatggtataaatacagtaatgagcattacccagcaggccgcaccgttcatcgggatgaactcaccctggaactgaccaatttagggattgaagcggccaataaagatatggaggaagattttgacgaagtcagcatacttcttgatcgtctggaaaaaggagaagaattagacctgtcatcactgccggagtttgcaatatga

SEQ ID NO: 384871 - DNA, 693 bp, Salmonella enterica
atgaaactcaccatcgaagacgtacagcttgccattaagggcttaacgaaatacagcaaccgatgcatatctgaacaattattagccgtagttgcgggcaattacgccaaaggtaacaacatcattcttctgcgtttgcaatcactgtatgaagatgaatatttcgaatccaccatcggtgagattaaaaacctgtattacaccgaaaagaccgggcaagctcagttgcgcggcgatcttattttcgataccgagaaattggatatacaaagtattctccacagtctggcgcacggctgcgtgtacctgtcaccgcattttatgaacaccacgtcactgaattatagcttcgcctgtctgagtcaagtcaccctgagcaaggccgaagacaccgattttgacggtatcgagccgctggatatttcctgtctggatggactgattaacgcgctctacaaagaagaaccggcaaccgaagcgccagcagaaccgcaggaaggtaattcaccgtatattcacgcgccaggtatgagcagagaagatattttggcgtggataaaagacgtttacaacaacgcacttagcgcaaacagagaagaaaaagaattgcgggaactgaaagccaatagccacacagtagagagtcttttagccgatcgagaaaaacttttaaccgctgcaattcgcaattaa

SEQ ID NO: 384872 - DNA, 363 bp, Salmonella enterica
atgagcacagtcatatttagccacccattagcacaagcgacttctgtttgtgaaggtgatatggaaatgactatggatcacctgaaagaatggaaagaagaattcaagaaacatcaaaatcccgttccggttatttttaatctctacggatttactgtaggtgaagttattaaggtaaaaatagaaaaagatactctttacggcaccttattgatacacggcgataaagaagtaatagatagaatggatgatattttcgctggtatatgctcttcaccgttaagtgttgtgttgggatggtcgaaatatttcccgaacacaaaaccgattaatagaagccgttgcagatggtatgggtgttaa

SEQ ID NO: 384873 - DNA, 261 bp, Salmonella enterica
atgcggacaagcaagacaaaaccattagttgtgtctgcggctggcaaccaggtgattttctgtatccctcagccgcgtatgacgcttgggcagtacgcccagatgaccgggcaaaaggaggccgctgtaaggcagcaggctgacgccggaaaattcattctggcagaagggaaatacggtaagtaccgcgaaatcaatatggtcgcggagtttttaaaagaatatgaagcagcccaaaaagctttaagagaaacggcataa

SEQ ID NO: 384874 - DNA, 306 bp, Salmonella enterica
atgtcaagcacctatgcacaaaaacttcgagagatacgaaaagctgaaggtttaacacaggcggaattctcgcaattggtaggtattgctctaagcacagtgaagaactatgagcggggagggcaagaggttggattgtcgataattgataaagtgaccaataatccatcgctcgaaaaatacaccctatggctaatgagtaaggaaggtaaaaccaacgaatctgcgggacaggtaagccccgctctctcccctgatgggctagacagcacatcatcccgccgaaacgcaaagaaggctggttaa

SEQ ID NO: 384875 - DNA, 987 bp, Salmonella enterica
atgacgatcagtaaacaggaagacgggcgctacctggtggatttgcgcccgcaagggcgaaagggtaagcggctgcggcgtcgctttgatacgcgaggggaagcgcagcgctttgagcgctgggctatcaaaaagtacaacgataaagagtggctggagggtaacgcgaaagatgatcggacgttggaagatttaattcaggcctggtggaagtaccacgggcaatcgttaaagtccggcgaggttgtacgtaacgaactggagcgaatctgttatgaactgagcaaccccttagcctgtaattttgataaaaaaatgttcaccgattatcgtgctaatcggttactggcggggattagccccattaccatcaaccacgaacaagcggtactgagcggggtctttaccgcgctcattaaggccgggcaatttacaggtagtcatccgctgtacaatctgcccagggtgaaaaccacggagaacgaaaagacgtttctgacggcggggcagattgacacactgttgttatccctggacggagataatcttcgtgtcgctaagttcatgctgtccacaggggcgagatgggacgaagcggcgcagatgcagcgatcgcgtattctgaaatacaaggctgttttcaccgatacgaaaagcggcaagaaccggacggtgccagtcagtgcccagttgcatgacgagataatcaaaaaccgcgagtcagggaagattttccctggtgccaattatgacgtttttcgtgatacgcttaaactctcatttgatttaccacccggtcaggcaacgcatgttttacgccacacgttcgccagtcacttcatgatgaacggcgggaatattctcacgcttcaaaaaatacttggtcacgccagcatacagcaaacgatggtatacgctcatcttgcccctgattatttacaggatgccgtcatattaaatccactggtcaaaaggggtgggcaatga

SEQ ID NO: 384876 - DNA, 1395 bp, Salmonella enterica
atggggagtaagtggaccaccgttagcattaacgatattaagttacctgagaaatatagttgtgttggaggcccgttcggttcttctctttcacaaaaacattatgtcgattcaggtgttcctgttatccggggcaccaatttagctggagacatattttcagagagtgactttgtttttgtttctccagataaagcaaatgaattacaacgtaatatggcctttcgtggagacattgtctttacacaacggggaacgttgggacaagtagcgttaattcctgaagactcattatacgaaaaatatattgtgtcacagagccaaatgaagttgactgtaaatccgaaacaagcggatgcatattttatctacacatatttcagaactaatgaagccaaggcattgattgaaaataatgctattgttggaggagttcctcatatcaaccttggtattttgaaagaatttaagttgagactccctccactttcagagcaaaagcgaatctctgaggtttccaagtctattgataacaaaatcaatctaaaccgccaaatcaaccaaaccctggaacaaatgtcccaaaccctgttcaaatcctggtttgtggatttcgacccggtgattgataacgcgctggatgcgggaaacccaatcccggaagcgctacaatctcgcgccgaactgcgtcaaaaagtacgtaacagtgcagatttcaaaccacttccggcggatattcgtacactgttcccggctgaatttgaagaaacagagttgggttgggtacctaaaggctggcgcattgaaagtttttccgaaattgctcaattagtaaaagaaaatgtcaaatcggaagatatctcttctgaggttcattatgtaggactggaacatttagaacgtaaacatatttttattactaattatgggaatggtagagatgtatccagtaacaaatcagctttcaataaaggtgatttgctattcggcaagttacgtccttatttccacaaagtggcaataactccgttttcaggaatatgctcaactgatatattagtttttcgagccaaagagaaatattataaatctttaatggcaatgtatgtatttaccgatgagtttgtagcatatgcaaatttacgctctataggaacaagaatgccgagagcagaggctaaagacctccttaaatatagaatcgttttacccaataaaaacattttagaaaaatttgaattgctcttaaaaaattattggtcaaaagggcaacttaacaatgacgaaagtaaacatcttaccaccctccgcgacaccctgctccccaaacttatcttcggtgagctctccctggaggatctaccaaacttagtcaaccaaaccgaacccgcttaa

SEQ ID NO: 384877 - DNA, 3267 bp, Salmonella enterica
atgcatctctcattcagtgaagcgaagttagaacaggcgataattgaactgttacaggatcagggctatcagcacctgatcggcgataatgtgccgcgttccagcctcgatcaggtgattatcgaagacgatcttcgtcactacctcgccgcacgctatcaggccgacggcatcaccgaagaggagatccagcggctgatcaaacagttcaccaccctgcccgcctccgatctctatgaaagcaacaaaaccttctgcgcctggctggccaacggtttcctgtttaaacgcgacgatcgccagcagaaagatctctatatcgaactgctcgacacccggcatctgcccgccgcgctgcgtgaactgttcgataccgaagatgtgccgctgcaacaggccgcagaaacgccggcaagttatcatcttatccagccgctgaaccgggtaaaaatcgtcaatcagctgaccatcaccggcaaagaaaaccagccacgcattccggatgccattctgtatatcaacggcctgccgttagtggtgtttgaatttaaaagcgcggtgcgcgagcaggaagccaatattggcgacgcgtataaacagctctgcacccgctatcgccgcgatattccgcagctgtttgtctataacgcgctgtgcattatcagcgatggcgtcaataaccgaatgggtaacctgtttgcgccgtacgagtatttctactcctggcgtaaagtcaccggcaatgaaaaccgcgagcaggacggcatcccttccctgcactcgatgattcaggggctgtttcacccggtccgtctgctggacgtgatcaaaaactttatctgcttcccggataaagccaaacacgaagtgaaaatctgctgccgctacccgcagtactatgcggcgcgcaagctgtactacagcattgaacgggcgcgtaaacctttcggcgacggcaagggcggcacctactttggcgcgaccggttgcggtaagagctacaccatgcagttcttaacccgtctgctgatgaaaagcgtcgagttcgccagcccgacaatcgtgctgatcaccgaccgtaccgatctcgacgatcagctctcggcgcagatgtgcaatgccaaaaactatatcggcgacgacaccgtggtgcccgtcaccagccgcgaggatctgcgggagaagctggccggtcgcaacagcggcggcgtcttcctgaccaccatccataaatttaccgaagacactgaactgctctccgggcgcagcaatatcatctgtatttccgacgaagcgcaccgcagccaggtcaacctcgatcagaaagtgatcgtcgataaagagagcggtaaggtgcgtaaaacctacggtttcgctaaatatctgcacgactcgctgccgcaggcgacctacgtcggttttaccggcacccctatcgatgccacgatggaagtctttggcgttatcgtggacagctacaccatgactgaatccgtacaggatgaaatcacggtacgcatcgtctacgaaggccgcgccgcgaaagtcatcctcgatgccggtaagctggaagaggtggaaaagtactacgcagagtgcgctgacgccggtaccaacgagtggcaaatcgacgagagcaaaaaagccagcgccaccatgaacgccattctcggcgacgacgatcgccttcaagcactggcggaagactttgctaaacactatgagaaacgcgtcaccgaaggctctacggtgaaaggcaaggcgatgtttgtctgcgccagccgcgagattgcctgggatttctatcgtcagttgaaagactttcgtccggcgtggtttgaggttaagcaggccccgaatggggttgaactgaccaggcaagaggaaaaagagctgcctccgtccgaaatggtcaagatggtcatgacccgcggtaaggacgatgacgccagactgtacgagctgctgggcagtaaagagtaccgcaaagagctggataaacagttcaaaaacgcgaagtcgaatttcaaaatcgccatcgtggtggacatgtggctgaccggttttgacgtgccggagctggacaccatttatatcgataagccgctgcaaaagcataacctgatccagaccatctcccgcgttaaccgcaagctggaaggcaaaagcaaagggctggtcgtcgactatatcggcattaagcgccagatgaaccaggcgctggcgatgtattcgcgcatcgatgccaccaactttgaagatattcagcagtcggtgattgaggtgaaaaatcatctcgatctgctggcgcaggttttacacgatttcgacagccgggcctacttcacaggagaaccgcaggcgcagctggcgtgcctgaatcaggcggcagagtttgtcatgcgcactcagaagacagaacgccgctttatggggctggtgaagcgtctgaaagcggcctatgacgtctgctgcggcagcgaagcgctttcgcaggccgagcgcgacgctattcacttttatattgccgtgcgttccatcgtctttaagctgaccaaaggcgacgccccggacgtgacccaaatgaacgcccgcgtgcgcgagatgatcgccgaagcgctgaaagccgacggtgtggaagagctgtttttcctcggcgacaagaaagcggagtcgatcgatattttcgacgacgattatctggcgcgcattaataagatcaaactgccggcaaccaagatccaactgctgcaaaagctgctggaaaaagccatcagcgattttaaacagatcaaccagcttcaggggatcaacttcacccgccgtttccagtcaattatggataaatataacgaacgccgggaggatgatgttctcaatggtgaggaattcgattccttcagtcaggagatgaccgatattatctacgatattaaaaccgaaatgggcacttatgccgaaatggggattgatatagaagagaaagccttctacgacattttggcgcatatgcgtgataaatatcagttcacctatgaagaagacaaaatgctggcgctggcgaaagagatgaaggccgtcgtggataacacgtcaaagtacccagactggagcaagcgtgatgatattaaagccaagctgaaggtggagttgatcttgctgctgcacaaacataagttcccgccagtggcgaatgatgatgtgtatatgggggtgctggcacaggcggagaattttaagcagcaccatagtcatacgctgcattaa

SEQ ID NO: 384878 - DNA, 297 bp, Salmonella enterica
atgaaaactctacctgcaacaaatctgcaggcggcgaagctatgtctgtcgcccgtggctgtctggcaaatgctgcttgcacgcctgctggaacaacattatggcctgactctcaacgacacgccattcagtgatgcaacggtaattcaggaacatatcgatgccggtatatctttggccgatgccgttaattttctggtggaaaagtacgggctggttcgtattgatcgcaggggattcgactggcaagaacagtccccatatctgcgggcagtcgatattctgcgggcgcgatag

SEQ ID NO: 384879 - DNA, 342 bp, Salmonella enterica
atgaaatctactgactcagagaacgattcatttctcaaatggggtctgaatcgtaatgtgacaccttgctttggcgcttgtctggtacaggagggaaaccggctgcactatctggctgaccgggccagtatcaccggtaagttcagcgaagcagaatgtcttaagctggatgtggcattcccgcattttatcagccagatggaatcgatgctgactactggtgaaatgaatcctcgccatgcccactgtgtcaccctgtaccacaatggtttcacctgcgaagccgatacccttggcagttgcggctacgtatacatcgccgtttactccacccatcgttaa

SEQ ID NO: 384880 - DNA, 543 bp, Salmonella enterica
atgaatactgtattatccccagagtcatcgcagcctgaactctttccgctggcggttatggcccagcatagttgcctgctccccgagacctccggattgacaccttatgcccaacggaccattcgacgtgctatcaacctgctggataaatatctgcgccagcccggcatgtcctttacctcaagcacggctgcccgtgactggcttcggttacagctggcaggacaagaacgggaagtgtttatggtgctctatctcgataaccagcaccgtttactggagagtgaaacgctatttgccggttcggttaaccatgtccaggtccatccccgtgaggtggtgaagtcagcgcttcgcttcaatgctgctgctgttgtgctggcgcataaccatccatccggtgatccggagcccagccaatgtgaccgcaacattacgggcaggcttaaagaagcgctggcactggttgatgtgaacactctcgatcatctggttatcggttcagatggaattgtgtcgtttgcagagcgaggctggatatga

SEQ ID NO: 384881 - DNA, 444 bp, Salmonella enterica
atgaatatacaaaatcatcagttcgcggagcataccgcaattactgcctcagtggtcccggacgagttacgcatcggcttctggccgcagcactttggctccatcccacaatggataacccttgaacctcgcattttcgcctggatggatcggctgtgtgccgattaccacggtggtatctggaacttttcgacgctcagcaacggcggtgcttttatggctcccgagtcagagcacgatgagaagtggacattgttcaacagcatgaacggcaatggcgcagagcttaccagtgaagctgcagggatggtcgcctgcctaatggcttacagccaccacgcctgccgcaccgagtgtgacgctatgactggacactattatcgcttacgcgactacgcgctaaacaatccggaatgcagcgccattatgcatcttatcgactaa

SEQ ID NO: 384882 - DNA, 822 bp, Salmonella enterica
atgcgactagccagccgctttggccgtataaaccagatacgccgtgaccggcctctgacccacgaagagctgatgagtcatgtacccagcgtgttcgggagtgacaagcatgaatctcgttcagaccgttatacctacatcccgaccatcaccatcctcgaaagcctgcagcgtgaaggctttgagccgttctttgcctgccagacaaaggtccgtgaccagagcaagcgggaacacaccaaacacatgcttcgcctgcgtcgtgccggtcaacttaccgggcatcaggtaccggaaatcattctgcttaacagccacgacggctcatcaagctaccagatgctgccggggctgtttcgtggcgtctgtaccaacggcctggtctgcggtcagtcgttcggagaggtacgggtgccacataaaggcaatgtcgttgagaaggtgattgaaggggcttacgaagtgctcggggtgtttgaccgggtggaggagaagcgcgatgcaatgcagtcactggcgctgccagccccggcccgtcacgcgctggcaaatgctgcgttggaatatcgcttcggtgaggaccaccagccggtcacggtatcgcagttgctgaccccacgtcgccgggaggactacagcgatgacctgtggaccgtctaccagcgcgtgcaggagaacctgatgaaaggtggtctgtcagggcgaaccgcacaggggaaaagcagccgcacccgtgctgttaccggtattgatggcgatgtgaagctcaatcgcgccctgtgggtgatggcagaaaacatgctcgagtttttcgggcgttaa

SEQ ID NO: 384883 - DNA, 450 bp, Salmonella enterica
atgaagaagctgaaaggcgttatctcagttttcgctctgagcctttgtctgctgtcaccggctcaggccgaagaacagcgttacataagtatccgcaacatagacatggtctgggtgccaggcaatgtctgcgtctggcagtttcgcctggacaacggcggaagtggtgaaggattcgggcctttgacactttccctgcgtctgaaagataaaggggggaacacgctggcgatggggaatatggcagtggctgcatttggcgacagcgatgccactcgctctcaggaagcctcgctggagaacgaatgcgtggaaaacgtcagttccgtcgaaatcatgaaggcaacggaagcctctgatggttaccagactgacctgccgctgtcagtgtttgatccgcagtattatcacccactaccggtgtcggttgccggaggtaagacatcctga

SEQ ID NO: 384884 - DNA, 636 bp, Salmonella enterica
atgaaattactcaccacagcggcgctggtcgccagtctctgcattatctcagcgcccccggtcctcgctgaaaatatcgtgggttcagtcagaacctggaagtccatgcaggcagatggctggaaatccgctgatggatacgatgataaccatatgcataacgcactctatcaggcggttgtactcgacaattatccctggacgaatcacttttttcttcgcagcagagatggaggctcgctttatctggcagacaaaaaatccatgacggtcagatacattgatataaaaacccgtgacgaatatccgctacatctccggattatttatcagggcaataatgaaggacagggctgttatttcgctgtcgttgatgaccggatggctaactactggacagccgttgaagacaagctgctctaccagtatcccgccgttgaaaatgttgatgaaaaaacggctgaactcaaaaaacagttcacgccggaagtcatgatgatggtaaaggacaattgtgttaacaaacggcagcaggcagcgcttgcagcccggcgtactgaaaaagacagggaactgcaacagtgggtggcacagcagagtcttgctgagctatgccgtcgtaccggtaactgctga

SEQ ID NO: 384885 - DNA, 714 bp, Salmonella enterica; identical to SEQ ID NO: 226009

SEQ ID NO: 384886 - DNA, 1068 bp, Salmonella enterica
atggaaggtcattcagacaaaacgctaaaggtactggataaaaaaacagcgtggttaaaaaagaatccgagagctttccacttttatctcttccgggcgtgctcactgatctcggaacaattagaaaaaaatatcctctctgaggatgaatgcaccccaccttttccccttcaggaaagatataatgctttcaacagaactatatccaccaatcaatatgctcagccttcccgcgatattatgtcgtggtcgcagactcttcctgctgagttagtggacactattgataaacaatccagtactattgatgctaaaaatacaacttcttcctccgcattcttgtccccggagaaaataaatcttagtacctgtaaacaagataagaaagaaaagaccgataaacttccacctgaaaatatcagaaatgcaaacgggttactttttaaaagaattaaggatatctcaaagagaaaggttgacttttctttattcatacacttgttgaaaaccttcgtgaaagagcccaaagaaatatcaaaattaatctcatctatagatatcgaatggcgtcatcagtacgctctttatcccgcacctttttcatgggttaacagcaaagatgaaactcaatgccagtggttatggcaacaaatgcaggaacgatgcttaggcattccattaaaaccacatgataataaagagaaattttattttatcttcgctatttttgataactggaaaggatggactactgggcaggaatcttatcttaacggtaaaaataaaaagcgtaataaaggaaaatttcttggacatggcatcatactggaaaatggcatcaataaaaatcacaaagatattcttctggatgagcttaaaagtgcatgggagcaaaaggaaagaagagccagaagagctaaggaacctgccgctgtgaagttgaccaaagcggctcaaaaaaaacttgagtttattgcgcacgcagagaaaaccacaccgaaggaaattcttaacgagctgattaataatgcttttaatgatgcgaagaatcaatcacggcaatcataa

SEQ ID NO: 384887 - DNA, 207 bp, Salmonella enterica
atgactacccgcccccctcttctggaagaccaatttgttgacatggcatttattacgagtctgaccggactcacggataaatggtactacaaacttattaaagacggtcttttcccaaaaccggtgaaactgggacgcagttcccgatggttaaaaagcgaagtggaagcctggcttcaggaacgtattaaccagtcccgtaaataa

SEQ ID NO: 384888 - DNA, 594 bp, Salmonella enterica
atgaaaggctataaaccgcattacgaagaactgaagaaatattaccagacctggctgacaggttatacccggctggcagtctgcctgggaatgtgccatcagaatataacccaccatcataccatgacggttggcagccttaagtttccgggggagggagaggttattgctgttgtcccccagtgcctgcaccggattatttatggcagaacagcagccccactgactgttaatgatgacctgagcgtcagtttatttacccaggaacatctgctggctcaccatcccatgatggaggggattttgctgtcggagtgcgtgcgattaaaacagcgtcctctggcaaataagctcatcagtttgttccaccagttcagcggtaacgagttgcgtctgaagctggtctggctgtgctggtacgatttgatgctggggaattgccttgatgactggacagacaacctcaggttcaaaaaagacaaagagatggatatctggatcattgaccggcaggcagaaaaccctgcgttgacccgactgatggacgagtacgtctgctttgcatggcggacgacagcggaaccactgaattag

SEQ ID NO: 384889 - DNA, 570 bp, Salmonella enterica
atgcaaaacaaacaacgatgggagcaagactggtttttgggagccctcctgaacaaccatatcgacaaaatggttgaacgctattcctgcctgcgtgctttacgcatcgatctattctaccaggatcataccgctaagtttttcctgcgggatcaccggcaactcgaatgggatgtcagaaatctgatgaaccgtatgatgcaactcgaagtggtagtcggtttcttctgggttatcgaatggacagaagatcaccactaccatgcccatgtcgtgttctggctggatggtagtaaaactcagaatacctatccctgggcgcagcaatccggtttgtactggagcgatatcactgaccgggatggctggtatcaccgatgtgagtttaaagagcattacgaggccaatatcaacattccagtacgctacagcgacccagacagtatcgacaacatccgtcaggtactggcgtatatgaccaaaatccagcagaagcttggcctgccgctctacggctgcaacgaagtaccaccgcgcccactgacgggacgaccacgacgcagtctctga

SEQ ID NO: 384890 - DNA, 420 bp, Salmonella enterica
atgtacgcaaaatcctttatcgctctcgatggtaacggtcgtctgatcggtgcccgtaccgcgcagaccgccccttacgaccgctacacctgccatctctgcggcagcgccctgcagtaccatccggaatacgacacagaacgaccgtggtttgaacaccggtctgacgcgctgacggagaacgggcgacaacactgcccgtatgttaaccctgaactgaaagaaacccgtcttatccggcaacttctatcttatgtaccggatgcacgcccgctggtttaccaggccgactggcactgcagcggctgtgacggcgattaccacggggaacgctactgtctgacctgccgaaccggtgagcacagtcatgtgctttctgatgctgaaagctgtagtggtcaagctggactgtgggggtga

SEQ ID NO: 384891 - DNA, 252 bp, Salmonella enterica
atgtgctttctgatgctgaaagctgtagtggtcaagctggactgtgggggtgacgacatgtgtatgctaaagtgccacctagcaaatgaccgtcaaaatcactttgtgacggctgacgaagccatgagcgcaccgaggcagatatggagctgcgcctcatgtggctgtcgtctggcgctgcatgcaggctcttcctctgtgacccggcctagtttgaaaacgacctgcgctcagtggctcaacatgtgttga

SEQ ID NO: 384892 - DNA, 132 bp, Salmonella enterica; identical to SEQ ID NO: 86206

SEQ ID NO: 384893 - DNA, 516 bp, Salmonella enterica
atggaaaaagtaaccgaccagtattcacccgaaattgcgcggcacaagctcaatgcttatttttcaggtaatttcatcatgcttgacgtgataaagcgtttgcaaaaatcaagcctgtgcgtatttgcagccttatgtgatggaaaaacgatcacaactgcagggtatgaaattaatgccgattttagcgttaaacgagcatctgcggtcattcactccttgaagctgaagaatctccctgtctcaacaaattccgtttcaacgggctctgatgttggtggaatcaccaatcaggcggtttttttcatcagtaaagaggatcttcattctctgaaatccgaaccggaggagattatgaggaaatgcgcaaggttacacgcgcaacataaacgttcacatgcacaaagggacattgctcgtctatgcaaggagtttggcaaggaagcgatacttaaattagtaaaccaagctgcagccaaccctaagatgcctcctgatgggatgagtgcatgttaa

SEQ ID NO: 384894 - DNA, 918 bp, Salmonella enterica
atgacagaatttcatgacgttcgtttggaactgcttgttgaagcctattcgcttcctcaggcagagcgactggcgtacatcgatttgtgtatacgctacctcggcagcatatccagggccgaaattatggctgagttcaaagttgcacaggctgcagcctcaaaagatcttgctttatatcgggaactcaagccaggtaactgtagtattgatacggcaaccaaaaggacgattatttcgcatggtagctatactccattggtgcagattagtgttcatacagcgctgaatctgatccagtatggtttctctcgttcggagttgatgcaaaaacgtccgatgctgccgattgatgagatagacccactttatctacccgagcgtttgaaagaagaacaggtctatgttgtcaccagggcaataaaaggccgctatgcgatcaaatgctcatatggctcagaaagtggcgagcatggcaaacggatactatttccatcagcattatttgtagatcggaaaaactggtacttcagagcttatgatcgaaatgattcggatccaaacctgagtgggtttaaaaactttaagttatcgagaatttttgatgttgagcaagaggaatcgatactgccgacggttgcagagttgacggacagagaatggaatgaggaggttaccttcatcattgcattcaaaaaagatcttcgacctgagattgtcgataaaatctctcgcgagttttcgatcagcggaagtgtgcattctgttacatgccgcgctgctttggcctggtacgtaaagaccaactggaaaatagatctgacaggaaataacaataatggttggttgtattttgatgttctgaataaagaagctttacaagaagttaaatgcctggagaagttgtttgaagagtaa

SEQ ID NO: 384895 - DNA, 3087 bp, Salmonella enterica
atgaaattcaccgaagacacccgggtaaaaatccccgtcatcctccacctgatacggctgggctaccgctacctgtctctgaaagaacaacactgggacaaagaaaccaacatctttcctgaccttttcaccgcagcagttggcagaattaaccccggaattgcgcccgacgacatcgggcgcctgttaaaagacctcacgctgcttctcgacaacgacgacctgggccgcgccttcttcgaaaaactcagcgaccgttccggcatcaaattgatagacttcgataacttcaacaacaacagcttccatgtcgtcaccgaactaacctgcgaaaacggcgatgaagagttccgcccggacatcacgctactgatcaatggcatgccactgatctttatcgaagtaaaaaaacccaacaaccgcgaaggtatagtcgcagaacgcaaccgcatcaacgaacgctttaagaacccaaaattcaaacgcttcgccaatatcacccagttcatgatcttctccaacaacatggagtatgacgacagcgacccggagccgattcagggggctttctacgccagcagctcttacagcaacccggtattcaactactttcgcgaagaagaactcttcaacctgacggcgttactgaaaccactgccagaagaaaccgaaatcgccatcctgaaagacaacaacctagaagtaatccgcaccaacccagaatttcagaccaataaagatcacaaccgcccgaccaaccgcctctgcaccgcgctgttaagccgcgatcggctggcatttatcctgcgctatgcgctggtgtacgtcgccgaacccggcggcatccagaaacacatcatgcgctacccgcagctcttcgccaccaaagcgattgagcgcaaactgaacgcgggtgcgaaaaaaggcatcatctggcacactcagggcagcgggaaaaccgcactggcttactacaacgtgcgcttcctgacggattacttccagaaccagcaggtgatcccgaaattctactttattgtcgatcgtcttgatctgctccagcaggcgcagcgcgagttcaccgcccgtggcttaatcgttcaccttatcgactcccgcgaagccttcacccgcgatatcaaagcgacgcaggcgctgcacaatcaccacggcaaagcggaaatcaccgtcgtcaacatccagaaattccgcgatgacccggacgtcgtcaccaccaaagactacgacatcagcatccagcgcgtgtacttcctcgatgaagtccaccgcagctataaccctaaagggagcttcctagcgaacttaagccagtcggataccaacgccatcaaaattggcctgaccggcacgccgctgctgggaacggactacaactcccgtgatatcttcggcgactacatccacaaatactactacaacgcctccattgccgatggctacacgctgcgcctgatccgcgaagagatcgccaccaactaccggatgatcctgcaacaggcgctaaaagaggtggaagtcagaatgggcgatgttgatcgcaaatacatttacgcccatcccagcttcgtcaaaccgatgctgaactacatcgtcaccgactttgccaaaagccggggcgcgctgaatgatgacaccatcggcggcatggtgatatgtgacagttctgaacaggccaaacagatgtttgaattgttcaacgccgactacgtcgaatcgcccaccgtcaccgacgaaatgcctgtattacaggccgcagaacccgctgccgtttaccagatccacgccaaagaaacacggaaaatcaaacgcgccgccctaatcctgcacgacattggcagcaagcaggaacgtaaagagtgggtggagcaattcaaagcgggcgagattgacctgctattcgtctacaacatgctgctcaccgggtttgatgccaaacggctgaaaaaactctacctcggtcgggtgatcagaaagcacaacctgctccaggcgctgacccgcgtcaaccgaacctacaaccacttccgctacggctatgtggtggacttcgccgatatccgccaggaatttgacgccaccaacaaagcctacttcgaagagctacaagccgaactgggcgacgaaatggagcactactcccgcctgttcaaatcggcggaagagatccgtgaagaaatagagcatatcaaagacgttctattcagcttcgatacagaaaacgcagaaatctttactgaccagataaaccagatccaggaccgggaaaccgcgctggcgctgaaaaacgcgctcgccgacgcccgcagcctgtacaacctcatccgcctccagggcaacacggagtttctccaggcgctggacttcaataaactcaacatcctctatcgcgaagcctgccaccgcctcgacttactcaacctgaaagcagatctggaacagggtgttgatttatccggcctgcttaaccgggcgctggaagaagtgatctttgaattccacaaagtgggtgaagaagagctggtgctggctgacgaactgaaagagacgctgcgacgtacccgtgaggcgctggctgctaacttcgaccagcaggacccgcagttcgtcagcctgaaagatgaactggagcgcctgttcaagaaaaagaagcttagtgaagtcacccaagaagaaatggttgcgaatatcggcacactcaataaaattcatgaccgcataaaagagctgaaccgccagaacaacctgctacgccagaaatacaggggcgatgtgaaatacgcgcgtacccacaaacgcctgcgcgagcgcggcggcctgagcgagccggagcgtaaaatcttcgaagcactgctcggcgttaagctggatgcggatgaaaaagtgctgaacaacagccagatactgaacaatgaaagctattttgagcgccagattgtgtcatctgtgcttgaccactttgaacaacagcagcacatcaccctcagcgcaaaagcggctggcgacatcaaccgcctgattgtggcggaatacctgaacgaatttaataccggagcacgtacgtggtag

SEQ ID NO: 384896 - DNA, 1638 bp, Salmonella enterica
gtggtagaactagaatttagagacaaaaccaaaaccctgatcgacagcctgaaaagcatctgtgcgaactacggtctgggtaacgacggtaatgaattcaaaatcatcactcaggcattcctgtacaaattcctgaacgacaaattcgcctttgaagctaaaaaggtggataaaagcatcgccagcgccgaaaaatgggaagtcgcgctcaatcagatgagcgaagaacagcgggataaactgcaactgaaaatgagcgccgacaccgcccgtctgaaaccgcatcacttcattcagtatttatacaaccgtcaaaatgaggccaatttcgccaccacctttgacgacaccctgatggacatcgccgccaccaacaacgacgtcttcgcggtcaaaaccgacggcggcgcgaaagtggtgctgtttgaacgcctcagccagtacatcgccgacgaatcaaagcgcgacgacttctgccgcgccattatcaacaaactggccgatttcagctttgaacgcatcttctcgcagaaattcgacttctacgccaccatctttgaatacctgatcaaagactacaacagcaactccggcggcaaatacgcggaatactacaccccccatgccgtggcgcgcatcatggcggaaattctggtaccgaaagcacagcagggcgtcgtgcgtaacgtaagctgttacgacccgtccgccggttccggcacgctgttgatgaacgtggcgcacgccatcggggaagatcgttgcagcatcttcgcgcaggacatctcgcagaaatcctccagcctgctgcgcctgaacctgatcctcaacaatctggtgcattcgatccccaacgttatccagggcaacaccattttgcacccgttccatagagacggcagcgcgctgaaacgctttgactacatcgtatccaacccgccgttcaagatggatttcagcgacttccgcgacgcgctggacagcaaggaaaaccagcaacgcttctttgccgggataccgaaagtacccaaagccgccaaagacaaaatggcgatttaccagttgttcctgcaacacatcattttctcgctgaaaccgggtggcaaggcggcggtcgtggtcccaactggttttatcaccgcgcagtcgggtattgataaagggattcgcgaacatctggtgaaaaacaggatgctggcgggcgtggtttccatgccgtcgaatatcttcgccactaccggaaccaacgtgtcgatcttgtttattgatgccagcaacaaagagaaagtggtgctgatcgacgcctcgaatttaggtgaaaaagtcaaagacggcaaaaaccagaaaacggtactgacggaagaagaagagcagcgtatctgtgaagtgtttaacaacaagtggagcgaagaggatttctcggtggtggtcagctatgacgatatcactgcgaaaaattactcattcagcgccgggcagtattttgatgtgaaaattgaatacaccgatatgacaccggaacagtttgccgcgaagatgaaagggtttacggaaaatctggagagtttgtttagccagtcgcgcgagctggaagaagaaattaagaagcagatggctgggctaaattaccatggttaa

SEQ ID NO: 384897 - DNA, 1152 bp, Salmonella enterica
atggttaaaacgattggcgatgcctgtaatattagaacaggtaaacttgatgcaaatcgggcagtgaaagatggtgattatccattttttacgtgcgctgagttcccagaaaaaatcgatcactatgcatttgatggtgatgtggtacttattgctggtaataatgcaagaggtaattttcacgtaagcaggtatcaaggaaagtttaatgcatatcagcgaacctacgtgcttacagctaaacctggttatgatattgattatatttattatgctttaaagcttgaactacagcggctgcgagaaaaagcgcaggggtcgcaaacaaagtttctgactatgccgattttgaccagcatttcattacgagatcttgttgaatctgaacagtcgacagtttcaaaaattttaaagataatggataaaaaaatcgcacttaacaaccgaatcaactccgaactggaagcgatggcgaagatgctgtacgactactggtttgtgcagtttgatttccctgatggcaacggaaagccttataaagtctccggcggtaagatggagtataatgcaaagctgaaacgagaaatccctgcgggatggacagtccaaacgctgtctcaaatagcgaatatcacaatggggcagtctccagcaggggagtcttataacgaagatggaatcggaacgctatttttccagggttcaacggactttggttggcttttcccaacgccacggcagtacacaatatcacctgccagaatggcgaaaaaaggtgacattttactcagcgttcgtgcgccggttggtaatatgaatattgccaatgccgattgttgtattgggcgagggcttgcggcattaaacagcaaaagcggctcagatggatttttattctacgtgatgaagtatttcaaacaggtatttgatcgtcgaaatgcggagggaacaacatttggctccatgacgaaagatgatttacattcactgcaagtcgtttgcccagaacccgaattactgaaacggtatgacggtattgtttcagaatacaataaaatgatttttacacgtagccttgaaaatcaggatctaatcaaactccgagactggctcctccccctgcttatgaacggacaggtcacggtcaaataa

SEQ ID NO: 384898 - DNA, 1266 bp, Salmonella enterica
atggctctgagtgatgtgaaggttcgttcggctaagcctgaagcaaaagcctataaactagctgacggtgaaggcatggttttgctggttcaccctaacggttccaaatattggcgactgcgttatcgctttggcggcaaagaaaagatgctggcgttggggaaataccctgaggtatcgttggcggatgccagggcacgccgggatgaagcccgtaagctgttagctaatggtgtcgatccaagtgagaacaggaaagccgttaaggtagagcaagagcaagaggcgataacgtttgaagtggtcgccagagactggcatgccagcaatcagaaatggtctgcatcgcatagcgctcgtgttttgaaaagcctcgaagataatctcttttctgccatcggtaagcggaacattgcagaactgaaaacgcgagacctacttgtacccatcaaagccgtagagtcatcagggcgtctcgaagtcgccgcccgtttacagcagcgtactaccgcgattatgcgctttgctgtgcagagtggcttaatcgattacaaccccgcacaggagattgctggtgcgattgctacggcgaaaagaaagcaccgtgcggctctggatcttgaacgcattcccgaattacttcaccgcattaaacactactctggcagaccgttaacccgactcgctgtcgaacttagcttgttagtctttatccgctcaagcgagctgcgctttgcccgttggtcagaagtggattttgaaacggctatgtggacgataccaggagagcgtgagcctctggaaggagtcaagcattctcagcgtggttcgaagatgcggacacctcatcttgttcccttatcgcgtcaggccttatctattctggaaaagatcaaatgcatgaacgggaaccgagagctgattttcgtgggcgatcacgatccgcgtaagccgatgagtgagaacacggttaataaggcgctgcgggtgatgggctacgatacaaaaacggaagtgtgcggacacggtttcagaacgatggcgtgtagctctttgattgaatcaggcttgtggtcgagggatgcggtagagcggcagatgagtcaccaggaacgtaactctgtacgggcggcttacatccataaggcggagcatctgggggagcgcaggttgatgctgcagtggtgggcggattatttggatgccaatatacgggaatttatctctccctttgactatgccaaaactaacaacccattgagatga

SEQ ID NO: 384899 - DNA, 858 bp, Salmonella enterica
atggccttaacgattaagggactaaataccggcgttattcgtcacaatgataagtttatcgcgctggcgcttaaggtgaagtcactgagaaataaagaaacactgcttttctttcctgtgctcgcgctgcgagacttgttgatcggccttgaacaccggctttatttacaacactcgctgccggaacaagagcaggaaaaacgccagaaagctaaaagcagtcatgtgcttaaaatgcatgagaatattccggcaatactccgtgaagagctggaaaatgccgatgttaatcagcgtgttgaatctttagcgttgagcgataatacagaaaaagtattaacctttacgttaaagctgcacaatggtagccatcttgatttacaggttggtgagtggcaggttgaagttctggtgatggctattattcacgccattaataatgccgaaatgcgtgagctcgcattgcgtatttcttcaatgctggactttttaccattatacgatgctgactgcctggaaaacggtaatatcgaattcgatacctataaccagcctgactggaaacataatctgtataaccattatttagcgctcgtttatcgttatacggatgaggcaggacaatcgcatgattgcggcaccatcattaagacccgtagtcagtcaggctctaaagaagctgaagcgatatcacgccgcttgctgaatttcagcccgcgtcttaaaaagctggaaggaaaaccgtgtaaggtttttgtcagaacgcttggaaccggtaaagcagcgcgtctgacgcaagatcaatgcatgcgcgcgttgcataatctacgcatggcgtcatcgcaggaaaaacgctaa

SEQ ID NO: 384900 - DNA, 1263 bp, Salmonella enterica
atgccgccggataatgagctgatgaatgaactaaaaaaagagcttgggttggttcagggcgttatcttgttaaccacatcattattagggactggcgtttttgcgcttccggagctggctgcgctggcagcaggcgacatcagcctttgggcatggccgctgctcattattttgattttccctattgcgattgtctttgctgtgctggggcgccattttccacacgctggcggcgtagcgcattttgtcgggatggcatttggcccgcgtctgcaacgagtgatcagttggctgtttttatcagtcattcctgttagttttcccgcagccttgcatattgcggtgggtttcggccaggcgctgtttggctggcaaagcgaacagctcttatttggggagctgggtactctaggtttactatggtttatgggatcgcgcggcgccagctccagcgccaacctgcaagccattatcgctggattaattatcgcgcttattgccgccattctgtggaaaggcgcgattaaacctgcagatatcaccttcccagccgcaaacgaaatcaccttttcccggctgtgtaccgccctggcgatcatgttctggggatttgtgggaattgaggcttttacgcatttgtcgtctgaatttaaaaatcctgaacgtgattttccgcgcgcattgatcattggcctgatgctggccggcgccatttattggacctgtaccgccgtggtgctgcattttggcgtctatagcgacaagatagcggcaacagcctcgctaccgcttattattgttcatctcttcggtatccaggcgttgtgggtagcctgcattattggttatctcacctgctttgccagcctgaatgtgtatgctcagagttttgcgcgtctgatatggacgcaaatgcaatatcagcccgatcactatctggctcaactctctcccggacgccttcccttgcacgcgttaaacgttattctggcctgttgttgcgtgagttccctggtcgtctacgccctgaagattaacctcaatgcgctgatcgtctatgctaacggtatttttattatgctctatctgctttgtatgctggcgggctgtcgactgttgaaagggcgttgctatgcactggcggtgacgggttgtctactgtgcctgttattgctggcaatgctggggtggaaaagcttatatgccattatcatgctggctgcattatggctgtttttaccgaagcgaaaacgcatggcgtaa

SEQ ID NO: 384901 - DNA, 180 bp, Salmonella enterica
atgccgccccaacgggtttacagcaaaacgacgggcatccacaacagcctggagacgatcagcagcaccaggaagatcaggccgaaaatcgcgcctaaccacgccaatggtggaagggtgacgcgcggcggattcgatatgtacgcccatcaccaagctattgccggtcaacccttgtga

SEQ ID NO: 384902 - DNA, 300 bp, Salmonella enterica
gtgcatatcatcctcgacggagcaggctatcaccgtgcggaactggtgctggactgggcggtagtgatgaatatagagctgcactacctgccgccatacagccccaaccttaacccgatagagcggttatggaaggtgatgaatgacatggtgagaaacaattgttacttcgccacggcaaaggagttcagggagaaaatccgccacttcttcaacgatactttaccggaacttgccgggaacctgtcatgtcgtattaacgatcacttccagaaaatgaaaaatgcatcttcaagttaa

SEQ ID NO: 384903 - DNA, 975 bp, Salmonella enterica
atggggattagtaaactacctgatggccgttatctcgttgatctgcgaccatctggaaccgaaggcaaacgtattcgaaggaaatttgcgactaaaggcgaggctaaagacttcgagcgatgggctattgcaaaatacgccaataaagaatgggttgaacctgcaaaagacgacaggcaccttcacgaaatcatagagttgtggtggaaacttaaaggccagctattgcgtgatggtccggctatccaccgcaagcttctggcaatggatcgccgccttgtgcatccgttggcctgcaatatcacgccgaagctttttaccgaataccgggcgcaacgcacctctgccggaactaagcccaagacaatcaatgacgagcaaacacacctcagcagcatgttcaactcgctgcatgagtccgggcactacccgacaaaatcaccactggcaggtgtcaggcgtattaagctcactaaatcagaaatggggtatctgacaaaagaacagatcgtgcaactactggcacaactggacggagataatttactgaccgtaaaactttgtcttgctacaggtgcgcgatggaatgaagcagccatgctgaccagcggtcagttactcaaagaccgggtcacttacatcaaaacaaaaaacggcaataacaggaccgttcccgtatcccccgaactggccgccagcatccgcaaaggcaaggaccgtattctgtttcccaatgtcgactacaccaccgtcagaaacacaattaaatccattgcgcctgatcttcctgacggacaggccactcacgtactgcgtcatacattcgccagtcacttcatgatgaatggcgggaacatcctcgccctgcaacgcatactcggccatgcaaacattttgcagacgatggtctatgctcacttcgccccggactacctttccgaagccgtgaaattcaacccaatagcaagcctttag

SEQ ID NO: 384904 - DNA, 366 bp, Salmonella enterica
atgttcactttaggttccagattgagagatgaacgtaagcgtctagggatgaatcaaactgaatttgtagaattaatcggcgtttctaggggttcgcaagtagcctacgaagcagataaaaaaattcctgggggagcttatttagcctcaatagagaaggtgggtattgatgttctttatgtccttaccggaaaacgcatcccaaaacctaatggtttaacaaccgaaagcccagaagaaacggcccttctcgaaaactatcgcgccatgaatgaggcggcgcggttaaatatgcaggcggttagcgctgcgttcgcacaagttaacctgaataaagatacccttaaagatggcacagatgagtag

SEQ ID NO: 384905 - DNA, 321 bp, Salmonella enterica
atgacaaccaggacgcaatcacgtaccccaaaatatgaaatgacaaaaagagatgtcgcaaggagcattgcgcgggaacgcgaggtactggcggttgaggcagtggctcgcgcccttattgaaaaagggattgagccacaactaccgcttaaagaatttgctaaacggtttcgcaatggtgacttgatgtcagtacagacagatgcaaatcgcgggttattgcccattgcgaagagtaaaaaaggatgtaaccgccgggtcgatatgattgcatatataacgggtggagtaatgaatttcttctcgctacagcaagggtga

SEQ ID NO: 384906 - DNA, 579 bp, Salmonella enterica
atgttcaacgtaaaacgtaatggctctaacgtagaaataaccgacatcccgaccagtattccgtttgccgtgtttaaaagcatcgctgacgaaaccggggctaacgaatgtttggttgcgtatgccaaaggcaaggatagctatgaagtggttattcggcacgatagcgtaaacatggctggggctgctgcatggctggcgctggagtctcgcgaacaaataacgggtaatgcggatatttacaccatcggtaagcgtattggcgttatgcgtgtaaaacagcacatgagtgctcaggaactggaagaggctattggtgcgccagagggttctgtattccgttgggagacaggtaaaattgtgccatctgcaatggatattgcaatgctggctgatgttttaaaatgcaataaagaatggctggaaataagcagtaaatataaaaatgaactgcccccggattgcgagagcagaaacatggaagaaactgtaatgatagctatgcgggaagcatcaaggacgatggagaaacataaaattaacagcctctttaagtcttattatgtcttggttatttaa

SEQ ID NO: 384907 - DNA, 156 bp, Salmonella enterica
atgaaaaattacacattacctgtaaataacgcagtaaggcgattccgctattaccagaaacttgcggcattacgcacgaatccaaaaatgcaatttggtctggaagtagagaagtgcgtaggcgtgaataaattaacccagagtgtaaataaatga

SEQ ID NO: 384908 - DNA, 837 bp, Salmonella enterica
atgagctttgctatcaaacaccctgcaatccgttatcacggtggtaaattccggctggcaacctggattatcagccattttccggcacatcgatgctatgtggagccgttcggcggcgccgcttcggtattgctgaaaaaagagcccagcgaagcggaagtctacaacgatctcgatggtgatgtggtgaatctgtttcgcgtactgcgtaatcctgcaaccagtcatgcgcttatcaccgcgtgcgcccttaccccatattcacgcgaggaattcattctcgcttatcagcactgcgacgatccggtagaacgagcccgccgtctggtcgttcgcgcaacaatgggttttggtagcgcaggtgcaactaagggcagtactggtttccgcctcgatacgcgacgtaacagcgccactgctcaggctgtctgggctcgccagcctgataacctggcggcggtggctagccggtttactggtgtgcttgttgagaaccgcgatgctattcagtgtatgcgtgaccacgacaccccgtcgacgctgcattttgttgatccaccttacgtacacgatacgcgtgtggaagtaacaaaaaacagtgcctaccgcttcgagttaactaacgatgaacatcgccagttgctctcagttctgaagtccctgagtggaatggtcatcgtctgcggctataacagcaaactctacaacgattcactctcgagctggaaacgcgttacacgcaccacagcagcgaatgggcggtcggggtcagttcagcgtacagaatgcatctggattaatccggcagcacaaaataatcaggagcgtgcagcgtga

SEQ ID NO: 384909 - DNA, 222 bp, Salmonella enterica
gtgatcgttaaatgtatcaaagattctgaaggttggtggactgaaggtgaagtgtacccggctcatgtcgttactggcggctttattcaggttggcgatgatgacgatccgaacggagaagaatggagcgcaactcctgtggaatatcgggaagatggttcgattctgtatcagatcggaggcatagaaggtgaagttttgtttgaggagttcgcacaatga

SEQ ID NO: 384910 - DNA, 183 bp, Salmonella enterica
atggcctacaaacttaaattacaagcagaagacgttgagcctggtgatgttatcacctaccacggaaagtgttacacggtgaagtcgttctggatggaagacggcaaagtaacgctatttggcactgatggttctgaaactgagtatgaccgcgatgacatgctaaatgtcgagagggactaa

SEQ ID NO: 384911 - DNA, 231 bp, Salmonella enterica
atgctgctggacgggaagcccgttcctgataatcgcgccgatgtgacccgacgcctgggtgaccacattcacgggaacaggggaagtaacagttacgaggacgggatgtttaaaatcaaatactttaagaagggaacatcacatatcacattcaagcgacctgaactggtggacaggctgaatgacatcatcgccaggcactatccggggatgctggcggcaacacaataa

SEQ ID NO: 384912 - DNA, 912 bp, Salmonella enterica
atgaaacgaaaaacacccacgcctcatgatgcgttgtttcgccggtttttaactcatgcggaaacagcgcgtgaattcctggagatatatctgcctccggcgttgcaggctgtctgcaacctcagtacgttaaaactggagtcagggagttttgttgaagaaaatctgaaagcccatatctccgatatgctctattctttagagacgacaacgggaaaagggtacgtttattgtgtggtggaacaccagtctaccgaaaataaaatgatggccttccggatgcttcgctacagtgtttcagcgatgcagcagcatatttcgcagggacacgacacgttaccgctggtcatccccgtccttttttatcacgggtcggtcacacagtatccgtactcaatgaactggctggagtgttttgatttaccggaacaggcccgggcactgtataccggtgattttccgctgattgatctcacggttatgccggattcagagatcatgacacacaggcgtgtggcgctgatggagcttgtgttaaagcatgcccggcaacgggatatgctggagtggttaaaggagctggtttatttgttgtcgctggactgttataccgatgaacagctcagaacggcgtttcattatctggttcaggtgggcaatacgtccgatcctgaaaggtttatccgggggctggcagaacaggctccacatcatgagggtattctgatgacactggctcaacagtttgaacaaaaaggtcgccaggaagggcgtcaggaaggccgtctggaaggccgtcaggaagcgatacaacagatggtgcgtaccatgttgaccaacggtgctgaccatgaaaccattatgaagctgacagggttatccgctgaagaactggcaaatatcattcactga

SEQ ID NO: 384913 - DNA, 360 bp, Salmonella enterica
atgctgggccactacaactggcgtgtacatgagccgttcgcgttttacctcagtgacgacaacagcgacgtgatagaagtaccagccggattcatcaccgaccttgccagcgtgccgcgcatcttctggtcagtcatgccgccagacggcaaatacgccaaagcggcaataattcacgattacctctacgacaatgcgttacgcacgaagaaggaggcggatttgatatttctggacggaatgacggtgcttggcgtgccacgctggaagcgaacggtaatgtattgggcggtgcgggcatttgggaggggaatgtacgggaaagggcaaaatactgtcattaatggcaacggaagatga

SEQ ID NO: 384914 - DNA, 219 bp, Salmonella enterica
atgaaacacgttaagaacgtatttttagtcttggcctttgcattgtcggctgcagctttttcgacatctgccacggccgccaatgatactaaaacttctccaaaaactgatgatatacctcacaatcctctcccggaaatgaatgaactttgtaagaacttactcgaagaaggacttgtgatcttaccaaacatgttaaaagactgctggggaaactga

SEQ ID NO: 384915 - DNA, 576 bp, Salmonella enterica
atgcctgataagtttagtatattcgatttaattggtgcggcggctggcgttgaggtccgccgtaccgaatcctccaatcaaaccgtaaattcagtacttgccaaaaatcctgcagatactcccacacaagatagccatgatggaaaccgcgacgattccagattagatacagatgttgaggctcctgactgtaaggcccaacaagaagaagaacaattcagctcaaacacaactgaactgcatgaattcatgcaaaaaaaccgcatggatagtatgcaagctcagcttgatatggtcattacggcgatccgagataaaaaggcagaaacaactggcaaagaaatagacaacgacctaagaaaaaaaatggcctctttcacagttcattttatgtcttggtggtgtttgtttgttgcgagcatgtttgcgtcttttcttatagcccacggtggaaaacctcctgttgaagctattgttgctttactaggaactagtactattagtatcgtaggacttgtaggatttgttgtaagcggactattcaaatcacgaaaagaaaatgataaagaaaagtaa

SEQ ID NO: 384916 - DNA, 471 bp, Salmonella enterica
atgtacagtccagtacaagtagccaatgcttttgttgtgcatagtttgcagcacaataaatcccttacccacatgcaagtacaaaaactaacctacattgctcatggttattaccttgctttaacgggtaagccgcttttaaatgagttagtatctgcctggaaatatgggcctgtaatttctggtatgtatgatgcctttaaaaactacggaaacaggccgattacttccacagcaatgtcaccatatggtatggcacagctagatcctcaagctgaaagcgtcataggtgctgtttataaattttatggtgacaaagatggtattgagctttcccagttaactcatatgccgggaactccatggtctcaagcatatgatggctataactcgaccatcatttctaatgacgttatcagagattactatgataacttactaaagaatcagcaaacttgtcgcgggctataa

SEQ ID NO: 384917 - DNA, 381 bp, Salmonella enterica
gtgctgaaaaaccgctttcctgatgtcgcgacacacatcattgcccatgagtgttttttgcgcggcgcggtcattacggcatgggcggagcggtttcgccagcgtctctcctcgctgtggttcgttgaggaagagataaacgatgacgattgccgcgcagagtggcaactgttaggcaaaacatggcagggatggtggcaaaatcagtggcaactctgggggcaaggtcacaaccgcaaaatggtctgttcgttaaccggttcccacttagaacaaggtgtcgccgttaatctggcggctagtcgccgctttgttacctggctatggcaacaacctgaactccagcaaagcgcccactattccgccaaacgcgtcacgtaa

SEQ ID NO: 384918 - DNA, 291 bp, Salmonella enterica
atgtcatttagtccaaaattgattatcgcgttacaaacccgcgttcagattatcgacaggcccgttaaattttcggtagagccggatggcagtcgttggctggaggtacacgaaccgctttctcgtaaccgtgctgaatttgagtcagacaaaaaagttccattgcccgttacgccagtgctgcgcacgtttatcaaaggggatgacgttgatacttcgcgggttaatgaggtgctggagcgccgttccggaatgccggtcaacattagcgcaggcaggtctggcctttaa

SEQ ID NO: 384919 - DNA, 357 bp, Salmonella enterica
atgagcagattcacaactcccgccattctggaaatgctcggtcactacaactggcgcgtacacgagccgttcgcgttttacctcagcgacgacgaaagtgacgtgatagaagtccctgcaggctttatcactgaccttgcgacagtgccccgcatcttctggatactgttaccgccagacggcaaatacgcaaaggccgcgataatccatgactatctctacgacaatgctttacgcacaaaatttgaagcagatcgcatttttcttgacgggatgacggttcttggcgtgccgaaatggaaacggacagtgatgtattgggcggtgagattgtttggacggggtaattactactga

SEQ ID NO: 384920 - DNA, 372 bp, Salmonella enterica
atggcaatagcaattaacccgggaaccctgggtaacgcccccgcacccgcctttaatctgactatgctgagcggcatatttggcagcatgccagccggagaaatgagcgtttgccctgatgccaatacagccctgataggctgggagaaagtcacgccggagacgaaaaatcaccccagcccggacgcgcaatacggtactatctggagtatagacacaatggggtgcggcactgacggtaagcgccgaattccggtaaataccatcatgcaggaatgggtaaatcaactggcactcatgaacagcaacaccatcatgatgcgccagcgcataaatacaggtgcgtggggtccgtgggtaaggtggctgtaa

SEQ ID NO: 384921 - DNA, 411 bp, Salmonella enterica
atggctatttacacaaaatccccaccaccacccaccccgcaactgccggatatcgatatcactaagttagccggtcgttttggcggcttccctgttggtgagatggaaaccattgacgacatggatacagcgcccgttggtccatatgtggttcgtaagggtggggagccaggctacccgaaaggaacccaaaacataccgccaggcgcggcaccctacggtattgttctgactgtctcctccgcaggagccggagtgggcggtaagcgccggataacaaagcccctccctgacaatgaatttgtgtatcagctctattttgataccacgctcaaattattcgtccgttcaggatctggcaaagatggtttttccgcctgggaaaaaagaaccccgatgatgaagaggtag

SEQ ID NO: 384922 - DNA, 147 bp, Salmonella enterica
atgtacgcacgttatgctggtttgatttttgatatggacggtactctcctggatactgaacccacgcatcgcaaagcgtggcgtgaggttttggggcgctatggtcttcgttttgatgaacaggcaatggtcgcgcttaacggttag

SEQ ID NO: 384923 - DNA, 1371 bp, Salmonella enterica
atgaaggctaaatatttggcgctgatgatcggtgcttgcttttctcataacctttgggcagcgaataatatcactattgagcagcgtctggctgaactggagcaacgtgttgttaatgctgaaaaacgggcatccgatgccgaggcgcaaattcgctcgttgaaacagcagcaggtcgccgctacgccgacggtgaatgtccagtctgccgagcccattgcagcaggtaaaacaccgccgaagctgaccttatccggattcagcgatattaagttctatggcgatgtcgaatttaatatggatgcggcaagccgttccggtagtctgacatcgacgagaacgtcagcgaataaagattgggcaccgggaaccaatgaacgctgggatattaacggacgcctgttgctgggctttgatggctaccagcggctggacaacggtaattttgccggattctctgtacagcctctggcggacctgaccggaaaaatgaaccttgatgatgccgttttcttctttggtcgtgagaatgactggaaaattaaggttggtcgttttgaagcctacgatatgttcccactgaatcaggatacgtttattgaatattcggggaatacagcgaacgatctttacagtgacggttacggctatatctatatgatgaaagaaggacggggacgtagcgacagtgggggtaacttcctgctgagtaaaaccatcgacaactggtatttcgaagttaacacattgctggaaaatggcagtacgttatataccgagaagcagtaccacggaatggatttgagcaacgataaaaatgtggcttacgtccgtccggttatcgcctggcaaaacgggcgtttttcaacggcgatagcgatggaaagtaacgtcgttaacaacgcctatggctattatgagaatgggaagtggatcgatcagtcagatcgtacgggctatggttttaccatgacctggaatggtcaaaaaactgacccggaagatggcgcagtgattaacctgaataccgcctatatggatgcgaccgatgagacagattttaccgctggggtgaatgcgctgtggcatcgatttgaactgggttatatctatgcgcataacaaaatcgaagccttcaatgctaccaatatcgatgccgtttgtgaggacgattgttggatcaccgatcccggcaattatgacattcacactattcatgcctcatatttattccccaacgtgatggatatgaaaaactttaacatctacctcggtgcctatgcttcatgggtagaggccaatccgaataatggcgataacagtgaagatgcgcgttacggcgggcgtctgagattcaaatatttcttctga

SEQ ID NO: 384924 - DNA, 336 bp, Salmonella enterica
atgcaccagttgcccggtttcagcattcgtcaactcatctttgggtttcttttccgcctttaccttgccaaaatagttagcgatgttcttgacgtactcaaccgcttttttggcgtcaatgccgctttcaatcaggatctgcgccgcttcgcgcgcaatacgtccgctacgaataccgatattcccggcaagcgcctgctcaaacagttccgaggtacgccaggcacgtttcaggctctgagaggagatacgcagacgcgtcgcgccgccaagcaccacggtttttggcgcgccggtatcgtcacggttgaggttggcggcaggataagcggttaa

SEQ ID NO: 384925 - DNA, 549 bp, Salmonella enterica
atgagtattgtgcaagaggatcacaaagccacgctgcgcaaatggcatgaggatttgcaggagaagcggggtgcacgggccagcttgcggcgcagtaaaacggtgaatgaggcctgcttgtctgagggatttcatttgctgttaatgcagacgcattcgttgtggaaaaacaaggcagactggcatgttactgcattggcaattactgcggtactggctgcgcatatcaaatttattgatgagcgacagagttttgctacacagcttggacagaagaagagtggtgacaatccggtaatgtcaaaactacgcttctcccgcctgtctgcggtgaaaaatcccgacgagctattacgccatttgcgtcgtgcagtgcagttgcttgatggttcggtaaatctaatttctctggcggacgatattttccgctggtgtcaggaacaagacgacttgctgaaccaccatcgccgccagcagcggccaaccgaatttctccgtatccgctgggcgctggaatactaccaggctggcgataacgaacaagattaa

SEQ ID NO: 384926 - DNA, 654 bp, Salmonella enterica
atgaagcaggacttccgctgcggctgctggttgatggaaaaaagagaaacggcgatgaaggccattacccgcaatatcgacagggagatctggcgcgacctgatgaaaaagtcagggatgctctcgctcatggatgctcaggcccgcgaccagtggtacagaaaccttgaagggaatgacattccgacaatcagcgaagccaatattctgagcacatttgaacaactacatcagagcaaaggtgaggtatttgagcgtggggtaatcaatgtatttaaaggattaagttgggattacaaaagcaacagcccttgcaagtttgggaggaaaatcatcgtgacagggctggtgaaatatgaccgttggggatttggtcttaactggggctggcagcgggatcgcctagctgatcttgagcgcatgctgatgctcctcgatggaaaaccagtccccgacaacagagccgatgtcacccggcggcttgccgatcacattgatgcgaaaaagagtcataccggctatgaggatgaaatgtttgcaatcaaatactttcagaaggggacggcgcatatcactttcggacgacctgagctggttgataagcttaacgacatcattgcccggcactatccgggaacgctggcggcaaagtaa

SEQ ID NO: 384927 - DNA, 1242 bp, Salmonella enterica
atgagtcagatagcattatcacggtttgggctgtatcaggtaattttcggctggatgaattttgttttagttatccccgctatttaccttctgcttggtttaccgctgactatgcgtgaatatggttggtctggcaccgatattggttttttccaactggctgggctacccgctgtattcaagtttcttctggcactgccagttcaacgttttagagtggggaaattccactatagtcattggatagtgctgttgggtatgctacttgtggccttactctatctgattagtgatccgacgatgttggggcaccgtacccctctatttttgttggcgctggccataaacctcctgtcaacctgggcggatattcctctgaatgcgctggcggtgaaactgcttcctcgttcagaacagatgcgtgccggtagtatccgttcaatggcgacatttatgggcgcgattgttggaagcggttttatgctggttcttcagggactgtgggggtggcaggctcccttttatgtaatgtctggcggtctgttatttggcctgttgttaattacagggcttagtgaagatgagcacggtgatgaacgagtgcctcagtttgctcaacctataatggatttgtcaggctattttcggcagccgggagccaaactttggatctggctattggtgagcagtttcccttttattggtgccgtctggttatacctgaaaccgatgctgttagatttaggcgtagaggctcaaaacgttgcctgggttgtcggtgtcgggggagggagtattggtgcaatttccagtttgctaagcgggccgctggtccggcatttaggcgtgacaaaagctattcccggttatttatttttctccttgttagcgcttgtcgctttaactttatcgatgttatttaatctggatattgcgtggattattgccagcatttttttagtggctgttgctatggggggggtgtcttcccttatgtttagtttaatgatgatttttacccggcataaataccgagcctctgattatggttttcaaacaagcctttttgttgtgacacgtctgacgattcctctcggtgcgggaatggtattagataccgggggctatgttttgatgctgacagtactttctttttgcgtattatcggtattcattcttacgctgatattcagaactcatatcacatatatggtatcgcatgaacatgatcgattgacttag

SEQ ID NO: 384928 - DNA, 1032 bp, Salmonella enterica
atgaattctaatcggggatcgatattacagcaatattgggatctggcgctggcaaatattaaagcggatgtattgcgcgtggcgatagaatgggagctatttagttatcttgataaaccaacagaaaccgctgctgttgcggcccagtttggactagatcccgcgaatgcgggttatatgctggatatgctctggagtatggggttactgtcccgtgaatcaggcgaaccagcacggtatgtcactcaggctgtggcgcaaaactatttttgctctgattcagttcagtatatgggagacgcttttttatttcggttgaggggattacgccactttggcagccgactggcggagcatgttcgaagcggcgtgatttgcagtcaggcagatggtgtacaaacaacgcaggaaaattgggcaaaagccgctggtttacagatcgcacaggagcagcgggctgttactgtagatgcagtgatggcgctaatgaaacgcattcctgagtttcagtccggcggctggctgctggatttaggcggcgggccggggttgatagcgattgctatgctgcaagcctgcccggcattttacggtgaggtgtttgactttcctgagacagtaaaagtagctcaacataatattcatcgggcaggattaggtgagcgtttgagggtaagatgcggcgatttggccgttgatccaattggtgagaacttcgattttatctggtgctcttctgtgctgcattttgtcccagatattaatgacgctctggctaaaatatgggcagcgctaaaaccgggtggtgtatttattagtgctcatgcggagataccgccaaccgctgctgaagcagggaaaatacttccctattacctgtcaatgcagatgaaacgtaatcatgtcacccgaaaaggtgaactatattcagcgatggagacaatcggttttacccggattgagcaatatgacgatatcgcgtttcccattgctcctgtttccgttctcattgccagaaaagaggccgtatga

SEQ ID NO: 384929 - DNA, 2010 bp, Salmonella enterica
atgcctgggaatgaacgtatggaaaataatatagtgaaaaaacacttttcttataaagtagtcagtctggtattatccggcttgctatgtccgctctgctatggcgatgactctgtgattattgtgacagcggataaaaccgagcagcgacttgaggatgttccgagtagcatttccacattctctggcgatgagttagagcgtcagaacattgaagatttggaaactcttgcgcgtaaaacgccctcctttagttttcaaagcactggacaatccggctttaacccaccagtggttcgcggtctgacctcctacgcaactgcattttcttcctcaatgctgatgatggttgatggggtgccgacactggcaaatcaggggtttgagaatagcctggttggtgttgaacgagttgaagttttgcgaggacctcaatccgctctatacgggaaaaatgctgaaggtggagtattaaatatttatacgcgccagccggataatgccccccggatgcgccttgatggtgggctgggcagtcgtaataagcatgttgtacgcctggatgccgcacaccctcttattgaggatactctttatatcggtgttgccgggcagtttcgcgaacaggatggatttatccatgatcgttataatggtggttgggccgacgatcgtaaaagctatgatggcagggcggttattcgttggactcctaatgataaaagtgatatttcacttcgctatagtcatttgaattatcgtgacggtgcatcgctgtggggaagtgtcagcgcaccgcgctatgaggttagctctggcacgccaggctggaatcgctcagaaggagaaacggtctcactggatattgcgcatcattttgattccggtatatcgttgcgctcaattactgccaaaacagactattatgataaacttaagcaggactcggattttatgcccgctgaacgtttttttatgcagcgggattatcatcttagtaacctgtctcaggaattgaggttgtccggtgagcaggaagaggccagatggctgattggtatctatgccgataaaactgacaacgatttatcgtttaccaataaaacaccgttaaaagtcaaaacaactaactccgcgctggaggggaattcgctctcgctgtttggtcagtggctacagccgataactgatgaatggtcgctgaccctgggggggcgtatagaacatgaccagatcgaaattaagccgaaagattcatcggccaaaagccagcactggcaacaattctccccaaaagtttctctccagtatcgttggatgccggaacaaaacctgtatctgagctactcggaagggttcagggcaggcggttatgatccatttgcttccacggtcaattatcctgcctattcaccagaaaaagtgcgttcttatgagacgggcattaaaggcctgattgcccctattcatttacgatattctgtcgctgcctattatatgcaaataaatgatatgcaggtgcaacaattcgtcgcgccgggggtaacgtcgattactaatgctgccaccgcacactccagcggtcttgaagcatctcttgaatactggctgaatgagcagtggagcgttgatggcactattggtctgaacagaacccgttttgagcgctatcgcgacggtaataatgactatgatggtaataaaaacccgtatgcgccagatctgacctggcatattggtgtgcgctatgacgcggataactggtatgcaaatgcctctctggacagcgtcgggagtatctatcttgacccggcaaataaatatcgtcgtggcagctatcagctattgaatatgtcagcaagttatccggttaatcagcatattactctgagcgcctacgcccaaaatgtcaccaataaacattatgatgcggttggatttatgaatggtaatgtgaccgtttacagcccccctcgggagttaggtatgagggttagttatgaattctaa

SEQ ID NO: 384930 - DNA, 282 bp, Salmonella enterica
atgaatgaaattattgacgccaaattggctattaataaattttatgtagatgaaaaccacccacatattatcatccgtgagtctcctgatattgctacgtttcgtctgttgatgatggcctgccccgccgggttgtataagcaactggaagacggaaccatacgctttgattatgttggttgtttggagtgtggagcttgtcgaattcttggtggagaaacggtcttgtctaaatggacctatccacagggagcgttagggattcattatcgcttcggttag

SEQ ID NO: 384931 - DNA, 1290 bp, Salmonella enterica
atgtctgaagagcagtttgatgcgatagtggtaggaggtggaccggcgggtgcttcagcggctcttgtgcttgctcgggagggggggaatgttttggtgattgagcgcggtaattatgcgggtgctaaaaacgttaccggaggacgactgtacggccatagtctggaacgtcttattcccggattttcagcacaggctccgattgagcgtcgcattacgcgagaaaaaatttcttttttgaccgacaacagtgccgttactttagattaccacaatggtcggaatgtatcgctatcgcacgattcttattccatattgcgggctaaattcgatccttggttaatggctcaggcagaaacagctggtgcgcagtttatacccggtattcgcgttgatgggctggttcagcatgatggcagggtgattggtgtagaggctgatggagaggtacttgaggcaaatactgttattttggccgaaggtgttaacgccatactggctgaaaagatcggtatggttcagtcggtgtctccagcgtcggttgccatcggcgttaaagaacttattgaactgccccgcgaattgttggaagcccgttttggcctagaaggcggtgaaggtacggcctggctattcgctggctctccttccgatgggcagatgggcggcggttttctgtacaccaaccgtgatacgttgtcgcttggatttgtgtacggtctacatcatattgaacacgcgaaaaaatcggttccacagatgctggaggatttcaaacgtcacccagtggtacgaccacttattgcgagtggtaggactatagaatatgcggctcacctggtgcccgaagcaggtatcaatatgcagcctaaactggtaggcgatggagtgcttattgttggtgatacggcgggtatgtgcctgaatctcggttttactattcgtggcatggatttggctatcgcatccggtgaagcggcagctcgtgcggtgctggaagccaaagaaaaaaatgacttcacttcctgcgggctaaatggctatctccgccatttagaagagttgtcagtcatgaaagccttgcgtcactaccgcaatgtgcctgcaatgatggacaatccgcgcttgtttacgtgctatccccagatggcagcggacattatggctgatttgtttaccgttgacgggcaaccgccgcagcctctgcgtaaaaagatcatgcgccgttgtaaagctgctggctatctaaacctgattaaggatggcataaaaggaataacgaccctatga

SEQ ID NO: 384932 - DNA, 939 bp, Salmonella enterica
atgaaaaaattatcgtcggtatggttatttagtgaaagaaaagaacattatagcgggctggtgacggcagctactgccttgggagaaaccgttaaggcgttggcagaggtatcgaatttaccgaatatcaatgtggatgtactgtataccttaaaagaaccagcggcaaatcactgtgttgaagactatgccgaaacgatagcagaggtaataaaacaagccaaaccagcgcaagggctacttctgttgtcaacaggcaaaagagataaggctttggcagctcgcctgagtattttattagacgcgtcgttggttaatgacgccaccaacattcggttggaagatgggaagttactggttgagcatctgttatatggagggttggctctcggcgaaaaaaaagttaataccccatttgttattgtaactataccatcgggcgcgttcagtgcatcggtatcagagccaaaaaaaactgtttccggtcaaggtgtgttgcttaactacgttcctcctcatcactcactgatgtgtcaggctcggtatagtaaacctgttgataacgtcgagttaaccaaagctaaatgcgtggttggcattgggcgaggtttagctgcacaggacgacttagcccttattcaatcattggcaaattgtttaaatgccgaagtaggctgctcacgcccgatttccgaaggcgagcattggctgggacgcgagcgctatatcggtatctcgggagtgatgcttaactgtgaggtttatttggcgctgggtatttccggccagatccaacatatggttggtgtcaacgatgcgaaggtcgtcattgcgattaataaggataagaacgccccgatttttcagttcgccgattacggcattgtgggcgatctttatgtggttgtgccaatgttaattgaaaaattacagtcataa

SEQ ID NO: 384933 - DNA, 789 bp, Salmonella enterica
atgaaaataatcacttgctgtaagctggttatcgatgaacaggatatcgttatccagaaggatcgttccgttgatataacttccgctggcgcaaaaatcagtcagatggatctcaatgcgatagaggccgcaaggcttttagtggtggatgagcaagacatagttattgccctgagcgccggaggtagtttgttaagtcagactaaacttcgtaaagatcttctctctcggggacccgatgccctgtatttggtgcagggtcaacggcttgaacagctaacgccgaaagagaccgcgcaggtgctggcgctggcggcgaataaaattggctacgacttaatcctttttggtgaaggttccgatgatgtgtacgctcagcaggtggggctactggtcggtgagatattaggattgtcggcggttaatgcggtgagcagtatttctctcaatggtgatagcgtattggtgcagcgaacgttagaaaacgaaattgaggagttgtgtttatccctacctgccgtgcttagcgttacctcagatattaatgtgccgacgctgccaaccatgaaggcaattttagcggcgggcaagaaatctgttgttgtgtggaatgaaacagatattggctggttgccgccatctgtgccggacattgagacagtaaatattcgtgccttagctcaaactgagagaaaacggattctgcttgaagggtcgttacctgatgcggtagcggttattacggagcatgtatgtaaatcgttggatctttatcatgacaagagttaa

SEQ ID NO: 384934 - DNA, 1149 bp, Salmonella enterica
atggacttttcactgactgaagaacacgagcttttgctgacgagcttaaaggaactgattaatcgagatttttcagaagactattttaagagttgcgatgaaactcatacctatccagataagtttttaactgcttttgttggtagtggaatggggttgttgggaatacctgaggagtttggcggtgtacccgctgatatgttgacacaggttctggtgcttgaagaagtcgcccgtcttggggctccagcgtatcttctgacggtcgggcagcgtatgcgcagtatgttgagttttggcagtgcctcacaacttgctaaatgcgctgaaatagcgctgaccggtgttcccccttatgcgctggcgtgtactgagccacaggcgggatcagacagtagtcgcattatgaccacttatacccgcaaaaacggaaaggtttatctgaacggtcaaaaaacctttattactggagcaaagaattatccctatatgctggtaatggctcgcaatgctgaacctcagaacgatgaggattgtttcacgttgtggtgggttgagtctggtgtatctggtgttgaacgacatgatttgcacaaaatcggttggaatatggtgagtaactgtgaggtatttttcaacaatgttgagctagatgaaagtgacagagtaggtgaagaagggcgtggttttatccatatgatggaaaactttgatcatgaccgtttagtgattgctgcccacacactgggagccgcagagtgtgcgttcgacgatgcagttagctatgccaaccagcggattcagtttgataaaacgctcggtgagtttcagttaactcagctaaagctggcacagatggctattaaaatacagaacatgaaacactatgtttgtcgggttgcttgggagtatgaccaggggctgtctattcgtctttcatcgccgctatgtaagctttactgtgcgcaggctgcctgtgaggttattgacgatgcgatgcaaattttggggggcttggggtatagcaatgaaagtcgcctgtcccgcctgtggcgagacacccgagccagtcgtatcggaggcggtaccgatgaaattatggtgcatatatctgcccgtcagattttgaaacagcataaaacccgttag

SEQ ID NO: 384935 - DNA, 966 bp, Salmonella enterica
atggctgtttttttaaaaaaagagtatcagcttgactacaaaagtcttcgtctgaataaagggaagtctggtcagattcgttttctgactcctgaggattttggagagtgttattcagatcatattgaacttgctcgcgatttcaatctgatctatttacgctatagcccggtatgcaatctgactatcaaagaatcaaataacccacataacagccaagttttagtgataacattagggttacatggtaaatcttgttatgagactacacaacctgctccaacggtaaacttcacgactggatatacaactattaatgctttcaatcgctgtactggtcagcgccagtataaatcgggcgaaacgaccgcacaattacgactggtgataggagagaaattgctgcgccaatatattggcgaaaaaagcgcaaactcactgttgggtattgggcaacttaatcagttgctacaccaaaaaacatcacccaccagtctctctcacgcttcaatattagtgcgccacatcaattatcactcaactggcgtaaacaaattaatgttgcacacacatagtctttgcttgttatctgaattagttggcgttttattaccacagccgaagagaaacggacaaaaactatcgcaggacgagatacagaaattagaacatgtacaggatataatgctacaacagatggaaaaacctttaactgaagaatatttatgtactattgtcggcatgaacaagtgtaaacttagagaaggatttagttatttatttaataccacaccgcataagatgcttttagaaatacgtatgcgtaaagcgcatctaatgttagaattaggatatcaggttgcacaaaccgcctggagcgtagggtatggacatcctaataacttcagcatagcattcagtaatttttttggttattcaccaaagtttatttatcaaaagcaatag

SEQ ID NO: 384936 - DNA, 810 bp, Salmonella enterica
atggctaactgtttttataaagatcgtagtgttgcagtgcccgttgatgaacgagttattgaaaagatgatgaattatttaatgctgaacggaattttcggcagttcggcatcccgggcctattattcaggctggaaagaggaggatgcgattaacattgccagggaatatgtagcggataggatcggtgctcagtcccaagaaatattttttacttctggttatcttagtttaaataatattgttgttaaagctgttctgaatgaatacagaaagaataggcgtcatgttataatttgtcattctcaaaatttaaattcatctcgattagtcaaggagttagaaagtgaaggttattcgttaactatgttactttcgcttgagaataagatagttaattctgatgaaataaaaagggtaataagtaaagacacggtattggtttctgttgcgagtactaaagctgatgctggatttgttgcgaacgtggccggaatttgtgaggtttgccgtcggcagggtgttatattacacgttgatgctgctcagtgcattagtgagggagctattaatgtaaataaaatatctgttgatcttatgtcactttcaagctgtgaattatatgggccaaaaggtgttggtgctctgtatgtgcgccataactcgaaaatttgtgctgccctcacgaatgttaagctctcagacacacctccagtatataagatagtcggcatgggagaagcgtatcgtatcgcgaaacaaggagtaaaaccgtgtttaggccacacctgtcagttatgtgattggtga

SEQ ID NO: 384937 - DNA, 1098 bp, Salmonella enterica
atgtcgaaggaaaagctatctcataaggacattatgtcggtaattactacgttgattcgccggattgaagcgattgaggacgaaagttgtgggcattttcctctataccgttttgctgagcgacaatggaaattatcagcgggcggctcatggatggggggattctgggcgggagtcttatatctaaaggcgtttaagactcgaagtcgggttgaccgagataacgcaataaaaatgcgcaaaaagctagagagtaaacttaatagcgacacgctccagcgcagctttatttttcactatggcgcgggattaagcaattggctgtctggtgatcctatggctaaacagatgtgttatctggcggggcaggcgatagcgaaatcagaacaggcagaattgggttttattcctctaggctcggctatgggggggggagcgtcaggctcgcaaatttttagcatcgatccgctggcatcgacgctcttgttgttgtccgtaacaggctatcgcgagttagctggacggcagatgtctaaggcggtgagcgcttgctatgagcaaactggacgctggtactctgaggccagttatcaatcaggtcagttttcccatcgcggtgttcccggagattgggccagggggcaggcgtgggctatgttggcgttaatgcgggccgttcatttattcggtgatgattatcggtcctttgcgcggcaaacggttgaacgctggcgcgctcagtatagttatcatatacccattaatcgcttgagtcagccagaaggagcgcgtgatccttgtgccagtctgatagcctgcatcgccatgttggggctagcacgattgatgcccgacacggcatggcttgagtcacacgcgttgcaacagctcgcagcggttgtacgtagcggctatcttgacgagggtcagtttgcattatttgacagtggtgctctttttaaagaaggcaagttcatcggtcattgttatcgaacctcagaaaaggaagaaagttgtgttgaatctccctgcggcatattttacttgctcgcagcgttaatggcggcagataggcagatcgaaccgttatggctttag

SEQ ID NO: 384938 - DNA, 1164 bp, Salmonella enterica
atgctggtttcaaaaaattttacacgttttattctcacggcaattttgacgctcgcaatgacactccctatgctgattttctatgcaattggcgttttaggacccacactggttgcggacttaacaattgatacgggatggctgggaatattaacaatgagtacgttcggactggcatcgttgctttcgttatgggcaggtacgtttgtgaataacttaggttcccgttattcactggcgttgcttttctggtctaccctgttggcgtatgccctaatggcgttgttacctggtttcattggcctggtggttgcgttgttattttgtggatttgctcaggcattggcaaatccggtaactaatttgattattgctgagtcggttgagccgcgttacaaggcaggaatggtgggtatcaaacaatctggcgtacaggtttctgctttatttgccggtctgtgcttaccttctctgtcgttacactttggctggcgaggtgccttattcacaatagtacctgttgccctgatactggcgttactggcacctcgtatgatcgttaaacaacctactaagaacaaccgttttagcgtgattaaaccaggtaaaaaattatctttactcatggcaatacagctatgtgttggaatggtattgtcatcatttattacctttataggcgtttttgcttcagcacaggaagcctcgcctgtcatgattggctatctgataggtttattcggttgcatggggatattttcgcgggtgtttctcacccctctgggggctaaaatgcaggacgaatctctgttgttattatctttgattggtctctctattttagtcttattgattgttccgctggcatcacctaatcgttattggcctctatggttatgtgttgttggtatgggaacaacggtagttgcaacaaatgctattgcgatgagtatgttgttgcgcgataagcaatttggggctccagcgccgtcagcgggtttattgtcctgcggtttttttgccggatttaccgttgggcctccgttgtttggctggctgcaaagcactcaatatcactttagcgcaggctggattatgttgctgttggtactgatgttggcaagtgtcctgtgtttgagactatatatcgaacggaaaaagtaa

SEQ ID NO: 384939 - DNA, 1629 bp, Salmonella enterica
atgaatagatcaggcattattgacttagtccccgctgatgtgcgtcgtcaatggggatctgatgggacatatcttaatcaatcggtgttttctctgttttgtcggcatgctaacaatcagccggataaaccagcagtgttatcgttggaaggacatgtaacctatagggaattgctggaacagtcgttacgattagcggccgctttacgtgatatcggaattgtcgaaggagatgtggttgcgtatcaacttactaatagctggcgcagttgtgctatcgatctcgctgtggcagcgttgggaggaattgtagcccctttcccgccgggacgaggaaaacttgatatacagtcgctggtgcgccgttgtgacgctcgggcagtaatcgtgccatttgaatatgcagggattgatttatgcgaagttattgagtctttacgacctacgttactgtctcttaggatactcattgttcagggagaaaagcgtgaaggctggttgagccttgatgaaatgttccggtttgcgccaattgagatggaccgattaccacaggttaaccctgattcccccgttcgactattggtatcatcgggaacagaatcggagccaaaactcgttgcctattcgcataatgccttagttggtggtagaggaaaattcctacagcgcatctatcctgatggtgcgagcttttgtggtttgtatttggttccgctggggtcctcttttggatcaactgcaacctttgcctctttgtcatggttaggtggttcgatcattgtgttaccgcaatttgacgtggcagacgctattagcgcgataaatgatctacggccaacccacatttttgccgtaccgacgatgttacagcgcattgcggctgaccctcgtttacaggagattgataaatcaagcttgcggggattaatttgcggaggggcagtgattgatgaagtcaccgttcgtcgctgtgtagaagcatttggttgccactttataaatttatatggttcagcggatggtgtgaactgccacaacacgcctgaggaacctcaggatgtggttttccatagtatcggacgaccgaatcctgccgtttgttcaatcaaaatcactaatgagcatggccaggaagtaccacagggcgaggtcggtgaactcaaagctcgggggccgatgagtccgatgcagtacgtcaatgcgcctgaactggatagccgatatcgggatgaagaaggttgggtatgtaccggtgaccttggctatatcgatgccaagggctacttggttttagctggacgtaaaaaagatattattattcgcggcggcgctaatattagccctgtgcaaattgaatcgttaattattggtcatcctgatgttgttagcgttgcctgtgtgccagtgccggatgacgatctcggccatagaatttgcgcttgtgttacattgcgtgagggcgctcaacgtttttcattaaaagaattgactgattatttacgcgatcagggattagaagtgaataaattgccggaatatctccgtttttatcgtcacctgccggtaacgcctgcgggcaaagtggataaaaagcagttggcagtcgaatccgcatccttatcttag

SEQ ID NO: 384940 - DNA, 1866 bp, Salmonella enterica
atggctttattaaatgaatttacgttctcctcgggcggggggatttctctccccgggtttaaggggctattcacttccttggtttatcaggcgcaaacgctaggattaaagccacagactatgggagaaagtaattgtgataatggtctatccttcaaattatctcatccatcaatgacaccgattcgctgtgacatatttggctggtcagaagacagtctctggcctgcaacagaatacacgattcaggccggttgtggattgatgtccgtgcacggtcgggctagtgggaaaacgcaaagcttaggggtggattatgtctcgacattaactgcttctctttcgatccagggcatgttcgcagctgccatcggtcaattgcgtggaggtaatttcagccgcgtcaccacttctatgttacaggggggattgctcagcgtgggtcaataccttgccggggcaacggctacggatgaaccggagtcgttgttaccaggcaaggcagatactagtttgcgcccaccgtttgtctccgctgacggagtagtatttgaacttgaaactctgtttgccgagccgtggcagcgtttctggagtcaggtagggatagacaacggtactgctgggcaggcttggagtgctttcctaatgcgctacgctaaagctgtatcccctttgccggtggcttgtatgcaggcattagcccgcttgcctatggccaaaatacgagcgttggccgcagaaagcggcatctcactcagcccggttcgttccttatctgaacggatgaaggatgaaagttttaccgctgagttgcagcaaggaccgtggaattttcagactccactaactggtggaaaagcattaacgcttttatccagcagttctagtttacctctacaagggattaaggttattgaatcctgccgccgcattcagggaccattagcgggacacttattagcgtcattaggtgcggaagttatacggctagaattgcccggcggtgatcctttacgggctatgtcgccaagtgctaatgggtgttctgtccgttttgatgctctgaatcggctgaaacaggtgcgcgaagtcgatattaaatcggtgcaggggcgcgaagaaattgagcagatgatccgggaggcagatgttttcctgcaaaattgggcatcgggtaaggctgctcaattgagactggattatactgatctagctaggatcaacccgtcgttagtttacgcctatgctggtggctggggtaagcataatgaggagattcaacttactggcactgattttatggttcaggcatggtcaggtgttgcggacttgatcggtcatcattcgagaactcgtggcggatctctgtttactacgttggatgttctgggcggggtaattgccgctcagggcgtcgttgcggctttgctcaaccgggaagtaaaaaaacagggagcaaatatcgaaagctctcttttgggagccgctaatttgttgtgtacttcacaggcgttccctgatgtaaggaaacatgcgccacctgaggtcgatttaattaaaggcgtatacgctacggaagacggattaatggccattgagtgccaggatgaatttcaaattaatcttttagccaaatttttaaatctaacattttccacagatatattaagccgtgatagacaattaaagacaattttttctacccaatcaactaattattgggaaagcaaacttaataatttgggaatatcagcttcaattgttactcaaaaattatccgatcttgtgactaatagcaggttgaatagtgatatctgtacaaatggctattccgcaattactacatattggaggttccaatga

SEQ ID NO: 384941 - DNA, 273 bp, Salmonella enterica
atgtctgttttagtaaatgttcctgctattttacgccaattaactggcgggcaaaaaaaggttgaggttcacgctgataatatagaaggcgtgattgaacagcttgaggttaattatccgggaattaaagcacgtttggtgaacggagagcggattcatcgatttataaatatttatattaatgatgaagatattcggttctctgatgaattaaagacggtagttaaatcaggcgatgaaatcactattttgcctgcggtggctggtggttaa

SEQ ID NO: 384942 - DNA, 408 bp, Salmonella enterica
atgttgaaaataagaaaagggctactggaaaaaattcaggaattggctgatgaaatgcacccgattgaaacctgcgggattattgctgccccgatgggattccctgtagccgagcgtctaattacgatgcgtaatgtcgtatcttcagaacgatattttcaatttgatgccaaagagcaacttaaagtttggcgacagcttgagcagcgtgacgaagagtgccgagtaatttaccattcccacacggatagcattccttatccaagtgcggaagatattcgatttgcgatagatcccgaaatacattacatcattgtcgccactcagccaagtacagatgctgatataagaagctttcgaataattgatgggagggtgacagaagaaagcattattgttattggctaa

SEQ ID NO: 384943 - DNA, 1170 bp, Salmonella enterica
atgaaattaccacctcttgtttcacctgtagatacattgtctagggacgaaatagtccgttatagccgccatcttttgatccctgatatcggtatggagggacagcgccgccttaaaaatagccgtgtcttagttattggcgctggaggattggggtcacctgtgctgttatacttggcagcagccggggtaggaactatcggtattgttgattttgatcgggtagatgattctaatctacaaaggcaggtgatacataacatcaccacggttggtcaactgaaagttgatagtgccaaagcaactcttcaacggcttaacgcttttgtgacggtcaacacttatactgaacaacttggctcagagaatgcggtagcgctgttttccaaatatgacttaattctcgattgtaccgataatttttcaagtcggtatttgattaacgatgcctgcgtacttgccgataaaccttatgtctatggagctgtttttgcgcttgaagggcaggtttctgttttttgggaaaatgcccccaatggcgcaggcgtgaattatcgagatctttatcctgaaccaccgccgccagagctggctccgtcctgcgccattggcggaatattaggtgttatctgcgtgtcaattggtgctgtgatggtcacggaggcagttaagttattgatcggcctaggtgatagcctgttgggacgtctgatgatttttgatgctatggagatgacctacagacaaaagtctgtgcgtaagctgcctaaacgtcaaacaattacgacactgattgattatcagacgttatgcggcttacagaggaacacggtggataagttcgaattagctccttgttttattacgcctcagcaattgcgagatttggaaaatactgacgctgttctaattgatattcgagaaaaaacagaatgggatattgtgaagattccaacggctattcatatgccgaaaacacccgaattagctcaacatattaagaagcgctttggtgatgacaggcggttagttttgtactgtaaagatggctcacgttctgatgtgctattagccgagttgcagcaactgggggttaaacaggttcagaaattgcagggtggtattatacgctggattcgtgaaattgatcccagccaaccaacctattga

SEQ ID NO: 384944 - DNA, 417 bp, Salmonella enterica
gtggagtccggaacagatcagtgcagtcggttaagaacattgatgttcccgtcagccttaagtggcttcaccagcacatccaggctgataaaaaccactggcggcgagctgtacaagacagggcaagctccattaccgcaaaggttacggacagaagcggagtcgtttggagggctgggtcagcagggaaccggggctatcgtgacgcagcccgagcgtaagagccgtatttaccccagaaaggctggtgaaatcagcaacgctatcatctcaatgctgagtgactacaaatacgtctgccacaccatcacgttcaataacggtggagagttcagagagcaccagtcaatagcggaagcgctggaggcagggatgtacttcgtccatccttatgctccgcatgagaggggtaaatga

SEQ ID NO: 384945 - DNA, 927 bp, Salmonella enterica
atgagtaatacatcttataccttatcttcaccttcttcatcaataccagcctggatgacactggaagaagcagtcaaatttataaaccgtaatacttcacatgatattaatatcagtgaaatatatcgccacgcactatatggaaacatcacgttatcaatatactttcagtccccaataaaaattcgcaaggtggtgttttcaatgggaaaaataaaactacaacaatgtaaaaatgaccccatatatagaatctgctatcttaataaagacaacttcataaacagaaaatacaaattaattaagactgagggggatttcattactcctgatcattatattatagacacgccactaataggacacgagttattgaaacttcagatcgcgctggctgatacactttctattcctcgtccactaacagggctttacaactcatattatggcgtactggtgaaagatgataataataatatctatcaggcttatgaaattagtacatgggaaaagcggattgaacaacaaatacaaaaaataccaaccagttatttttcatccccagtgccccctcaaccgccttctcagccagaaaaaaagggtgacttctgttttcccatccatttatttccggacgatgcctgttttgtagtaaagcattctcatttaaaagactttattcataccgcaaatctcttgtctaagttaccacctgagataaccgcttcccggatcacttcaccacttgccctctttctctggctggcctgtaagaacaatccacaaatcgctcagttactggaccaaccctacaagctgttttcagtctttgaacaatgggcaaatacctgtgggattaccgacaaattgaatccagaaacactgaaaaatgcgcttaaacgtggggctcccccctcagcagcataa

SEQ ID NO: 384946 - DNA, 186 bp, Salmonella enterica
atggcatcacaacgttttttacggctgagtcaggttatggatcgaacaggtctaaagcgctctcaaatctatctctacatgaaaatgggtttgttcccgaaatctgtaaaaattgggatttccagcgtcgcatggctcgaatcagaagttgaagaatggatcaatcaaaaattaaataaccgataa

SEQ ID NO: 384947 - DNA, 1461 bp, Salmonella enterica
atgagtgatatacaagggactcttgtctctgtttcactggatcagttacgcgcattcgatttaaacccccgaataatccgtaacccaaattatgacgaaattaaaacgtctatacgcaaccgggggctggagcatccgcctcaaatcacgcaacgccccggcgaaaccttctacattatcgccagcggaggtaacacccgactgtcaatattacatgagctttggctggaaacacacgataaaaaatactgggatatcacctgctattttcgtgagtggcaaccagataaaagtattgaagaaggcaatttacattgtctgctggggcatcttattgaaaacgaaataagaggttcactgacatttattgagcgggcacttgccattcaaaatgcggttaatctcttccagaatttgaagaaaaaaaactcacaaaaagacgtggtggaaatgttgtgtcaggaaggatattcggtttcaccgacattgctgagtatcatgtctgccacaattaaactcctgttcccctggatccccgaacttctttacagtggactgtcacgtaaaaatattgaacgcttactaaccttgcgcactaacacagaaaaattctgggataaattctgtcaggaactcccgtcagagacagagcaccagctccctttgtttgatgatatttttgctatggcactgacttcatttaatggtccggttgaggggttttcactggaacatattcaggatgaactgaccgggttgataagccagacgttgaatattgattataacaccgtcgccctggttactgacgcacaggcacaaaagcgcagtattatctttggcacagatccggttcctgagttaccggatatcagtgaacaacgtcgtgtggcacttaaatatcaggataaaacaaacccgcaacgaagcctcagtgacgatattgataacgttaatgacgaagatactcccgctatgtcagacattgaaccggaagactcacaagataacattttccgacaaagttcctcagagtttcatcactctcagggaacaccaatatcctcccccgtgatccagaaaccgtcttcgcccgcctttttccctgatgattctccacagtttgataccccagaatcccttgcatccgttattgatcaaacagcctgggaactggccgctgatgtgggtctggaattccttatattacctggcgaaaccggtgtgtttgatattgttcctgctgacagcacactgactaatgaaagtaaaatttactggcaaatacttgctttcctggcgggaaaactcccgggcagtgcagttatctggcggcaaatgcttatcggtacaccagactcactggccggattcagcgaagaaacgctgacaaaaatatttcagctcatctgctttatccgtcgcttatatgaaatacaacatcagggagagatatcatga

SEQ ID NO: 384948 - DNA, 582 bp, Salmonella enterica
atgatcccatcgttaaattacgcagtgcttactgatgtcctgcatgccttaaaagagggaaatatccggcattgtgaagcgctgggattcacttacaatgaactggaggccataaatcgtttgtcagtagacgagctttttattttgagtcgttcgtctgctcagtttcttcatgtcaccattcagcatgaagtcttacgtcagcttctggctcagacccggcaggaaattttgctgcaacagcgtattaaccgtgccattacactcggtggttcaattgaattacttaatcagttttttggcctgtcatccggtgaaatcagtgccaggcgacgctttattggtatcacggtttcccagggccggacacgaataccggatgaggaaactgatgcccgaatctggcggcaatggcagcaacaccgtcccgataaccttttctcgatggaggctattgatatcatgatggatattgcagaaaatctttccggggagacagcagaagatgcactgtcccttacggttgtctggaatcgcatcatgctgtgtgaaaaagaaattaacagaacaccccgggcgtga

SEQ ID NO: 384949 - DNA, 447 bp, Salmonella enterica
atgcactattttatttatctgatactggcattttttgccggagctgccttaccagtacagggaagtgctaatgctgaactctcccgtcttctgggaaatcctgttaccgcttcgctggtttctgcactggtcagcattacccttatgctcctgctgatcctgtttttcagaacaccactgcctgacagtactgttatccgtgccccctggtgggcatggttgggtggcgttatgggcgtattttttctcgtcaccggcacattcactgtccctgtgattggcgcagctaacttcctggttattgtcattacagggcaggtcatcaccgcgctgctgattgataaattcggattactgaacgtccctgtacatcctttatccctgaacaggattatgggagttatttttgttatcgctggcgctgtgatgataaattacagaaaataa

SEQ ID NO: 384950 - DNA, 615 bp, Salmonella enterica
atgaacgaggtgattacagcgtatcttaacagtataaaaatggattattattcgataattgtcgtgaatgcagttaatgaagtgtcaatacagactaatatgtctgaagcgtggagaaaggcatttatcagtaagaaattatacatctacagcgatatatttttgaaagcaaaagaaaggatcctgccctttttatggcattcctgtgattccgataataatgatgtaaagatgttgtcagaaaaatacaatatccggaatggattatcatttattatgaaaataaaaagtgaaacagttatttttactctttattttagcgaagaaaattctcattttattgatttttatgaaaaaaacaaatccagtatactgtacaatgtgatggcattgttcgagcagcattacataagaaacagcagatatgtcttaacatgcagggaaaaggatgtcatggcgtgtctgaaatgggggaaaacctgttcagaaacaggaaccatattagggatcagtgaacggactgtcagatttcatatccgtaatatatcggataaactgaatgtaaccacgacccggtacgctgttgtaaaagccattgcagaaggattgatctga

SEQ ID NO: 384951 - DNA, 801 bp, Salmonella enterica
atgactaatactgagcattttcagcttaccagcggtccgctacgcagtagtatcacgattgaacttcacacccatctggcaacccgtacctggaccggacgccaggcaaacccggaggaaagtatccacggtatcatcggcatgccccgttttattaatatcatgaacgtcatccgtctggactcgatggcggataatccgtatgccgatttgtggatgctgaatctggaagaacgtcttctcactgcccgtgaagagatgaacacacttatcggtaatatgaaaaccgtattcagccagcttccggaaatgatgaccgtggaaggctgcaccagtatacagcccgcccgctttccggttttttctgcatcgcaactgggatttatcgctatttatctgctcactgattttgatgagctgatgcgcaatgccctgctggctcagcatatggccctgatcaaccgtaccgaaattaacgacctgcgtcagcgcggaggcaatattatccgcagcattctggtactggctcaacgttaccggcggatcccggtcacacggcaggatatccgtgacggtaacgcccgggcgctggcagcaatggaacaggcaggtcccgtaccggcagatattttcgacggttcacgacgtgcatcctgcgccccgccactgcgcccgctccgggaaacggttactgaagccgtacagcaagacgtccccctgcaacacgatgacgcagacaccaccgaagaacaggaaatgcaaacggaggacgaaaacaatgatgctgagccagacatctga

SEQ ID NO: 384952 - DNA, 492 bp, Salmonella enterica
atgatgctgagccagacatctgatatgcccggatatcgcccgttatcagccagtgactggcttgcttacgaaagctcgctaaaaggccttttaagggtaagggagccgctggctatgtcgcaacaggcgacagagacaaaggcgaccctgcaccagatacagcagcgattactccatcgtacctggcgctggccgctgcgctatttacccttaatgctgtgccggggacctgcgaggtctggtgcagattttctgcgctggcgcaaccagcagaataaccgttccggaaccgcagcatggcaggcgctggttcaggatacatccctgcaactcactgtacgtgaagccctgcttaccattgaacaggatcgaattgtgttcaatatgcagatgtccatcctgacctttattctgcgccagatccgcgaatgctcagtaaaaatgacgcaggccggaacaatcgcgacattcatatccccagcaacaaattaa

SEQ ID NO: 384953 - DNA, 396 bp, Salmonella enterica
atggcacaacgtggtttaaataaagtctgtctgattggctatgtcgggcaggatccagaaattcgttatactgctgacaaacaacccgtcgcggtgttttccattgccactgctgagacctggaaagataaagaaaccggagaaaccaaagaaaggacacagtggcaccggattgtggtttataacaaactggctgaaattgcagcggaatatctgaaaaaagggacgctggtttatctggaagggcgattacagatcagaaaatggaccgacaatcttggagcagagaggctttccacagaaatagtggttgatattaatgggatgttgcagatgctgagcagtaaacctgataccgaaaaatcccctgacagcagcaataaaaataacgactga

SEQ ID NO: 384954 - DNA, 414 bp, Salmonella enterica
atgaacactgaacataaatattttgacctgcatacccgtggtattggttatgtcaaccgcctgcgtaccgtgacaccgaaaaaggcaaaaccttttctggcctgtacgattgcagcattacgcggcaccactgctgagcctgaatacacctacattgacgttcgcgtctacaacgaaaaagcctgtgaattactggaatgctgccaggatgcgctgaataaaaaacagaaggtacttatcgcctttaatattggtgatatttatccggaatgttttacctacgaaaagggcgagaaaaaaggtcagtccggctgcggtatcaaaggccgtctgattaaaatcaccctggtcaaaattgacgggcatgaagtttatcgcgaaaaaagcaatgaacctcagcctgccagtgcctga

SEQ ID NO: 384955 - DNA, 648 bp, Salmonella enterica
atgaaaatatcgtctgatttacccgtcatcgttaacggcaaactggtgattaaaaccatcaatggtcgtaacggcgcattcaacgttggtctgctggaaacggctgtcggcagtttttcggttaaggaccgggaactggaacagtataccgccggtgtttaccggggacagtttgttattggtcgtatctttcttcacgcctggagttatggtgccaattccggtacggaaatacgcgcccgtcttgatgatatgagcattgagacaaacgcggcactggatcccggcgacgaacaaaaggtgttccccccggttaatgatccgctggatgaagaaaacgccccggcagatcagatcgtaccggaatgttcttcttctgatacggttaaaacaacctccaccaccactgtccccgacaccagacggacacagtttacggttcccacgcctgctgaacaggaggcaggggatcaggcgctgtttggttcactctggcccctgggaaaggtggtgaaactcgatgccacggcttcacgtaaggtactgcgccagcaaaaagcacgcctgacacagcttggctatgactttaatgcgcaggaacagcactttacccggccggacgatacagaccgcccgctgctgcactga

SEQ ID NO: 384956 - DNA, 381 bp, Salmonella enterica
atgggctggttattttctcatcattcacgttccgcattaattgagcacctggtttgtgctgatgaaaatgacgctgttcgctggcagacactgaaatacgctttacgcggtaatattctgtggtctgtcgttcaggtgacagctaaacgcgataatgattttttaacactgaaacaaaatgaagctctcaggctgatttattgccatttgctgcaaaaatctgagggattatggggatataaatcactttgtgaagaggcgggaccacagtattacacctgcccgttgcgttaccttacgctggctccggttatcagatgtgcatcatggcgtgagtccgttcgtatgtaccataacggtcacaaaaggaggacaaaatga

SEQ ID NO: 384957 - DNA, 621 bp, Salmonella enterica
atgagtctgttacaactcagtgaagttcctcacatcatgtccgatggttatatctgcgatgaacgccgcacactgctgtttctctccctctggggcagggataccgccatccaggaacttctggcccgtctgacactgaagaatgaagatggtctgacgcagcttacgctgacagaccacgcttttcatgaacacacgctctttcccggtaatcccgacagtctggataagctgactgcacgtcatcagcgcacccgcttcgggacgctggttcatctctggctgtttgacaaacgttgccgggttcccgacagggcaaacggcagggcatttttactgctcaaacgtgacgaccctcgctggcaggaacgtgtctgggcactgttacaggaaaccaccacgctccccctgctggatcactggcaaaaccggatcctctccctgttacaagccacacaaatgctgaccccggtcgggggttacggtgcgctaaacggctggcaactggcgctggatcctctccggctgacaacgcttatcagtgaagccattaccgaaggtgaactgtccagcacatcccggccttctgagaacgttttttcttcccttcgcgccgcctga

SEQ ID NO: 384958 - DNA, 1104 bp, Salmonella enterica
atggctctgatgtttccccgccttgcccgtaattttgtgcgcaatggctattttcccacggatgaagccacgctggagcgtattctcgcagcgctggctgctgataataccgccggtccggtacgcctgcttgatccctgtgcgggtgaaggcgtggccgtcacagaactcgcctgtcatctgggcgaacaggcgcaggcttacgcagtggagtacgacgcagaacgcgccgcacactgcgccactatggccgatgtgacgttacatggcgatttgatggacaccattatctcgccacaggctttttcgctgctgtttctcaacccaccgtatggcgatctggtcaaagaccatgaacctgatatgaataaaaaaggtcgcgcccggctggaaaaacaattctaccgccgctgcgtggataatctgatgtatgacggtattctggtgctcatcatcccttattacacgctggatcgtgaattttgtggctggctggccaacagttttactgatgtccggatcttttctgctgtcacggatcagtttaaacaggtggtgatatttggtcgccgtattcgccagcaccggcaaaataccgcacaggtcagacaacggttcagcacattaaccgccctcggtaaaggtgatgaaaccgcagtatcgctgccagaagtctggtcttcgccatactgtgttcccgccgccaggcaggaactgaaacacttttaccgcgtcacgatggaaccggtacaacttgaagaagagatccgcctcgtcaggggactgtggccttctctttcctcacaattatgcattcatcctcagcccccgcgcccaccggcaagacgcctttcccgctggcatctcgcactggcgctggctgcaggagccatcaccggggttatcacgtctccggcaggccgtacgctggttgtccggggtgacacctgtaaggtaaaggatcataaaaccgagttcactgaggatgatgatggcaacatcagcgaaaccatcattatgaccgatcgttttattccggcgatttccgcctgggatatgacaccggattcccccacgtttggtgaactgctttccattcactga

SEQ ID NO: 384959 - DNA, 2229 bp, Salmonella enterica
atgaatgagatacccttatcctccacatcttcaactctgtctctgaatgcctttatcgacgaatttggtgacagcctgcttgattcactgaaccggtctttacccccggtttatgacggaacccccgttccccgacgccaggccattatggataccttgaagcgtcgtccttttccggcgcaggcagacgtcgtacagacggtggtaaaactgctgatggatcaacatgagcaggcagccatcatcaatgccgaaatgggaaccggaaaaacgctgatggctattgcgactgccgcagtcctgtatcatgaaggctgccggcgtacgctggtactgtctccacctcatctggtctacaagtggcgccgcgaaatccaacagactatcagcactgcgcgggtctgggtacttaacggaccggatacgctgctgaaactgatgttgctgcgtgaacagttacgtacacccgccagcggtccggaattttttattctgggtcgggtccggatgcgtatgggctggcactggaaaccggcatttgccacacgcagacagggtgattttcactttggcgtctgtcctgactgtggtaaccgcattactgatacggataataactggctgaccgccggtgtactggatcaggaggaaaatccccgtaaatgttcacattgccatacccctctgtggacgctgatacgaccgaatactgttcagggcgacttacagtcacagatggtgaataaggctctgaaacgtatcccgaccgttggcgaggcgaccgcgaggaaactcacctcaacctttggaacagaatttcttgcttccatgctgggcgataatctgtatgagtttatcaatctgatggacggaaacggcgagctggtcttctctgatcgccaggccgcacgtatggaacgggcgatggcgaacatggagttcggttttggtgaaggaaattaccaggccagcgagtacatcaagaaatatttacccaaaggaactttcgacctgatggtggtggacgaagcccacgaatacaaaggcggcagttctgcccagggccaggccatgggcgttctggcatcccgggtcaaaaaagttctgttactgacgggaacactgatggggggctatgctgacgatatattcttcctcctgttccgaatactcaccagacggatgctcgaagagggatacaaacccggtcgtaatggcagcctcaacgtcgccgccatgcagtttatgcgcgaccacggcgtactccgggagatattatcggaaaaaaacgatgaggtacataaaaccgccaggggtaaaaaaacctctgtgcgggtatccaaagcgccgggattcggtccaaaaggtgtactgcggtgtttactgccctggactgtatttctgaaactgagtgaactgggtcacggtattctgccaccttacagggaggagtaccgcgaagtcacaatgacagacacacagcacgaggcatataaaacgctggccggaacactgggaagcgttctgcaaaaggcgctggcaaaacgtgacaccacactgctcggtgtggtgcttaacgtactgctggcctggccggaatgctgtttccgccccgaaatcgtgaagcatccacgtacccgcgaaatactggcttcagtccctgcgctgttcggggaaacggaggccacaccgaaagagctggaactgatcacactctgccttgaggaaaaagccgctggtcgcagggtactggcctattccacctactccggtcaccgcgacaccacgtcacgcctcaaagtattgctgacacaggccggactgaaaacagccgttctgcgttcaacagtctccccggaacaacgggaagactgggtagctgagcaggtggacaggggggtggatgtgattgtcaccaaccctgagctggtaaaaacaggtctggatctcctggagtttccaaccattgtttttctccagaccgggtttaatgtttataccctgcttcaggccgcccgccgttcctggcgtattggtcagaaactgcctgtcagggtagtttacctcggctacacggacagttcccagatggtctgcctcagcctgatggcgagtaaaatcgccgtcacgcaaagtaccgctggggacataccggaatccggcctcgacattctcagcgccggaggcgacgccattgaaattgcgctggcaaggcaactggtggcgtaa

SEQ ID NO: 384960 - DNA, 1020 bp, Salmonella enterica
atgaaatatacaccggttggcgttgatatcgcaaagcatctgattcaggttcacttcatcgatgagcacacaggtgaagtggtggataagcagcttcggagcaaggattttctgacgttcttcagtaaccgggaaccttgcctgattggcatggaggcctgtggcggctctcagcactgggcacgtgagttaaaaaaactgggccatgaggtccggttgttgcaggcccggttcgttaaagcgttcgtcatgggcaacaaaaacgacgtgatggatgcacgggccatctggatggcggtacagcaacccggtaaggaaatcgctgttaagacggaagaacagcagtcggtgctggttctgcatcgttcacgcagacaactggtgaagttcagaaccgcgcagattaatgccctgcacgggacgttgctggagttcggcgaaaccatccacaaaggtcgggcagcgatggatagtgagttaccggctgccctggaacggatgaaggcgaggctgcctccgtatctcatcaccgtgctggaagaccagcataacaggctgaaggagctggactcgctgatagatggccttgaaaaacagcttaacagtgtggcgcgacagaatgaaacctgtaagcgattgatggaaatccccggcgtcggaccgttaatagccacggcagcagtcgcaaccatgggaaaagcagcagcgtttaaatccggacgtgagttcgccgcttacgtaggcctggtacctaagcagacaggctctggaggaaaagtccgcctgctgggaataagcaagcgtggcgacacgtatctgcgaaccctgtttatccatggcgcacgggcagcagcactgctgacaaaagagcctggaccatggataaccgaactgaaaaagcggcgtccgactggtgtggccatcgtagcgatggcgaacaagctggcgcgaacagtgtgggtaatagcagcccacgaccgtaaatacgataaaaatcatgtcagtatcagaccttattaa

SEQ ID NO: 384961 - DNA, 369 bp, Salmonella enterica
atgttgacttttaagacgttgcccgacgatatctcgctcgattttttcagtctggcccaccttgaaggagaaatgttaagcatgcgtgcatatcagcgtatgcggctcgaagaactccctgatgatgagttggatccgtggtcggactacagacctcttacagctattgaccggagactgatatacatcgctgaatgtctgagccttcaggctgaacagggaaaagttcctgctgagaacccggcgagtcaggcattgctggccgatatttatacgctgggctggagtatcagtccctccctgtgggagtggggtattgagaacgggcgctgccgcgccacactgatggatgccattgagcaacaatga

SEQ ID NO: 384962 - DNA, 282 bp, Salmonella enterica
atgatcaaaagcttccgccacaaaggactggaaaaattttatcgtaccggcgcaacaacaggtattcagccagcccatgcatcccggctacgcagacagcttttcgccctcagtaaggcaaaaaagccgtctgatatgcgtgcgcccggctgggcattgcatcccctgcatggaaaggaatcgggagcctggtcagtttctgttaacggaaactggcgtatgacattccgttttgatgaaaatggcgatgccattcttgttgattatctggactaccactga

SEQ ID NO: 384963 - DNA, 288 bp, Salmonella enterica
atgcacatgtacagtccgccccatccgggcgaggttctgcgcgattatctggagggggtgagtatcacacaggctgctgatgccctgaagatcacccgggctcagttatcccgtatcctgaacggccatgcagccatcactgcggacatggcgctgcggcttgctgctctgctggataccagccctgaaatgtgggccgatatgcagtctgaatacgcactctggcaggagtcgcaaaaaccacgccccgttatccggccacttcgcaaccccttgctccacgcataa

SEQ ID NO: 384964 - DNA, 1806 bp, Salmonella enterica
atgaaattatttttgtgtgaaaaacccgcccaggggcgcgatattgcccggatactgggagcaacccggagaggcgatggctgtcttatcggccaggatatcactgtcacctgggccttcgggcacctgctggaaatggatcctccggaaagttacgatcccgtatataaaaaatggcgtctcagtgacctgccagtcatccccggacagtggaaaatgtcggttaaaccggcaacacgaaagcagtttaccctcatccgggcattactgaaaaaagccgcctctgtggttatcgccaccgatgccgatcgtgagggtgagatgatcgcccgtgaaattctggaggcctgtaaattccgtggtccggtatcccgcctctggctttctgcactggatgataccagtatccacagggcgctggcgtcactgaaacccggtgaggaaacagaatctctgtaccaggccggattaggccgcgcccgcgccgactggttgtgcggcatgaatctgacacgcctttataccctgctgggacaaaaccgggggctgaaaggcgtattttcagttggtcgcgtacagacgcccacattacggctgattgttgatcgtgaccggctgattaatcattttatcccccgggactactggacgctcgctgttcacctgagcggacagaccatcccctttgaggcacagtggcaggctccgcaaaccgcctgtgacgaagacgggcgctgtattcagccttccacgctgcaacaggcatcggctgacattcgccgtaccggccaggcctgcgttaccgccacagaaataaaacgtgttaaagaatctgcgccattaccgtttgacctaggtaccctacaacagatctgctccagaaaatgggggatgggcgcacagcaggtactggatatcgcacagaatctgtacgaaacccataagtccacgacatacccacgtactgattgtggctatctgccattatccatgcatgcggacgctccggggatattcagcgccatacaggtatctgtacctgaattaaagccctggctgacacaatgcaatcttcagcaacaatcccgcacctggaacgacaataaaattaccgctcaccatgccattattccgaccctgcaaccggctgatttaagtaaaatgaatgaggatgagcgtcgtgtgtaccacctgatttgccggaattatattgcacaatttttgcccttacatgaaaccgacaaaacgcagatccagcttgagtgcgcagggcatcttttgcttgcaaacggaaatgttgttatcacgccaggatggaagagcctgttcagtggagaaaacaacgaagcggataacccccgtgcccttccccgcctggcaaaaggggaaatctgtccggttaccggtatcgatatccgtccacataaaaccactccaccggaacattacacggaaggtacgctgattgccgcgatgaagaatgctgcccggtttgttaccgacgaacggctgaaaaagcgtctcaaagaaagtgccgggctgggcaccgaagccacccgcgccggtattatcgaaaccctgctcaaacgagggtacatccgcaaagagaaacggtatctgctcgccactgacagtgccaccacattaatggctatgctgccggatcttgtccgcgatccgggaatgacggcgctgtgggaacaggcactggacgatgtggcgagtggcaaactgccccttgccgtctttttacagcgccagtccgtctggatcacaaaaattgtggaacaggcgggaaaccactaa

SEQ ID NO: 384965 - DNA, 291 bp, Salmonella enterica
atgactgacgaaaatatcacaatacaggcacaccttaattttctgcataatgccgaaaaacaggcggtacaggggatgttgctgaccgccattcaacacggttttcagttagatgaactgattttactggcaggaaaatataacgccagtatcgctgtaatggaatatcgaaacggcgactgcattgttaattatgcaactgctgacggatacttcacccgtaatttcggcattcattatcaggatgctgccgattttgcagaacagtttgacacctggtggtatcagtaa

SEQ ID NO: 384966 - DNA, 477 bp, Salmonella enterica
atgaaattacatcctgcattgcctgtagctgccacactgctgttgtctgcctgtaccgccaacgtgccgattgcccatatacccgcccccccttcctcatccccggtcgccggaccggcagaagtcgtgcataccagccgttataccctggtcagcctgacagcagacgagacacttcgtttcccgctccgccagccgatcagtcacacactttcaccgccaaagaaaaaccggacgctgacccgtggcgatgccctgcgtatctggctttccggtacgggttacggcctgtgcctgcctgtgacagacgatatacggcgtttatacaccagtccgttaccggatatctggcggtcagcaggccctctgaggatccatgacgctttacaggctctggcgggtcctgaatgggccgtggtcaccgatgaactgacgtatacggtgtgtttccggcgtacatcacagacactgagctga

SEQ ID NO: 384967 - DNA, 687 bp, Salmonella enterica
atgaaacgatatttctgttatttcctgctgctgtctttcgcgctggaagcacacagcgcgaacgaaaccacactgaataccgatcacagcaacgaaactccgctctctgtcacttcaccggcacaacgctggggactgacaactgaagaatggacccgttatgaacaactgaaactcggtgaacgcgggatatggtcaccctcactggaccccctcaccactctcggtgtggaagccacaacagacggagaacgccacagatacgccggactgctggttgaaaaagaggcgcagcgcgtggaaaaagagctggccttccagcgcgcttatgatgacgcctggcaacaacgctttcccggtctggctcccgtatccacctctgccggtaacagtattaccaaccgactggcggtttttgtacgcgaagactgccctgcctgttaccagcggataaaagttctgctgtcctccggacacccgctggatatttatctggtggacagccggggtgatgataaccggctgcgtcgtctggcgcgcacctggcaggttgatccagaacgggtacaacaccgcgatatcacgctcaatcatgacggcggacgctggttacagtacggcggaggacgaatgcctgcggttctcgaaaaacagggggatgcatggctgcccgttaccacaccctga

SEQ ID NO: 384968 - DNA, 528 bp, Salmonella enterica
atggctgcccgttaccacaccctgatcttactgctgtcgttgtccgcatggccattgatggcagcacaaaccgttcccgatggctatcgtcaggtggcacagcagtccggtgttccggccgatttactgtatgccatcgcgctcaccgaatccggctctgcgctgccacaggggatacgtccgtggccgtggacactgaacattgccgggcacggatatcgctacccgacccgtcgtgaagcctgttttgctctgcatcattatattctcacgaccagtccgaaacggatcgacatcggtccgggtcaaatcaaccttggctggcacggtcatctcttcgccgcgccctgcgatgtccttgatccctatcccaaccttcagcttgccgccagactgctgcgtcagcactacgataaatggcacaactggagcgaagccgccggtcgttatcaccatccggcaggcggcaagcctgcacaacgctaccgggcacaggtcgcccgctggcagcaacagatatcgtcatga

SEQ ID NO: 384969 - DNA, 492 bp, Salmonella enterica
atgctgaaaattatacttatatgcgccacgctcctgctcaccagcaatgccggtgccacgcttaccgtcattgccgatctggggggagaatccaccacctccctgtttgaagcggtgataccagactctgaaaacctgcgggagaccccaccagccgttccgctggaagcggccctttttcctgtggtatctccggatcttcaccccggcaaaaccgcaccccgtctgttgtcgttaccgggtataagtcctttgtttattctcggtgacgatccgttatcccttcgctggctggctgataataaaaaggtactcctgtcactgaatgccaccggcctggtcgtgaatgtggcatcggaaacacggctgggtgtattacgccagcaggcgggggggctgaaactgttgccggtcagtggtgatgacctcgcacagcgtctgcaactggagacttatcctgtgttgatcactgaatcaggactctcgcaatga

SEQ ID NO: 384970 - DNA, 2112 bp, Salmonella enterica
atgagtaatcgccatgttattgaaacactgttacgaccggctgtggaactgtacagcgcagcttccgggctggcagccggagctgtttgtctttttgcgccatggtcgctgatgctctctccccaggtcagttacccgctggctgggggatttttactgtttgcagggatccgagcccggcagggactgaccattctgcgttatcgtcgcaatatccgccgtcttccgcgttacattatgaccagcgtccgggtgccggtcagccaccatacgttgtttatcgggcgcggttttcgctgggaacaacgccacacccagcggctgcacacctgtcgtcgccctgaagtggcgcattatattcaccccaactggctgtaccgcctggcccgccgtctggaaaaaaccggtgagacgcgatttccggttatccgtcgtattctgtcgcacgatcatatcctgaaccctgtgcgcccgctgccctctgtcggcggcagtgccctgttgcatggcgtggaactgcatgaaagcgatgtcagcctgccgctgagtgaacgtgtcgggcatacgctggttatgggcaccacgcgcgtcggaaaaacacggctggcagaattgttcatcacccaggatatccggcgcggtgaggtggtgattgtttttgatccgaaaggtgacgctgatctgctgaaaagaacatatacggaggcaaaacgcgccggacgggaaaatgcattttgtgtgtttcatctgggctggccggatctcagcgcccgctataacgccgtgggccggtttggtcgcatctccgaagtggccggtcgtattgccggtcagttgtcaggagaagggaactctgcggcatttaaagaattcgcctggcgattcgtcaatatcatttcccgcgccctgatcgccctgggagagcggccggactacctgaagatctcccgtcatgtcatcaatatcgacgatctgttcctccgttacgcacaatattatctgcccgggcatgagccgaaagcctgggagatcattacgcagatcgccgggaaagtgaatgagaaaaacaccccgcgcaacctgctggggagggacagacatgtggtggcactggaacagtatcttacggcaacccggatttgcgatcctgttctggacgggttaagaagcgctgtacgttacgacagaacctactttgacaaaatcgttgcctccctgctgccattactcgaaaaactgacgaccggaaaaaccgcgcagttgctggctccggcttactgcgatctggacgatccccgtccgattttcgactggcagcaaattatccgcaaacggggagtggtttacgtggggctggatgctctgtccgatccggagattgccacagcggtgggtaacagtatgttcgctgatctggtcagtgtcgccgggtatatctacaaatccggtgtccatgacggtctgcccgacaacgaacagcaggaaaaaattcccgttaacctgcactgcgatgagtttaacgaactgatgggggatgagttcatcccgttgattaacaaaggcggcggcgcagggatccaggtcaccgcttatacacaaaccctctccgatatcgaagcgcggatcggcagccgggcaaaagccgggcaggtcatcggtaacttcaacaacctgattatgttacgtgttcgcgaaacagccaccgctgaactgatgacccgccagttacataatgtggatattctgaccagcaccgtcatttcaggcgtcaccgactcctcacaccctgaaagcggcgtggatttcaccagtaacacccaggacagggttagttctgtcagcgtaccgctgatagatccggctgcgctgatacagctcccgaaagggcaggcatttgcactgcttgaaggcgggcaactgtggaaaatcaggatgcccttacctgcggcagacaacgatccgctgatgccacagaacatcgcacaactggcggaatatatgcaggcacactaccataccggcgagcaatggtggaataacaccgtcatagctgacacggatgtggatcatgcagcgctgcttgccgcattacaggaagacatcaatgagtga

SEQ ID NO: 384971 - DNA, 705 bp, Salmonella enterica
atgagtgacacaccggttcagaacagttccccaccacgtcggggcctgtcagacatcctgctctcatggccgggtaaagtctgtgggacgcttatctgctcgctctttttcagcctggtgatcgaatggctggggatcgcctttttctggccggagcagggagccgaacacagccgtatgatgatgctcagggaagcgggctggtttaccggtaatgtgacacgcagcctgctgatcaccgatccggcagagaaactgagcatcattctgcatcatacctggcagtggttttttattgataccgggttaatcccctggtctgaacggttgctgagacagcataccgataacgcgttttttttctggttcaatacatacattcaggccacggtgtatatcacgctgacatttgtgctgcgggtgtttattctgctgctgaccgcgccactgtttttactggcggcactgaccggggcggttgacggactggtcaggcgtgacatccgccgttttggctgtgggtatgaatcaggatttatttaccatcacgccagacaacgggttatcccggtattttttctggcctggaccgtttacctctccctgcccttttccgttaatcctgttctgatattattacctgcggccacattatttggtggcataatcacactcagtgtcggagcatttaaaaaatatttatga

SEQ ID NO: 384972 - DNA, 321 bp, Salmonella enterica
atgacccctgtaaaactgtttttattattatgcttgccggtttttaccttcaccaggtctgtttcagcagccacaccccatgaagcgaccacgttatctctggtgctgacccaactggatattctcgaatccaccctgcaacgcgctgaacatcaggccactgtcacacccggaacacgcttcttcttcgactacccacaggcttatgccgatatccgggccatacggctcggaactgagcagtatctgacgcctgcacgcgcccagccacaggcagttcttcccctctccggccagtaccggcaggagaaaggacagtga

SEQ ID NO: 384973 - DNA, 234 bp, Salmonella enterica
gtgacggaaacacagatccgggccttccaggcaggcagttcagccagacccgctgaggtgaatgtgctttttctcagtctgctttgcgcggctctttttctctgggcggcatgggtatgcctgcgggcttatcgcgcctttgctgccggtaatctgacactgaaacagcttggcagcaccgtcacccgtaccgttctgctgttgctcattgccttctggctggtgctcagttga

SEQ ID NO: 384974 - DNA, 342 bp, Salmonella enterica
atgtttcaaaaaacaccacgacttcgttcgctgctggcctccacacttctgttcacccttacggctcacgccgatctgcccacgatggaagatccgtcccgtggcaaaggctccggcattatggatacgctgaaaaactatggttatgacgtggtgatcctgatgtcactggctatctgcgccgtgggatttctcgtggtcgctaacagttgtatctccacctattccgatattcagaacggcaaaaaacaatggaaagatctcggtgcaatggccggtgtcggagccattttactggtcgtcatcatctggctgctgacccaggcgggagacgtactgtaa

SEQ ID NO: 384975 - DNA, 357 bp, Salmonella enterica
atgacaacttccattgaatttctgcctgacagactgaacagggaacccgttatttttcgcggtatgaccaccacagaactgtttatcgcgctgggaggcggtctgctgaccggtcttgtctgcggtactttccctgctgttttgctcggtatatgggctctcataccgaccggtgcgctggccggtgccgccatcgccattctggccggtggaaagtggctggcacggctcagacgcggacgcccggatacgtggctgtaccgttctttaggtgcctggtttgctcgtcgcggttttggcgatccaaagctggtacagaaaagcaccgtgtgggtgatccgaaggagcataacatga

SEQ ID NO: 384976 - DNA, 645 bp, Salmonella enterica
atgagccgctttaaacacgcactggcggcacgggatgctcatatcaccacacttcggctgataattggtctgttgctgctggtcatcacagccctgtggtatggctggcagaacgccccgcgccatctgaccatctataacccgccggatttacgttccggcagtacccgcccctggtgggaaattccccccggtcagatttatgccttcagtttttatatttttcagcaaattaaccgctggccggtcagtggtgaggaagactattcacgcaacctcaccgccctgagcgcctatctgacgcctgcgtgtcacgcacaactggaggaagattaccaccagcgtcgtgaccggggagaactgcgcgaccgtgtacgcggcgtgtatgaaattcccggacgcgggtttcaggataaacgcgtacaggttatcgacagggacaactgggttgtcaccctcgatttaaccgtggatgagtattaccacgccgagccggtaaagcgggcactggtgcggtatccgctcaatgtcgttcgctacgatgtcgatgcgcaaaaaaatccgtgggggctggcgcttgactgtttcgcccgtccgccacaaaaactcgaagccgtatcaacaacgaaggagacaacagaatga

SEQ ID NO: 384977 - DNA, 837 bp, Salmonella enterica
atgaaaaaactcaggttttatctgctgtcaaccgtattattttgcggcgttgccgttgccacagagcaggtacaatggcaacggatcccgttgccggtggagttgcatacaggacatgagcgggtcatcttcgtcaacaaaaatgtccgagtaggttacccggcatcgctggacggcagactgcggctccagagtagcggcggcaccctttacctcaaagccagcgaagattttccggacacccgcctggagctgcatgacgtggacagcggtgaaattatcctgctggatgttcatgcccgcacaggcggtgaactggagccgctggagttgcactataacaccagggtctggcgcagtgatatccgtgagacgcagaatgagtcctccgggacatccgctgttatcccgcaggaatatagcgagccactgccggtggcactgacccgttacgccgcacagatgttgtatgcgccacttcgcaccgtggcccccctgccaggcatcactcctgttccgttacatttacctccgatgttaaccacgctgctaccggccatcccggtgaccgcgacaccgctgaatgcctggcgtctgggggatctcaccgtcaccgccattaaactgcaaaaccggacagagcaacctgtcacccttgacccccggactttacaggggcaatttctgacagcgacattccagcactcctggctgggcgcacacggtacgccggaagacaccacggtagtctatctggtaagcgagggaagtaccgacagcgccttcatccccgaaccggaggcagtgaccaccacaaagaagaaggcggggaaataa

SEQ ID NO: 384978 - DNA, 1410 bp, Salmonella enterica
atgcagcttaaatcaaacagcctgctgaaaattctggttccggtactgctgctgggtgcagggttcgccggactgaaatcctgtcactcctccgatcatcccggcagacataaacagaccagcaataccattgcggatctgagtgatgacgaactgagagcgctggggattgacggcgacactccacgcgacacggttgccaccctggtggggcaaatgaagcagtaccgtcaggaaatggaaactatacgaaccagcagtgccgaactggtccgggaaaatcagcgcctgcgcgatcgggataaccattttgagagcaggatcaacagcgccattaaccgggaacgggacacgtttaacaaaaaactgcaacagcagcagacttcactgcttgacagttttcagcaaaaactgaaccagctcggccagaaactccccgaacagggcaacgatattccgcccggtctgggacttgatcagactgatatacctgccaccgccatgcgctgggtggagccctctgacaccctgccggcagataaacgcgctcaggcactttcctccggtgtaccgttttcttcatcgttcggtaacgcaggggacaatgccatcagcaggcagaaaaaggccctcctggaagctgcgaaaggtgaacgcaatatcggggaagccacgccggtttataccctgccgcagaacagcacgcttaccggttcggtggcaatgactgccctgctcggacgggtaccggtaaatgggacagtgaacgatccttacccgttcaaggtccttatcggacgggataacctgacggccaatggcactttactgccggatgttgaaggcgcgatcctgtccggtacagcatcgggcgactggaccctttcctgtgtacggggaacggtacactccgtcactttcgtattccgtgacgggacaatccgtaccgtacctgaagcagcaaacaaagccgacagccacagcagtaagccacaggacagcgaaattggctggatctccgatccgcacggcctgccctgtattcccggcgaacgaaaatccaattccgctgaatatctcagctcacagttcctgctggccggttcctctgccgccgcacaggccttcgctaacggacagaccaccacgtctgtggaaggaggagctgtgacatccgcgctcaccggaaacagcggccagtatgtactgggtcaggcgctgggcggcggtctgaaagacagcgcagactggtttaaacagcgctacggtcagacattcgatgccatatacgtcccgccgggacatccggtcgccattcatctcacccggcagatccccgtcgattacgagccacaggggcgcaaagtgaagtatgcgcaaacacctggcagcaaaaggaaactggactga

SEQ ID NO: 384979 - DNA, 390 bp, Salmonella enterica
atgaaacaccttcttcttattttaccactggtcatactgaccggatgcagtacatcacagaaaaccctgttgccggtcgatgaaaccaccaccatgcgcagcatctgggaacgccagactggtggaggcaatctgttgtatgaccagcgcagccagctacgccgtccgctgactgatatttctgttcaggagcagcagggttatacccgtacatcggccagtgagatccgggcattgttcacccgtctgcccagtcccgatatggtgatgtatgtttacccccatctcaccggagaggaaggtgtcccgataccgggctacaccacggttttccccctgcatacccgaatactgtatgccatgcccggtgaacgtacggaggcactgtga

SEQ ID NO: 384980 - DNA, 2691 bp, Salmonella enterica
atgacacgaaacacaacggtggcgcgcgcccgaaccggaacactgacggagcaggccgccgatgcggcttaccataaaggcccgtcctttgccgacctgctgccctgggtggagtttcaggatgacagccagactctcttactggaagacggacgctcagttgctgccgtgtacgatatctcccaggccggaaccgaaggccgctcattacagtatctggcgggtatccgcgatatcatcaaagatgcccttcaggattcgtttgaagaaaccgatacccatccctgggtggtacagtttttctgccagaacgaggacgatttctccggttatatgcagaaactgcgggattatgtcaccccggcggcaaaaggatcggcattcagcgaggcgtggcttggcgaaatggagaaccacctgcgcggcatcacccgaaccggcggactgttttttgatgacgtggtgacccgaacgccatggcgcgggcagatacgtcgtacacggctggtcatttaccgctaccagccccgcgcgattcggggggaacagacgccagagcaggcactgaataacgtctgtgaacgagtgagcagcgcactgagtgctgccggactggtcaccgtaagactgaatggcgcggagatttcccgctggctggtacgctggtttaatccctgcccgaaaacagatgaccggcaggcattttacaacaccgtcacacaggccgatgaaactggtgcgcactcaccaccactgttgtctgattttaccgaatccctgctgttcagcgaacccgtttctgacgcagaacgcggcgtctggtattttgataatctgcctcataaagtcgtggtgattgaccgcctgcgcaaggctccgctccccggtcatctgacaggcgaaaatcgtaaaggtgaggggatcaatgccctgttcgatcagttccctgaatccaccatcctgtcactgacaatggtggtacacccacaggatttactggaggctcatctgaacaggctcgcgggcagggctattggtgaaaataccgaatcagaatacacccggcaggattgccagaccgtcagggaatggctgaaagacggccataaaatgtaccgcagctcactggcattttacctgtccgcgccagatatccccgacctggacagacaggtccggacgctgaacagtgtgttactcaacgccggactggttcctgtacacaacagtgatgaggtcgcaccactgagcagctatctgcgctggctgcccgcgaattttgacccgtcacgcgataaacgaaacctgtacacaaagtttaactttgtcgagcatatcgcctccctgctgccagtcttcgggcgtgaaaccggtacaggacaccccgggatcagctatttcaaccggggaggcgcaccgctggactttgatccgctcaaccgcgaagatcgggctaaaaacgcacatctgctgttactgggtcctaccggcgcaggaaaatccgccacgctgaacggtaaaatagcccagcttatggcgctgcaccgtccccggctgtttatcgttgaagcgggtaacagtttcggcctgatggctgattacgcccgtcgccacggcctttccgtcaacaaaatcacgctgaagccgggtagcggtgtcaccctgccgctgtttgccgatgcctggcggctggtggcacagtccgtcagcgccgatattccggatgatgaagaggaacaggataccgacgaagagcgtgatattctcggcgagatggaaatcacggcacggctgatgataaccggaggggaagcgcgggaagatgcccgacttacccgccccgacagggcgatgatacgccaggcgatcatcaatgccgccactctctgccaccgggaagcacgccagacactgacacaggatgtgcgcgatgccctgttcaccctggcaaaagatccactcctgccggaaacccgccgcagccgcgcctatgaaatggccgaatccatgaatctgttctgttccggttttgagggtgagttattcaaccgggaaggtactccatggccggaagcggatatcacgctggtagatctggccacctttgcccgcgagggatacgaggcacagcttgctattgcctatatctcgctgattaaccatatcaacaataccggcgagcgcgaccagcatctgagccgtgcaattgtcaacatcaccgacgaatcacacattattacggtcaatccgctgctggcccggtttctgaccaaaggctccaaaatgtggcgaaaactcgggatctggttgtggctggctacgcagaatctgtctgacttcccggatgatgccaaaaaactgctgaacatgatcgaatggtgggaactgctggtgatgcccccggaggaagtcgaacagctcgaacggtttaaaacactgacgccggatcagaaacaactgttactttcagccagcaagtcgcccggtaaatacactgaaggcgtggtactggcaaacaaggttgaggcgctgttccgggtcgttcctccgggtctgtatctggcactgggcatgacagaaaaacacgaaaaagcggaacgggcacagcttatgcgtgaacaggggatcagtgaactggaggccgctatcatggtggcccgcaatattgaccgacaaagaggactggtataa

SEQ ID NO: 384981 - DNA, 411 bp, Salmonella enterica
atgcaacattatttttttgctttatttccctttctgtttttaacgtctgtgccggttcctgcacagacggtgatttacaccacggcacgctatcccgtggaaaatccggaacccggtgtggtgatacaggtactggaggatattcattcactggaacagtcgctgtttccggcactgtcacaacatccggaacgggcagaacaacaggcgcgggagcagatgaaacagcctgactggcgggaacaggaaacccggctggcccgcgcataccagtcactgctggatgcgtatgccctgggtgtcgaaaaagttcccgcagtggtactggatgagagatatgttgtttacggcaccactgatatcagggtggcagaaaaaaaacgggatacctggcaggagacgcagccatga

SEQ ID NO: 384982 - DNA, 930 bp, Salmonella enterica
atgaaaccacgccactctctgcttctgtccctgctggcattatcactgcccgctgccgccatcaccacaccggagataattgcctcttcactgtcaacagactgcgttgcataccgggtaacgggcatctgctactggctgctgtgtaccccttttggctgctccgtgaaaacatccatcaaagtgaaacacaatctccctgaactggtggtttcagcctggtcttcccccggtgataatccgtggcaggaaatggctgtaatggaggctcctctttccggcgtacaaagcggcggtgacacacatccccggatcaacaacagtaaaacccggatccgctttaaagacaccgccgccatcggtcaccccgctgacgcctcttttttccgcttcctgaaccacgctggctacagttgcagcagcaacgtcgtaccttttcagccctactttctcagctcgctggatccccttgcctggcgcagtggtataccggaaatgctgtaccccgaagcgctgatgccgggacggcgcgaagtcggccagaccggggacctgtggggcaatgtgtatcccagaaccggggcactgggacaaacccatgattacaaagcgggggccgtgacagcccagcgtaccgccgatatcgtcacccgaaaagggcagcctcatgtctatctgccgctggtgacggctccccgtccgggttactggcctccgtcaccggtacaggagaacgtatccggcaaccatgtctggcagatgctctcaccccgaaaagagaaccgctgtgcccgttttcccgaccggagcataactgacacttacgctgactggctctcccccaagggtaactatacctgggcgctctggcgtccgtattcctgctgccagcgccgcggccagacctttttaggcagtaccggaggataa

SEQ ID NO: 384983 - DNA, 1392 bp, Salmonella enterica
atgcaatacccgtttaaagcaacgctgcccctgattctggcaggccaccttctttgccacagcgtactggcagcggaagacaactacagtctgcaacagcagggggctatcgctgacaccctgtactacaggattggcgggggatcggtcatcaccccggccctgacgcgacacaatactcagttactgaacatgcgggcaggctggaatgccgacctgatgtgcggcaactttgacatcagtaccaccgtacgtaaccagcttaacggcgtcaccgatggttttcaggatctgatgggcaatgttatccataatgccacttccgccgttgccagcctgcccgccatgattatccagcgcgctaatccccagctctacgatctgctgaccaatggcgtattacagggaagactggatttcgacaaatcgcagctttcctgccagaaaatggcagaaaaaatgacagacttcgcctacggctccgcctggacacagagcgcaaaagcggaaaattaccagactgtcgctgcgcgtgaaacggatgcggtacgggcagaaaagcaggtacagaaagaggcagccactaagggcaagacctgggttggcgggcagaaacggggcggtagcggtcagccccccattaagctgattggtgataccacacaagccggatataacattctgaaccagcgtggcgtcactcagaccggcagtatcgacagcgctcagtgtaagggcgaaatctgccgggtatggaaaacccccggacaggctgcccgttgggtaacccgggtggtgggtgaacagaccattaacgttgcaccagataatgatgcctccggcagtggtgagaaaaaaaccggaacacaggccggagtgggtctgtcgccgctgattgccgaagagcaggagaagatttcagatgtcctgatgaaactggtgaatggcagcctgaaacccacccatgagaacctggaaaaagcgtccggcggcagcctgctgctgacccggggagtggtggaagcgctgcgtgacgaacccgatgccccggtactgatgcagcgtctttccggcgagatggcgctggcacgcgtgatggagcaggcgctgatggcccgccggaccctgctggccggtatgcgcgaacccaatatcgctgcggaaaaagaggctcagacacaactgaaccagacgaccttccagcttgatcaggaactgaaccagctcaggctggaactggaactgcggcaaatgctggcagacaacgccagtacccggatcctgacccgtaaagtacagcgcgacagcacgcgtggtgaagctgtcagcgtggaagatgatggcaacaaacggatgagcgaactgagtcactccgcatcaggggagaaatag

SEQ ID NO: 384984 - DNA, 318 bp, Salmonella enterica
atgccaggactcagattacgcctgaaaccagtactggcaaccgttatcctgctgaccgctatttttctcatcagcggactgacgctgcaattcgctgccccggcgctttctttaccccggatactgtatcaggcccgccacggattacttatcctgcggttatgtctgtacatcagttgtacgatcctctggttttccctgtaccgtcgtttacccgttcagtacaggcaccggatgaaacgtgtcgcatcctggtcacttgttcttctgttaatcagtgaaatcagtaatctgctgcaacaggagaacggcatatga

SEQ ID NO: 384985 - DNA, 1497 bp, Salmonella enterica
atgatcactcacagctatctggaatacgccctgacgttgctcggctggctcatcagtaacggcatctggaacaccatcaccgccaccgggctgtttgccctgccgctgctgataaaactggtgtctctgtggctgaaggcccgggaacagggggctgatgaaggtgacgctggcagcctgacgctggcgtggatggaaaataccgtttatgtggcgttactggtcatcatgttcacctgtgtaccgttgctgaatatcgacatcacacaaatgaaatacgatactgatcgctcaaagcagtgtaacttttccattcccgccgctcctgatcagtccggttacgccccgctggtcagtgatctgaatggccggacagccgcagtaccggtatggtggtatctgatccatgccgtgtcgaaaggagtggtgaatgccgccaccgccacgctaccctgtaaaccagacctgcgacagttgcgttttgatgtccagcacacccgcatcagtgaccctgttctggggcaggagttgcgggattttgtgatggaatgctattccccgtcgctggcgcggctgaaacagcacggtgacgctctcagctacagcgaaagcctggacgtatcatggcccggatcatcaaggttcatgacgcaggccggttactacgataccgatcacgcccgctccccgcgccgggcctggccatatgacagtgaacgggatgcgggactggtgaataccggcaacggtggctatccgacctgtaaacagtggtggtctgattctgatgtggggttaaaaccccgcctgctggcacaggtaaaacccgatatctggcagtcattccgcaaactgacctacagtaaagaaagttatgaagaagccgtgctgcgcgcccttgtcagtccgcgaaatatgaccgtttcacaagacgggcgggtctaccccggttatggtggcaatgttgatcccggcctgaccaacagtctggcccgaaccggcgcaacctttggtcatgcgctggcgtcactggcagcatttcctgcttttgattcactccgccaggcactgccgatggtacagagcattctgctgatggcgctgattatctgtatcccgctggtgacggttttctccgcctacagtgtgaaaacggtgctgacgctgacatttgcacagttcggtctgatattcctgaccttctggtgggagctggcccgatggctggacggatggatgctgtcattgctgtatgatggcgatacacacagttcgtggaacctggccgggttacagaatactcaggacgacctgattatgcagtttgttatgggaacgatgtttatcgtcctcccggctttctggatgggggcactggggtgggctggtatccatctgggaggcgtcattgagcatgcgactataacaggcacaacagacgcccgaaaatcgggaggaagactgggggaatcgttaattcaaaaaacaggtaaataa

SEQ ID NO: 384986 - DNA, 342 bp, Salmonella enterica
atgaaacagaattcggtgggatatcgtcttggtcttcagacacgccgttttatgcgctggttcagcgtgcaggagaacaggctgcaacagcatggtgtgcctgactggttggttaaaattccccgctatttactgattgcggcaattatcggcttattacttattggtgctttttaccttgcgctgtttctggcgttgatgggttttattgcgtgctgtttcagcgtttttggaagaaagaatgcttcagtatatccgcctgatgaaccattgaacggatatcatagttcaggacccgaaggtcctggattttattatgaagattcccgtatagatgattga

SEQ ID NO: 384987 - DNA, 1749 bp, Salmonella enterica
atgattaagacttataacaaattgctctattacgttcccgggaaaaggtatctcgcctgtatcgcgattaccgttacggtcatttctacctttctcactgtgggtgcttattattatttaaatgaatttctaaagcagttaatcgtcatcggtgatatcaggcaggcgaaatactatgcttttttgatcgtcggccttttaattatcggttctgtcctttatctcggggcggttcttgttacccacgccctgggttttcgactggaaacaaatttaagaaaacggggaattgacggccttacaagcgccagttttcgtttctttgacttaaactcgtcaggaaagacaagacggattattgatgacaatgccgctcaaacccatactatcgtggcacatttaatccctgatatcgcaggcgctgtacttactcccttactggtattgctccttggtttcctggtggatgtgaaggtcggtattttattatcgattttagcgttattaagcctgttgcttctgacgttcatgatgggtaacaaaaattttatgaaactctatcaggaggcgctggaaagactcagcagcgaaacggtggagtatatcagagggatacaggtggttaagatatttgaagccgatgtgtcttcttttaaaacactctacgctgccataatggattattcaaaatttgcgttaaattactctatggattgtaaaaaaccctacgtcatttttcagatgctgatgttcggatttgtcacactcctgatccctgccgtagtgttatttattaatcttcatgaacaaccccggcttctggtagtctggcttattatggccttattcttaggcagcgttctgtttaccactattatgaaaatcatgtacgtctcaatgtattcctttttaggcatgtccgcagtggagaaactggaaggattatttgaggaaatgcagaaggacagactgaaattcggcgacctgaaacatttcaaaaactttgatatcgaatttgacaatgtttgttttggttatggtaacgaacgtgtgttggatggcctcagttttaagctggaagaaaataagagttatgcccttgtgggcgcatcgggaagcgggaagtccacgattgccagactgatttcaggattttacaggctggatggcggcgaaatcaggatcggaggtgaaaatataaataactacagtgaaaaggctatcatgaagcatattgctttcgtattccagacgcccagactgtttaaaaaaagcatttacgaaaatgtcaaaacaggtaatccatccgccccggatagcgaaatagaaaaagcgcttcatcttgcgggttgcgacagcatcatacagaaattgccacaggggaaaaataccgtcatcggcacgaaagggatctttctgtcaggtggtgaaaaacaaagaatagccattgccagggccatcttaaaggatgcaaacatcattgtcctggacgaagccagcgcggccattgatcccgaaaatgagtacgagttacaaaaggcgttttcaaatctcatgaaaggaaaaaccgttatcatgatcgcccacagattaagcagcatccgcaaagtcgatgaaatcctcgtcatggaagctggcaggatcatccagcggggtactgacaatgatctgatggctcaggatggaaaatataaggactttcagacgctctacggaaaagccaatgactggagagtacgttatgaataa

SEQ ID NO: 384988 - DNA, 1722 bp, Salmonella enterica
atgaataaatggtttaaagaatggttcgctcttacaaataaaggcgcttccgacctggtgaaatcagggatatcatcatttttcgtgtatgcaataaacctgtttccttccatgttgttactcgctctgattgatgatctgttgtcagaaaatcagatcagtaagggcttttatgtgcttgcttctctcgtcatcctgggagtgatatattttttactcagaacggattatgagtccctttacaatgcggtttataaagaaagtgcaaacttaaggctggatattgcaaatattttacgcaagcttccgctttcctatttctccaggcatgacttatcggatctgtctcaaacagtcatgagtgacgtagagagtatagagcatgccatgtctcactctatgtcaaaagtgattggattttttatgtttttccccgtcatggccattttattattagctggcaatgtgaaaatgggactagcctgcgtattacccatcgtcataagcctgagcctgcttttcttatcgaaaaagcttcaggtcagtgaaactcataagtattaccagaagcgaagagataattcggaaaactttcaggaagccatcgaattgcaacaggagataaaaagcttcggtcttgtggagcagtggaaagaggaactctataaaaagatggacgaaagtgaaaaaatgcatttcagatctgagatttttcaggggatccctttatttttagcaacctggatcacccagctaaccctggggatcgtcattataagtggtgcatttttgtttcaatcctcggaactgagtctgctttacttcatcggatatatccttttctccacgaaaataaaagagggggtggatgctatttttcaaaacctggcagaactcttctatcttgattcgagtatcaggcgaatgaaggcgttaagagagacaaaacaacaggaagggacagatcaggatattaaacattacgacattgaacttcaacatgtttcctttgcttatgatgaaaacaaccaggtcctaaaagatattaactttacggcaaaccaaaatgaagtaaccgcactggtggggatgtcaggttgcggaaaaaccagtgttttgcgtcttgtttcaagactttatgattataattcaggagaaattaaaataggcggccataatattaaggacgtttccacgaaatctttatttaataagatctcgatcgtttttcaggatgtgacgctttttaatacctccattatggaaaatataagacttggaaaaaccacagccagcgatgaagaggtcagacacgcagccagactggctaactgcgaggaatttatcaaccggttgccagacggctacgatagcgttattggggaaaacggtgcgatactttccggtggagaacggcaacgactatccattgcaagagcgtttttaaaggacgcgcccatcattattctggatgaaattgcggcctctttggatgtggataatgaaaaaaagatccaggacagcttaaacaagctaattaaaaacaaaactgtattaattatctcacaccggttaaaatccgtggagaatgcggataaaatcgtcgtcattggtgaggggaaagtcgaggctttcggcaaacacgacgcactgctcaaagagtcaaaaatctatcttaacctcgtgcagaaggcgaagctggcagaagaatttaattattag

SEQ ID NO: 384989 - DNA, 144 bp, Salmonella enterica
atgggggaaaataaatgccggttcggtaataaattaaaaaaccgaaaaaactatttttatggaagtcatgtattcatgaaaaaagaatacgcaaatccgggggggttactcccgaaaatgatcggggatgggattaaatcctga

SEQ ID NO: 384990 - DNA, 630 bp, Salmonella enterica
atgatcatcagttttatcagtcaaaaaggaggcgttggacgttcaactttcgcacgcgccaccgccgttgaattaatccgctcaggtaaaaaaacgcatctggccgacctagacagtcagcaacaaaccagtgccaaatgggctgagcgtcgggataacacaggaattttccccactgtagaaaccggggtttaccgccgacatgatgtcgcacttaaagcagcaggtaattatcagtgcctgattgtcgatacccgtccgttcattgacatatcatcccttgatatcgcccgacagtctgatctggtcgtgatcgcgaccggtacatctcttgacgacctggaaccctcattactcctcggtcatgaactcatacataagggaattccacatcatcgtttgttctacgccgtgggtaaagcgccaagccttgctgaaggacgtagccccattcagaccatcaccgcgtggcaatttgcctgtacagatacctttctcacctttaaacccggcaacagtattgcactggatgcagggtattccatcaccgagacgccgtggaaaacactcaatcaccgtgccaggggtattgttcatgacatctgcgccagggtcagtccccgacaataa

SEQ ID NO: 384991 - DNA, 216 bp, Salmonella enterica
atggcaaataaatcatcactgaaattgtctccggtcatccccagaacactggaagtcaccaccaccactcaccagccaggagaaacaaaacctatacagatccgcatcgatcccctgttacaccgcgacataaaaattgctgccgcagaacaggggaagtcgataacggcatttctgctggagtgttattactactggcgcagaatgaataaatga

SEQ ID NO: 384992 - DNA, 1857 bp, Salmonella enterica
atgaaaacaggtattcatgcaaaactaaaatggctggcatgggggaaacaaccggaacctgcgactacttccgccaaagaggaaccgcctctaagcccgggttggctggctccacaatctgctgaaaagttgcttgccactccgtttcgtcagcaactgatgcagataatctggcagagaacttctctttccggcattctgtttacaaaactgtatcagactccggtagcccgctttgctgaactcgtacaacaacttccggcatcagagtaccatcatcacgcctacccgggtggtttgctggatcattcgctggaagttatggcttttgcagcaaaactgcgccagcgtcacctgctgcctgctggtgcagcaccggaagatcaagcccgcgaagctgaagcgtggactgcgggtgtcatttacgccgctatgttgcatgacgtgggaaaaatagtcgctgatatggaagtgatcacaaaagacaatcaacgctggaccccatggatgaagccactggcacaaccttatcgtctgaagtactgtaaaaaccgaaattatgagcttcacccggtagctgctggtctcttcaccacacgactccttcccatcaccgcacttaactggctggcacagtaccgggaattgtatgagtcttttcttttttgcatcagtggtcattatgatcgtgccggaattttgggggaacttgtacaggaagccgaccgggcatcagtagcacagtttatgggtgcaaatgccagccaggcgctggaacggcaacaaccttccctgccaaaacaaattttgatggcactcagggaactggtgcagacacaatttaaactgagcaatccgcattccggttcagatggctggctcacagaagaagcactgtggcttatcagtaaaaccaccgcagatcggatccgggcgtggttattacagcagggaataagcagtgtccctgataacaatacacgactgtttgacgaaatgcaggcacacggattactcatcccgacacaggaaggaaaagctgtctggacatgtgaaatagctgctgacagtggctggactccgggctgcccgttaacattgctgcgcctttctccagcccggatatggaaaagcccgactgatcacccagccccttttgccggacgagtcaccccggtcaccataacccataatccgcaggaacctgccgcagatgcagatactaaaaacaccgataattcgtcaccttcaacaaccagtgaaacaaatctggttgatctggccttctcgctgtttgcgccggaagacatccatatggatagcaatccgcagaatattatcactgaagcagaaaatgaaacggtatttattcccgctgaaccacagaaaacgtcaggctcccctgaaaataacaacagggaaaagaagatggctgacagtcaccttatggtaagagaatcccccattcttcccgatgataccggttttatcatctggctcagggaaggaattcgtacccataaaatcgccgtgaatgacgcacaggctcgtgtgcatatggttgaaggtaaagtgtttctggtttcgccagaaatttttaagctttatatcaaaacaacatctggaaaaacaggggatgaatggaaactggctcagaaatcctttcagaaactcaaaatgcactgccgggataatgaagggataaatatttacacctgcgaagtaaaggggccacgaaaaacccggaaggtaaaaggctatttgctggagaaacccgaattaattttcggaaagactatacctgaagataatccatacttatctgttatcaataactattttaattcagacaattaa

SEQ ID NO: 384993 - DNA, 162 bp, Salmonella enterica
atgacaagaatagtgatgctatcttttacattaactaatgtagcaaaacatttaccagacaaccagtctcaggaatacgaaggaaaaacaatcagcatcatcacttttgatatgacctcaaaaacagatacaaatgagacgatgctaatacagctaatatga

SEQ ID NO: 384994 - DNA, 423 bp, Salmonella enterica
gtgtggagcaacggttatcttcttctgattatcgcagatgtgatgatagttggtctgttatggaacatcaaacagaaaattctgaggtttatctggaaatttagtcagttatttcccgttatatggtgttattcctggtttaaggtaatatatggaaggaatcttaccgaagccagtacacgggatatgttcctttacgtcggagaatgtgttgtgaagaaaaataagcaggactggttgtttcaactgagaaaatgtcaaaataaagatacgcttgaaaaagtggctgagtcaaaccgttataaactatcaaatgatgaactggagttgtttaactcagcagcagaccacagacttgcagagttgacgatgaataaactctatgacagggttcccgcaggagtatggaagtttgtcagataa

SEQ ID NO: 384995 - DNA, 603 bp, Salmonella enterica
ttgactgttttttacaaaaaacgcccctcttctgaactggcccacctggcctggtgtattcttattgctacccgaatggcgatacgtgaaggccgaactcagccaggtctgcaacaacatcttttcatcatgcaatggctggcaacagccaaaaaacagaaacgtttccccaaatctgtagcagaagatatcgaatggctgatccagcagggaaaacgctacggattcggtgctaacctttaccagaaagtggaatatatttatcgttccagtattggtgaactggcaaaacaaagcccgcttttccgtttcacgtattttatcgaaacccttaaaatatccggctggctggattttttactctctgcaaaagactggcgtgaatattaccgggcatcagatactgcctgtgcggtttacaccccaaaaactgagctacatcagtccttcaatgacagtggtcaaatgacagcccccctggaaattcgttttaccggggatacttcaggtgtggctccgttactggaacagtgtaacctgccggtgaactggttacctgatgaacagggattttccgtactcataatattgccacaggcataa

SEQ ID NO: 384996 - DNA, 1212 bp, Salmonella enterica
atgaccattacccgccgcctgctttcagcacctgctgtacaaaaagcaaaacccgcagataaagattatgagatccctgacgggaacggtctgacgctttccgttcgtaagtcagggaaaaaaatctggcgttttcgttaccagcgtccgggatcttccgcgcggactaacattacgctgggttactaccctgctctcacactggctgctgcccgtaccctccatgatgaatatcttgatctgctggctttggggattgatcctaaaaaacgggagaaagaactcgcggagcaggaacagctaattacggacagtttgttcattaatgtggcaacaagatggtttgccattaaaaagaccagtggtatttcggaaattcatgccggtgatatatggcgttcgctggagaaaaatgttttcccggtaatcgggcagacgccggtgacagaattgaaagcacaaatactgattgcagctctggagcccgttcgtgcccgtggtgcgcttgaaaccctgcgtcgactgacgcagcgtattaatgaagtgatggtatttgctgttaattccggtttgctggatgccagtccggcagccactattggaaaagtgtttgaaaagccgaaaaaacaacatatggcgactattcgtccggagcggttgccggaactgatgcaacgttttgaaaatactaatctgacgctgatgacccgtctgttgatgaaatggcaactcctgacactggtgcgtcccggtgaagctgcgggaacaatgtggtgtgaaattgatattgaaaataaactgtggacaattccggctgagcggatgaaaaaacgccgtgaacaccaggttccactttcggcacaggcaattgctgtacttgaacagctcagacctttgagtggtcattcgtcattagtattccccggcagggtgaattgtagtcagtctatgaacagtgagacagtaaataaggcgctgcgacggatggggtataccggagaactggtatcacatggactacgtgccctgggcagtacagccatgaatgaagctggatttcagccggatgtgattgaagccgtacttgcgcatgcggatacgaatcagacacgcgctgcgtataatcgttctacgtatctgaagcaacgggttgaagtgatggactggtggggacaacaaatcagcgaatcagcacggagcgctgtaatataa

SEQ ID NO: 384997 - DNA, 477 bp, Salmonella enterica
atggagaaggacaccctgacgcaggactaccgtgactatgcggaatactgtcaggtggcggaggagacgggagacccggagatgaagcaggcggtgtatatcctcgaccagttcttcccgctgccggaacggctgaagacgctgcgtcagcagcgggtggaaaacgaacgggacgctgacgtgacggtctgtacggcgcaccgcagcaaggggctggagtgggatgtggtgaaactgtatgacgactttgctgacattcttgacccggacatgccggcggacaaacgggatgatgaactcaacctgctgtatgttgccgccacgcgcgcccggcggctgctggttccggacccggtgatacgggagatactggcgcagcctccggcggaagagattctggcccggacgggagacggagaagataacggtgccggtaatgacgttgatgaaaacggggagaccagagatgtggcgtaa

SEQ ID NO: 384998 - DNA, 1548 bp, Salmonella enterica
atgtggcgtaaacttttccggcacaatgccgccggtaagggaaaggtaaagacaccggaggagcgcgggtatctgcggccgctgacggtggaggagatactggacacggaaatccggcagaagatgctgaagcagatgcgagaaaacagcctgctgacgaaagaggccacggagaaatactacatgcagccgctgcggcactgtgtgagtctgatgcaggggctgccgggcacggaaagggagcaccatgcggtggtgggtggcctggtggatttgacgctgaaaacggtggtctgcgccctgcggttgtcacgcggatacatgctgccacagggggccagcgcggaagagcagtcggcgcaggcggtgacctggaatgcggtgatattttatgcggcactgtgccattcgctgccggtgtttggtcatcttgaaggggaactggctgacggctccctctggtatccggggctgacggtaccgtcacagccgtaccggctacgtttctgtccggaccgggatgaaaaagcgcaggcaatagccacgttgctgggtatgcggctgttgccggatgaggttgtggtctggctgggcaggacgcctgcggcactggatacgctgctgaatcagattcagggtgataacagaccgggcagtgtggtgtcacaaatcatcagcgaagcggtcgggtatgcaggtggtgtgccccggacacagtctcttcagccggtaccacagacaccaccggcacctgccacgccggtagtgccggcggcaggggttgcaccggtggctaacccggtgattgccggggctgcggataccgcagtaaccctgggttcggccctgagtgaacctcctgctgccgtggtcacggtgacacctccggtctcccctggcggaggagagccagatgatcagggagagccggcagtcagtgatgtgatggcgctgatggggttcagtatatctgagaacgtagggacggataccgcacaaattatgggggcaggggaaacggtgacaacaggtgatgaaccagagtctgataaacagagcacagtggtggaaaggagtaagtttccgttaacggaacattcatcccgattaaaggaagcagcagagatggaggaaacctccggttcgtcagataacctgccgaaacaggaagataacagtggcaaacagttctggcagtggctcagggaaagcctgctgagcggcgaaatatccgtgaacacccccggttcagccgtacatatcatctgcggatttgttttcatcagtgttccggcgattttttatctgtttatcaaatcaactcccggaatggagggaaaaaccagagaacagctacaggctgcttttgaacgtctgggtatgcacagaagtgtcaataatcagcgttgctggcagtgcaatctgtatgaaacgccggatgccaccgggggattcaaaaagctttccggttatttaattcagttgtcactggtttatccccgggaacagtatccggaggacagcgtgtttctgaaattttccagatga

SEQ ID NO: 384999 - DNA, 1002 bp, Salmonella enterica
atgaaagaaaagatcacctggaatgagtttgtagaagaatacattctggagaaaaaattacgcactgcttcagaatggagttatcgcaaagtttgtgacagtttttatcattaccttggaccttcggttttacctgctgatgtaacccgcaggcacgcactgtcatggcgaaaacttgttctgaaaacagagaagagacaggaaacgacatggaataataaagcctcacatatgaatgcgttatttaattatgccataaagaggaagttgtttaaaattaaggaaaatcccttcagtgaaacaaaagtgaaggcaggtaaaaagaaaaagaaaacaatgcggcagccccagatatcgcatgcctaccgggtgatggaggcgcgtgaggaagaagaacttcgtctgggggttcaggcttcccgtaatgcgttatttccggcgtggttctggctgacaatgctggatacactttattatacgggaatgcggcaaaaccagcttttacatttacgtgtcggagatatatttctggatgagaatattatcagactgggaaatgaaggcagtaaaaatcatcacgagtatgccctgcccgttgtcagctatctgaaaccacggctggagcttattctgaaaaaagccggtgagaggggactgaagaaaaatgatctgctgtttaatatcccggtattcacgggtaagaatgaaaatatcacggaagacatgggctctccaccggtccgctcctttttccggcgtttatcgcgggaatgtggttttacggtgacgtcgcaccggttcaggcatacgctggcgacggagatgatgaggaggccggagcagaacctgtatataacacggaatgtcctgggccattcaagcatggtatccacgctggaatatgttgaacgggatcttgatgcggaaagaatggtacttgagaaacagtttgccgcactgaagagaaataagaatattaacagtgaagatgaggaaggttga

SEQ ID NO: 385000 - DNA, 870 bp, Salmonella enterica
atgactatacaagcttcagtaaaaatagaagatttatctagctcagatataaaaaagtccattgatacaataagaaatataattattaatggtattaacgatacaaaaaaagttatctttatttgtggtaaagataaatcagataaagagagttatcgtttcaaaatatcgcaacttttagagcataatacaaattatcagcttgcctatccggaagatttatttgaggatttattggagggacaagcgaacaatagtcttctttcgcttgagcaacaattagctgaagcggttgatttgattattcttattcctgaaagccctggttcttttgctgaacttggagcattttcaacaagaaaagaactagctgagaaaatgttggttctacggcaaaacaaatataaggctgataaaagttttattaaccatgggcctataagactagtaagatctgccaagggtaaaatcctcgatatacctcatgattttgattataaaaacaaagagcatttttctgaaataattaaaacagttaaaaaaatgattccttcaggaagacggtcaaagtctattaataatatattattatatcagaatcatattttattattaatttatctatttgatgagttaaatatcacctcaatacataaattaatgtcaatggtacttgagaaaaaattaacgaaccaagagttgattggatgtaaagctgcaattcattctttaactagatctcaatttattgataagattggtaatgaatatattttaacagatcgtggcttcagtgatgtccagcttaaatattatgccctaaatgaaatcacgaatctcaggatttcaattatgaacaaacaattgtaa

SEQ ID NO: 385001 - DNA, 933 bp, Salmonella enterica
ttggcaaaatattcgcaaagtctatatacacaaagactactttcgcttccaatattacaatctatagaagatctttcggttaaaacccggcttccatctcctttgttgtctcaatatttaaatgataattctcggtattattgtcatatttcagtacccaagaaaaatggcggatataggccaatcgatagccctaaccgacaattgaaagccattcagagatggattcttagacatattttagagaagcttcagccatccgtgtatgcaacaggatttgttcctggaatagcattaaagagaaatgctattcctcatacaggtaaccaatatatactcaagttagacttaaaggattttttcccaagtataaaagcaagttatgtatattctgtttttcgtgctgctggctactctaaacaaattgcgtacagtttaacttcaatttgtacgttaaatggatatctacctcaaggagcaccaacatcaccatgtttatctaatctggtatgtttaagattggatcaaagaattgggaagtattgtgatcgtcatgctttaactttcaccagatatgcagatgatatttcaatttctggaaataaattaagtatagttaaaaaggcatgggttgttataaaactaattctttctgaggaaggatatgttattaataaaaataaggaaatgttatcaggacctcgttcaaaaagagaaattactggattagttgtaactccgaaacttgggatcggtcaaagaaaatacaatatgtatcgaaataaaatattccatttatgccataaaaatgacaatgaaagtatattaattatacaaggcatattggcatatattaaaggtgttgatcaggaccgatatagtaaattaaaaaaatactatgatgctttaaaaacaaaggaagttacagagtga

SEQ ID NO: 385002 - DNA, 300 bp, Salmonella enterica; identical to SEQ ID NO: 384902

SEQ ID NO: 385003 - DNA, 705 bp, Salmonella enterica
atgactgataataaaaacattttaaattttcctgaggggagaaaaagaaagccctcatccaaagacaaaaaacctgaggatatattattagagttaagcaaaaaacttatagaggatggtgatactcccactcccaagacgcctcctgaaccaccagaagcgttgccaccaggaacagtcatccatgttgatggagcgggacatgcaattggttctgggaacgttgttaatcatggaaccataaatatagggacgaagtcgccaagaccaaagacagttgtgaagacgggggacggagtaatagatgccgctcagaaagctaagctccatgaactgatacgcgagtggaccaacacgcacaatgctattaagaagtctagccttagctatcaggaagcatggataaggctaaactctaaactaaaaacacctagttaccatgaaataaaaaaagaacagtttgaaagtgctttaaagtacctaagaactcagattggtgttcttcggaggatggcatccgctcccaaaaaggtcgttgactggaggactaagactatagcagctatacaagcccgttgttcagaaagaggttggcaaacctggagaaaggaattcatgatgaaaaactatggaaaatcgtcattacgccaattcactgattctgagcttgaaaagttctatcgaacagtgatgaataaaaaataa

SEQ ID NO: 385004 - DNA, 411 bp, Salmonella enterica
atggttgcagataaagaatggtatacagcttccgaactaacggggttacctggtctcgctggtgataaaagcagcatcaatagaaaagcaaatagggaagactggatgaggcggcaaaagaaaggcactcgcggggttgcttttgaatttcacatatcttcattccctacggaaactcaagaagctcttggtgggtacgctggaaacgttgaaggtaatgaaaataatgaaatagaccttgatgcattacaaaaaattattgaagcggtggaaatacttgtatcacaaagaaggagaactatatcagcgaacacgaaagcaaaaataatagtattaatatataaatcatttaaaaaacaaggtgttatggataattcattcataaatgacgtgattgaattagtagcgtaa

SEQ ID NO: 385005 - DNA, 213 bp, Salmonella enterica
atggcagttaaaaaaagatcggggatgcatcgggcggatatcgttgcagcattacgtaaaagtaacacttccctatctcagttagggatccagaacaatttatctaagtacaccttaaaaaatgccttagataagccttattcgcgaggagagaaaatcattgctgatgcgttaggtatgcaaccagaagatatatggcctgatagatattaa

SEQ ID NO: 385006 - DNA, 213 bp, Salmonella enterica
atgaaatatcctgtggcgtgggcatggtatgccaagtggacagttgtctatctggttatccttcctctcctgatctggagattcgaaagcattcagttattccactcacatatagcgtttcttgtggtgacgggtttcactatgggacttgcggtcagaatcatagacagactgttttactttctcgtacagcacgccggaaaaaaatactga

SEQ ID NO: 385007 - DNA, 396 bp, Salmonella enterica
atgagactgaccagccgcaagaaagagatattaagttacttcgcgccagtgaatcgcgattgggttacatctgagatcggagcaccgccttttgacgtgtccggcgttgcctggctgcttcatgggctggactcacacgataagcgccattgtctggaatccacgcgccgcactcttgaagcaatggttagagatgggttgctggaaaagtccaccagctacgagaaccgccaggacacaacgcaatcaggcgacggagccggggtatggtgcaacgtctcccgctacggtctgcccggtcagtgtgctgtcgttcgtgacagtgaagggaaaaaagacgctattgatggtgagtgtgtgcggctgcatgggcaaccgatcgcaataagcagatag

SEQ ID NO: 385008 - DNA, 207 bp, Salmonella enterica
atgaggctaccggaaaaattgccgctatatgcaaaatgggttgtcgtctggctggtggtgctgccgatgattctttaccgtgtagagtattccggcgtgttcgcttccgcgtgggtctgtgtgatggtcgtcggctttgggtttggtttctgcgttccgctggtggatcgtgtgtttttcttcctctgccagcgctggaagctgtag

SEQ ID NO: 385009 - DNA, 390 bp, Salmonella enterica
atggcatataacccatcaggtctgcatttagaaattgctgagtggattcttgaacagggaagagcggttactgttaatgaggtggcacaacgattcagaataacaaagcatcaggccacaggttttttcatgatactgagcaatgacgcagccattaaatcacaaggtgtgatagtaaaatcgtcaaactcccccgacagattaaataaacgccgtgaaagaacgataatgattacagcaatcaaccgggaaaaaatcatgcaccgttactcctctgctcgtggtaacagttacgagcatcacccggtagagtcagtcagtgaattatctccggacaaaaaatggaaatggataataagtcattccggacgacaaaaggatgagtcgtaa

SEQ ID NO: 385010 - DNA, 138 bp, Salmonella enterica
atgagtcgtaatattttagttaattttaaatctgatgattttattaaaaatgcgagcgtaatgtgtgaaagctttaatctggctaatgctgatatactcctgtatggtttatgccgccgggagtggtatgtggtatga

SEQ ID NO: 385011 - DNA, 333 bp, Salmonella enterica
atgcaaagagttatccggttgagcaatccgatggtttattccgggactgcaatatcaatatgggatctgttgtacattgtgatgggtggtcagacgcaaaagatgttcccctgctacaacatgacggaaattatgaggactgcaatattaacatgggaacagtcactgattgtcatggctggactgtcgcacataacgtccctgttcagcaataaaagcgttttctctgttaatcagaatctgaattatcaaaagtatcctgctggtggtacgcagtctcatcaatgcatttctggtgcgtaccgttttgcgtacttcccgtacagtgagtaa

SEQ ID NO: 385012 - DNA, 942 bp, Salmonella enterica
atgccacgtgatatttatgaggaaatcgggcgctcaagacgaagtactgccattcatgaagctggacatgcgctggtggcgtggataaatggtgccacggatatagagcttaatctgttaaacggaagcagggagatagagaccagtcgtggtgaaaaactccacaatgccattggtcttatttcattttatccccgtaccacatatcaaccagatgaggtaaaaaagaataaagacagggtactgtacattaacactgacggggagtcagtaacctggttagaagccaataccagttatattatcaacgatatcagtcgtgaaataatggtttttctgggtggtatggtggcggagtctgttattaatggtgctgatattgaagagcttaaagtcaaaggcgggcgtggtgatgtagctttgattaataacatgctggatatctattacctcattgaaccagacccacaaaaaatagatgagtttttatcatcccttctcagaaagacagtgatactgataaaaaatgatgtggatgcaatacaggagcttgcgacactacttgagcataatacacgattacatgaacgccatgttccacaactacttacggaaattaccggaaggattcagcataaaataaaccttgaagaaattgagagtggagagtatctgaaccgtaagattgaaagagtaagcggaggttatcctgcactgaatattacaaatgaagatattgagttgatggcaatgcccacacacaaatattctgtttctgaaagcagggaaccgacagttaagctgttttccggtaattccggtcctgagcaggaattaataaaaatcaaacggttggatgattattcccgtatatctgatatgcatcagtattactcactgtacgggaagtacgcaaaacggtacgcaccagaaatgcattga

SEQ ID NO: 385013 - DNA, 219 bp, Salmonella enterica
atggagcggtcacttgataagcgtattcttgaatatgttcgtattatgcagcctgtaaaattgtccacactactttctgacctgaatattgatcgggagagttattattccgccacactgtttctacgacgtgacaggaaaatcatcagtaccgggagatttggtatttttgccggagatgatgcatatacagaatggaggaggaaacatggttattaa

SEQ ID NO: 385014 - DNA, 225 bp, Salmonella enterica
atggcggatgaagcagaccttgccagtgaaattactcagctacgtacagacgcagcattatccagccgtgaacgtcacaaactaccggagacgggatactgccacaattgcggtgaatccatcacggcggggctgttttgtgatgcagactgccgtgatgattttgagaagcgggagcggtttaagggaatgatatcccgtaaaagtgctgacgctgacagataa

SEQ ID NO: 385015 - DNA, 576 bp, Salmonella enterica
atgacgacgatgaacattaaccggaaacaatcacaggataatcactggcaggatacgctacaggactataaagcccggatgacgaaacagcagcagacgcaacaggacgcaccagaaagcgataaaaccatatcggcgcacaaggtgaagcccaccagcaggaaaacgccatataagcccaccagcgagccacagcaggcgaaacagcagccagcacaggaacgggtaagaccggaagggatgacgcgccgccagtggaagaacgttaagaacatgcgccgggcgctggcattctggcctgtactgtttgacctggacaatccgaagccgctcaaagtgggcgtactgaatgacctgacagaagatatcaccgcgagaggtctgactgttggtacgggagcactaaaagccacactcgccatctatacgcggcgtatacgttatcaaaaggcccttgccgctggtggcgctcgctatgacctgaacgggcagccatgcggagaggtgacgccggaacagcagcagaatgcagcggtaaaactgaaccagaagaaaggagatacacatggcggatga

SEQ ID NO: 385016 - DNA, 420 bp, Salmonella enterica
atgacagcacagattgcagcttacggcagaattgccgcagatattcagacaaagaccaccagcaacggaaataacatggcgtttacccggatggcggtatcactgccatgcaggacggcagaaaacggcgaggcggtcatgtggctgggcgtaacggcattcggtaaacaggccgacgcactgtcgaagcataccaaaggcgaccttgtgagcgtgtccggtcagttacagattaaccagtggaagggacaggacggcagcacgtatagcggttatgcaatggtggccgacagtgtgataagcgccagaacggtaaggccgggcggcaacccgcagaagagtacgggcaaaaagccaccagcacaggcagccacaccgaaccatgacgagccgccgttccctgatgacattccgttctga

SEQ ID NO: 385017 - DNA, 1839 bp, Salmonella enterica
atgaacacgactgaaaccggaggccagaccaccagcacgccgggcatgaagcctgttaaacgtggtaagggtaagccagaactgaaagccattgagggcggtaagtctggcagggcaaaagggaaagccgggacgaaaggccgggaacccatgaagccttacatcgctgttgaagagggtgcgctttggtatgtggaacccgtcccaagtccgaaagcggaagaaatgaaccataaaaaaacgtggctaagtgacccgatgaaaactgttggtactggcagcgacgggagtgactcatacctgattgttgaaatgaaaacggaaagcggaaaagtgctttatgaagcagttccgcgccgggagattggcttacccgcaggatgggcaagactcaggggccggggcgtgtcagttaccacgcagtcgcatttacttaacaaactggctgaatatctgcaacgcaagggagagcgtaccgtatgggaagtgacatcaacggcaggctggcattgcggggcgtatgtcatgccggacggtgagattatcggcacacctgaaaggcctgttgcgttttgcggcggctcttcgtcagtgaaagggtatatcgtcaggggaaccccgaaagagtggcgggataatgtcgcctcactgatgcgcggtaatcactcgatgatgcttggcgtgctggtgggtttatcagctccgcttaactcccttgcgggaggtggtagctttggtgttcaccttttcgcgcagtcatcggcaggaaaaacaactaccgtagaagcggcaaccagtctttacggcgaccctgaaatgttaaagctttcatgggatgccacacgccacggtctgacagtggaggccgccgcgcgtaatgatggctttatccccattgatgaaattgggcagggcgggagaatagccgaaatcgctcaggccgcctacagcctgtttaacggcgtgggacgcattcagggacgtaaggaaggcgggaacagacctacgataagatggaagattgccgccctcagtaccggagaagaagactttgaggcgtaccttgtcaagggaggaatgacgcctaaagcggggcaactggtacggcttctcagtgtcccgttcactgacactattgcattcaacgggtacatcgacggcgacgaacacgcaagggcaataaagcagcttgcatcacgttattgtggcgcggcggggcgtgagtgggtgcgctggctggctgataacagagattcagcaatcagaaccgtagccggaaaagaacgccagtggtcagggctgcttcctgttgaggcgtcttctcaggtgcgccgcgtggcctcacggtttgcgctgatggatgcagccggggaactggcagcaggcatcacaggctggacgccggaggaatgcagcaaagccgtacacgccgcgtttgatagctgggttaatgatttcggactggagaaccgggaaaaatttcaggtcattaccagagcaagggatttcattcagcgctacgccttaacccgtttccagccctacacgttcggcagggataacggggatattgataagcagtacgccgggcgcataaataatcttgccgggtatctggtgagcgggaggcgaaaagacggattgccggaatatcatgtcataccctcagtatttaacgatgaaatattgtgcggcataagtccaagattcggctgtaaagttctggaagatgccgggattctggtaaggcaggaggccgacaggtgggcgtcaaagacaatttctataaacggaacgactcagcgttttattgtgctgactgacaggccagaagattaa

SEQ ID NO: 385018 - DNA, 234 bp, Salmonella enterica
atgcgtaatgacattatggacatcactttaaacgaagccgctgaaagcgcttttcaggccgggcttatctgtcggctgatgcttgacagcgatttggcaatgaccagcggcgaacttaacgcaatgcttaccctgttgaagcaactctccgccagcgccgcaacctggcttatcggtaaacagggcgaacggatgtatcaggacagacaaggggggcagcatgaacacgactga

SEQ ID NO: 385019 - DNA, 204 bp, Salmonella enterica
atgcatagcaccttcaccgcgcacggttacgccgtcaacaaacgcggccttacggtgggtattcgccacgaactacaggccaccagccacgaagaagccttaacagccgtacagcatgagatgcaaaaccggggatatacccacatccgcatcactcgcctgtacatgtcacttattgagattacgggggtgaaacatgcgtaa

SEQ ID NO: 385020 - DNA, 192 bp, Salmonella enterica
atgtttaaaatcatcgtcaccagcacataccacgccacaggacgcactacacgcgttaccttgcgccagacatacaaaacccttaaaggggccgagaaagccgcacagaggctggcctatgtgtgctcaccggacggcagaacaataacctttacccgcgatgcagaggttaaggaggtgcgccatgcatag

SEQ ID NO: 385021 - DNA, 966 bp, Salmonella enterica
atgataagtaaaacttatggtgagttggttttaatcaattctgattatgatatggggttgcaaataccacgcgggcgcaataccccacagcaaccccggcctttccagtgggtgagctggtttaagtgcggtgccatgactgacacattggcacaggcagtagccagggtgttcaactggcaaaggtgcggtctgtcgttaactacaggtgccgggttttgtttcagtgtcaggagcaacaccgaccacaaaacccctgaaaatgagttttcggagtccataaaaaagggatggattgagttttgcgagtccataaaaaagggatggattgagttttgcgagtccataaaaaagggcttgccacttgcagacaaattgggttacgtttaccccgcacctcataaaacgggtgccgggcgtggaaacccgaatatgtacacggcgacaccagacgccgaaagcgtcttttttgttgtccgttatacgcgccattcgatggcgtggtgtgccatacatccgcagggtttacgatgccgccttgccggactcctcacacaccatgccgcccacaatggcacgatatgtggttgttgtgtcaggttaaggcctgctatcgacgcacaaaaccgcatatcgcgccgccccataatggtgacgttggcggggctaccgaaaggtaggccggtttccgtgtacgccggtatttccacccccgtcaacgtcaccgcccctattgagcgtggaaactctagcggtgactccgtaaacatgtacgcggaggccgtaactatggttaatgccaatccttgcccttgcccgcttttcgtctggcgtttcttctcatgccagcaatctacctatcacactgtcaccgccaccagcgaacgcgaagcccgcgcacagctaccggatgcgccgtgtctgtttgccgcccgtattcgtctggagggggtgcgccatgtttaa

SEQ ID NO: 385022 - DNA, 471 bp, Salmonella enterica
atgactgaatcaccagaaaagccgaatgttaacgggcttccgttatcaatggttgaccagtggcgggaatacccgacaaagcgcacatttgccgtttccgtacctggggaactacgccgccagtattacccggacgatgcagcattcagtaaagcgatgcgtgaagcgggttatgtgcctgtacgaacgcggaaacttaccggaaaggatgctcgcttctggttgtatcgtgtaacgggcaatgataagggggttgtcgcagaagagcccgcgccccgcaaggcttccgcgccagttgtccagacgatgaccagaccgcatccgtggtttaaacgcgtggcgctcgatggtaaatggcggtacgtctacgccgaccacatccgttttctgacgaaaaagcgccacagagtcgaaggtgtgcgtgtacagggttatacggctggtgggctgaaagtggaggtattgccatga

SEQ ID NO: 385023 - DNA, 702 bp, Salmonella enterica
atgaaacttcagaataaccccactcaggggcgcggcctcctgcaccctgaaaacagtagtgccgatattctcattcagcacaaccgtgaaccgcgtattgattcgcgactcatcgcggaacgcgtgaaagtgacccatgaagcgatagtaaaactggtgaagaaatatcgcagacagttacgagaattaggcttactgcccggatttgaaatcgactcagtgcggcgggctggtggacgcggaaccaaacacaagcgctactggttactgaacgaattgcagtttgatttcctttgtcgtgttatccgtgggcgcaatgcggaacacatgaaccagttcaaacttgacgtaacgaaagcattttcaaagcgtcgcgccgctgaacctgtacgccgtgagtatctgcccggctatcacgagagccgcgacagtcttaaagcgcttggtgctgaaccccgtcactttatcaatctggcaagggcagaaaaccgccttacagggttatcgggtggcgctcgttcagtcgttgacgaacaggccgggcttctcgttgcactccagaaaatagagcaggcggcatttaccgaagcagcttatgccggactgtcacccacggaagcagtaagagaggctgtacggcgtatgaatgcctttgcagcactgttatctgtaactgatgcgccgggggtatcccatgactga

SEQ ID NO: 385024 - DNA, 213 bp, Salmonella enterica
atgactcaggcagataaacgtaaaatactgctcaagcgggaagtaaaagacatattgcggattaagggcgacagttcattttacgagatgataaagcgcggagaatttccggcagggtttaaagtcgggttgcgtcgtgtgggctggtacgaagacgaggtttacacatggcttgacgaacgcgccaaagaagcacgcggcgaggtggcatag

SEQ ID NO: 385025 - DNA, 729 bp, Salmonella enterica
atggctactactgaaaagcttacgccgcttgaggaattgaccatatttaggggagaaggaattttcatcccattaggtgaggtgtgcgagacaatacaaaaccgatacggaatgaaccgtaatcaggttgcggaatggttgtattgcaagttatgcacgcaaaatcatgttgaactggtcagagagaaagcagggagtagtccacttaatcccatgcgtgaattagtgccggatgattacggagtaaaaaggcttgagcaatatcttattaattacgtaaatggctctccgctggttatggggtgcgggtttattcgtcacgaccttgaaaaagtgctgggtgttaagtttccatttcagaaagccagttatcaggatgatgaatatcaccacgccgataatgaggagccatcaccagaaataacagttaataccgtacacgaaattaacaataacccttcacctcccgccgtatgggagaatacccacggtatggaaaccgcaaagaaatttattgcaggtctggcgatagcgattgccgcgaatgacaaaagatatcaacgaaaagacggatttaataaatcagcagtcgcacgccttgcggaaagtgcgctgcttaaatacggcgtctctatcggtgtatccgacaggcaattgacagaactcataagcgaggctttgaagtatgcgccaaagttcaaaggctatacagacagtgagcaaccatga

SEQ ID NO: 385026 - DNA, 1242 bp, Salmonella enterica
atgccaaaaaccgtcacaccgcttacccacaccggaatacaggccgcccgtcccgcagagaaagagtacacgttacaggacggtaacggcctttacctgctcattaagcccaatggttcgaagatatggcgcttccggtatacgagacccggagacggtcagcgggtattgctgagttttggatcactggatgaggtgacgctcgcagacgccagaaaacgccgggaagaataccgggcattactggcgaagggaacagacccacagacgcaccagaagcagcagaccgaagcggaacttatcaggcgcaataacacattccgtaaggtggcggcgaactggtacgagatgaaacgggcgcagaacctcgcaccaaataccattaaggacatatggcgctcactggaaaagtatgtcttccctgatgttggcgatacaccagttaacgaactgaccgcccggcagtttgtcacgcttctggagccgataaaggcaagggggaatctggaaaccctgaaacgggtattacagcgcattaatgaggttatggactatgccgctaacagtggcctgacagagttcaataccgccgccaatgttcgtaaggcgtttcccactcctgtaaaagtccatatgcccactattcgccctgaacagttaccggagttaatgagcgccgtatcagttgccagcatagaacggcagacccggctactcattgaatggcagttactcaccgttacccgtccggcagaagccgccgaagcccgatggagtgaaacagacctcacagccagtacatggactatcccggccggacgaatgaagatgcgccgggagcatgtgatacccctttcctctcaggcgctggcggtactggaagccatgaagcccataagcgcccatcgtgaatatattttccccggatacaaaaacccgcagatgccaatgaacagtcagaccgtaaacgttgcactaaagcgtatgggctttaagggggtgcttgtctcgcacggcatgagggcgatattcagtaccgcagccaatgaagaaggctttgagccggacgtaatagaagcggcattagcccacgttgacacaaacgatgtcagacgcgcatacaaccggagtacgtactttgaaaagcgtgtcgtgctgatgcgctggtggggtgaatttgttgaggccgcatcgacaggcgtgacccttgccagcggtacaaggggaatcagaattgcgtag

SEQ ID NO: 385027 - DNA, 1224 bp, Salmonella enterica
gtggcgaacgccatcattgccgcatgtgatgaagtccttaacaacggtaagtgcatggaccagttcccggtagatgtctatcagggcggcgcgggcacttccgtcaacatgaataccaacgaagtgctggccaacatcgggctggaactgatgggtcatcagaaaggtgaatatcagtacctgaacccgaacgaccacgtgaataaatgtcaatccactaacgacgcctatccgacaggcttccgtgtagcggtttacgcctctatcgtcaaactgatcgatgccatcaaccagttgcgtgaaggtttcgaacgtaaagcggttgaattccaggacatcctgaaaatgggtcgtacccagttgcaggacgccgtaccgatgacgcttggtcaagaattccgtgcgttcagcatcctgctgaaagaagaagtgaaaagcatcgagcgtactgctgagctgctgctggaagtcaaccttggcgcaacggcaatcggtactggtctgaacacgccgaaagaatactctccgctggcggtgaaaaaactggctgaagtcactggtttcgcctgtgttccggctgaagatctgattgaggcgacgtctgactgtggcgcgtatgttatggttcacagcgcgctgaaacgtctggcagtgaagatgtccaaaatctgtaacgacctgcgcttgctctcttctggtcctcgtgccggcctgaacgagatcaacctgccggaactgcaggcgggctcttccatcatgccagccaaagtgaacccggttgtaccggaagtcgtaaaccaggtatgctttaaagtcatcggtaacgacaccaccgttacgatggcggcggaagccggtcagttgcagttgaacgttatggagccggttatcggtcaggcgatgttcgaatccatccacattctgagcaacgcgtgctacaacctgctggaaaaatgcgttaacggcattaccgcgaataaagaagtgtgcgaagggtacgtttataactccatcggtatcgtcacttacctcaacccgttcatcggccaccacaacggcgacatcgtcggtaaaatctgtgctgaaaccggtaagagcgtacgtgaagttgtgctggagcgcggcctgttaacggaagccgagctggacgatattttctccgtacagaacttgatgcacccggcttataaagctaaacgttatactgatgaaagcgaacagtaa

SEQ ID NO: 385028 - DNA, 225 bp, Salmonella enterica
atgaacacacagaacgtcaacgtcaaaaccgccaccaaagaatcttccgaaagatggtggaaaaagacaaaaatccgtctgatcactgctgctgatcgtgccgatatgagtgtcgcgtatggcctggaagccgctgagcattacggtattcagtacggttttatccggtctgtatacgactggatcaccggatttgctgaaggactgaaatccccaggctgctga

SEQ ID NO: 385029 - DNA, 822 bp, Salmonella enterica
atgagattagcttcccgttttggcgcaaaaacatttattcgtcaggaacgccctttaaccgatgatgaattaatgcgtcatgtcccgtctgtattttcagacgataaacacgagtcgcgcagccagcgctatacatatattcctactatcagtattctcaacaggttacgtgaagaaggtttccagccgttctttgcctgtcagagtcgtgtccgggatttaagtcgccgcgaatatagcaaacatatgttgcgccttcgacgtgaggggcagattaacgggaaggaagttccggaaattattttgcttaattcacatgatggatcgtccagttatcagatgatccccggactgttcagattcgtctgtacaaatggtctggtatgcggaaataattttggcgagatccgtgttccacacaaaggcgatattacagggcaggttattgagggggcttatgaagttctgggcatctttgataaggtcactgaaaatatggaggctatgaagtcaatttgtcttaaccgggaggaacagtatttatttggtaaggcagcgctgacggtcagatatgacgaggacaataaaatcccggtgacgccggaacagataattacgccccgacgttgggaggacaaaaaaaacgatctgtggaccacctggcaatgtgcccaggaaaatattataaaagggggattacccggacggaatgcctccggaaaaaataccagaaccagagcaattacaggaattgatggcgatatccgactgaataaagcgctgtggatgattgccgaacggttcagggagtacaagtcatga

SEQ ID NO: 385030 - DNA, 687 bp, Salmonella enterica
atgtgtccgatggatcgtagagaaagaacactcggcagtcaatctgtaaataaatacattctgagtattcaggatatctataaaaattcaccagttccggtctgtgtccgtaatcagagtcggaaaatcctttacgcaaatggggcttttattgaacttttttcaaaagaggacctgcctctttcgggagaaagttatattcgttatcaggtagaagtttacctgtcatctctggaacttgaatgtcagtcgcttgggcatggagctgctttttgccggcgttttaattttcatggggagatatatcagataagaatggagaatatttcattcgataacagtgaagtaatcattttatggcagataaatttgtttccggattatccattttttggtctgacacagggaatcaaaaatgtttctatctcagaaaatgagtcattctggaacgagctgtcaccgggtactttgcttgtcttttctttttatatattaggttttagtcacgccaatatagccaaagaattaggtattactatcagagcatcagaagacagaatcaaaccagttaaacgcaaaattaaaaagaattatgactatttcgatttattcagaatatcatgcatttctaagggtaaaataatgtcagtaatagatgttattcgtgaattttattgtgttaaataa

SEQ ID NO: 385031 - DNA, 738 bp, Salmonella enterica
atgatgcgaaaaaataagaaattattcctgtccgccgggttatttttcagttgctctgttctcgcggccggcagcggaggcacactggctcccacagtagtgccaatggtaaacggcggtcaggccagtatcgcggtgagcaataccagcccgaatctgttcacggtccccggtgaccggatcatcgccgttaacagcctggacggggagctcacaaataacgagcagaccgcgtcgggtggcgtggtggtgtccacgctcaacaaaaaaccgtttacgttcattctggaaacggaacgtggacttaacctgtccgttcacgccgttccccgtgaaggtgccggccgtaccatccagctggtcagtgacctgcgtggcaccggtgaagaggccgctgcatgggaaatgtccacgccttatgaatcgctgctggtttccgtcagccaggcggttcgtggcggaaagctgcctgccggctggtatcagctccccgtcacgaaagaaacactgcagaccccgtccggtatgtcagcacaggctgacgctgtatggaccggcaatcatctgaagatggtgcgctttgtcgtgaaaaataccacgctgtcgcccctgaatatccgggaaagcgacttctggcagcccggaacccgggcggtcatgttcgctcagccggtcagccagatagtgagtggtgcccgcctcgatatctgggttatccgtgacggggaggggaactga

SEQ ID NO: 385032 - DNA, 543 bp, Salmonella enterica
atgggaaataaccgactgaacagcctgaaggggcgcgccattttgtatcgtattgccggtcttctgcgctggctgatatggggcgtgaaatatgccgttatctggccgctggccacaatagctgtcgttgtcattctgatcttccggatggatggttccacgccaggacaacagatagcgcaggaaatcgaaaaggtgagggcaatggccccgcccgggacgttcccggtcagcgtgtgccccgaaccgatactgacggcgtcgtcacctttaccggagaacctgccatatctgacgggagactgtccgctaaaaataaccagcgctgaagaatacgcggcaaatatcaaccaggccctgtcacgaacgggacagatattatggataacgctggcgttgctgtatgtctcggtggcggtaatgatcggagaccggccgtaccgcccacatgaattcatatacgcaacccgtatggcaaacagacaggttatttattccggaaataagagttctgaaaaaggagataaaaatgaacatgcataa

SEQ ID NO: 385033 - DNA, 165 bp, Salmonella enterica
atgaacatgcataatgttatttcagcccctgacaaacctgtgccggatgaacgctgcaaatataattcttcagttgccggaattcccggcgcagggaaaacgttattcctgtctgaattaatcagcagtctgctgcgtgataataataaagggggggaatcatga

SEQ ID NO: 385034 - DNA, 513 bp, Salmonella enterica
atgatccggatttcatggtttattcctttctgtggcgcgcttttactttccggatgcgccggaacaaattccgattttgaatgtaccgccaccacgtcagatacctgtatgacgatggagcaggccaatgaaaaagcgaaaagactggagcaggctgagacggtaaagccggttgcggcatcactgccgcgcctggctgacggtaacttccgcacggtttcagcacagccgggagatcccgttgcgccggtggccgttaagcccgttatgcgctccccggcgcagaaactgccggctccacgcccgctgtttacggcggaccgggaagcgggagcagtggtgcctgtcagtacggcctcttctgtggtttctccccgcccactgagaattggggaacagacggcggcgttatggattgctccatatattgacagccaggatgtttaccatcagccgtccgccgtgttttttgttattaaaccgtctgcatggggaaaaccccgcgttaattaa

SEQ ID NO: 385035 - DNA, 222 bp, Salmonella enterica
atgagtgatgaagcggatgacgcatacacagtaacagaacaactgaccgtgacgggaataaaccggatacggcagaaaataatctgtgcaggtgttccggtatataactgcagatcctgtggaaatcccattccggaagcccgccgaaaaatatttcccggcgtgacgctgtgcgtcggttgccggtcgtttcaggaaaaacaggaaaagcattatgcataa

SEQ ID NO: 385036 - DNA, 468 bp, Salmonella enterica
atgcataaatcagagcctgaaaaaattgaatccattattgatgaacatgaccggataaaccggcgacagttcaggatatttaacaggctgggtgttctttcaatcatcaccggcgtactgagtgtgattaccgcgttattcagtacctccctgctcctgaaatacacgctgtgtgtcgtgatctgcgtctgtctggtttatctgttttttatgctcttcttcctggacaggtatatcgtgctcagtcgtccgacactgctgtggctgatgaacagggtggaagataccgcagacgttcgccgggagctgctccgccgtctgctgtcagggaaaacgctgaccagacgggatgaagacgacatcctgcgcctctggtgggagagcgttaatgaagcggaagcgctggcaacccgtcagcgtgaacaggatgccatccggaagtttgtcggagaggataaatcagaatga

SEQ ID NO: 385037 - DNA, 384 bp, Salmonella enterica
atgaaggttcatctgcagcgttacgtggtctggtttctcctggcgtactggagtctttcctttgtgaatgagtatttcctgcgcgggcatccactgtcggctgaggcatggcaggggatgaggcttctggctctgctggtgaccgcctcgctggcgataacgctcacccggttgcttaccactgatgccagtaacaggcaggaggctgcggtggcggtgatgctggttacgctgatactgcattttctggccctgctgctccctgctgtctggctgttttatcagtggcagtggcacgggcggcttcttctgcagtggcagggaacggccttcggtctggctctggcggctctccccgctgccgcatttttcttttcttcatga

SEQ ID NO: 385038 - DNA, 387 bp, Salmonella enterica
atgagtacagagcagaaacagacagacgggaccacgccgggcaggcgtcgtggagtatgggtgacgctggggtgtctggggattgtgatggtgaatgcggtcatcagttacgggatagtcaggctgaacacgccggtgacggtcacgtttaacatgaaacagacggtggatgcgttttttgacagcgccagccagaaaaaactgtcagaggcgcagacgaaagatttgtccgcacgtttcagtgcctcgatggacgccagcctgcaggcatggcagcagaaacaccatgccgtcattctggtctcgccggcggtggtacagggcgcgccggatatcacgcgggatatccagcaggatatcgcccgtcgcatgagggataccccatga

SEQ ID NO: 385039 - DNA, 633 bp, Salmonella enterica
atgaagcggggcctgatgaccattctgttgctgttatgggggcaaagtgtaccggccgctgacctggggacatggggcgatctctggccggtacaggagccggatatgctgaatgtgattatgcaccggctggaatccctgcagcagtccggtgaaatgggccgaaaaatggacgagtttaaagcgcgggtggcacgtaacagcctccgcccgcctgctgtggagggcgtgacccgcacaaaaaaatatgccagtcgcctgtttgacccgtccgtcagactggctgccgatatccgggacaatgaaggccgggtatttgccaggaaaggggaagtgatgaatccgctgcagtatgtgccctttaaccagacgctgtacttcattaacggtgacgatccggagcaggtggcctggatgaaacaccagacgccgccgacgctggagagcaaaatcatcctggtccggggcagtatcccgcaggcgcagacggcgctggacagccggatttactttgaccagaacggggtgctctgccagcgcctcgggatagatcaggtgccggcgcgggtgaccgctgtgccgggggaccggcttctgaaggtggaatttattcccgtgggagacaaaaaatga

SEQ ID NO: 385040 - DNA, 543 bp, Salmonella enterica
atgtgtaagaactctgcgtttctggcatcaacggtcagtcaggtcagtctggctctgaaaaccgatcccttaagacaactggcgtcactggacggtatcgctgaagcgtctgataaaatatcagtacggctgcgtaagggaaagcgggtgactcctgcacaggttcgcagtttgtgcgcacaactgtggtcggtacggatgcgcggggtacaggaatacgggcgagactcagagataatgaatgctctggaaaagcaggctgagttacttgagcgtgtctgtaacgcattaaaagaacggtgggtttaccgggagtggatatcctcaaaagcctcctccatcctgtcgggaattctgattatccctgtatttcttgcgctgccagtggttgtgagtatgggatgtcccgggctgttatgcgtcacgcttgcgggaggttacctgggatgtcttgccgcctgctcattatgggcgaaagatccggtggggcttttctggacggtttacagttttattccattatatgttctccggaatatgtaa

SEQ ID NO: 385041 - DNA, 183 bp, Salmonella enterica
gtgggcaaaaatattttacgttttgcgtatctgaatgatgaaagcacctccattacgatgcaccctgaacccattggggtgcttctggcaggagaacaatctgtagcgtgttttacctccgtatctgagattcagaacaataatctcacagagaggcgtttttctttctttatccttatatga

SEQ ID NO: 385042 - DNA, 357 bp, Salmonella enterica
atgaccacaatatacttttgcttattactgttgttaacagcactgcttcgtcttcgtttcataaacgacagtccctttttcagactgctgagaagacctttcccggccgagttaattttatttttactttcactcgccatagccctgaccttacaaaaagatcatttaatcttcagtggtgatatttatttcatttttctcaagtctaccatactggcaattattatctggtttttctcatttattattgcttcatccatgctcagaacacctgttaccggtatggttcttacacctttcactattgaactgagaatagatattgagccgaagtatatttttttcgtcaacttttaa

SEQ ID NO: 385043 - DNA, 582 bp, Salmonella enterica
atgcaggacgatacaacagtaaacgatttttcttatgtcaggaaaaccctttttgacattatcagccggatgagggagggaccgtccacacgactgtatgaaaaaccggttatgcagcgaggtctcacggagatcatgtggatgttgcatcatcagtattatccgtcacctcatcaggtggatttgattatctatctgttacggaaagagaaattcagggttgtgcgggaagaaaagtgccagtcacgcctggtgacagaaattcagtcattaattgatgttctgaaagacatccggaaatttctgcagtttgtcacacagtatgacagcgacggttgtatcatcactctgaataccggaactgaccagaattataccagtatttttctttgtggcgcgattgtggttacgctttgtgcagttcagtttcttatgtctgccggttattcaccgtttaccatttgtctttgcgctgtatgtgcttttttcccctcccccctgtttctggaaaaaatgccacttattatagcctgttcaggactggtagttttcagcctgctcagtgtttgtttctggccatga

SEQ ID NO: 385044 - DNA, 630 bp, Salmonella enterica
atgatcaggcaaataaaatatctggccggactgattatggtcataagcgggacggtatgggctgcggggaacgtcaatacagccgaaaaccgccagttcctgaagcagcaggaaacgctgagtcagcagttacgcgacagacccgacacacagcttaaaacatgggctgaacagcagattcagggtaatcccctgcaacagtcagaccgacattttttggatgaccttgcccgaaagcaacagtcttcgcagacagaaaaacctgcgtcgggcgccgtgtattttgtttcgttttccattccggaagagggcctgacgcgcatgctgggtgaaacccgccgctacggtattccggcgacgctgcggggcatgctgaataacgacctgaaagccacggcggatgccgtgctgtctctggtgaaagacggggcaacggacggggtgcagatagatccgacgctgttttcagaataccacgttcgcagcgtgccggccctggtggtcttctgcgatcggggttatgacattattcgtggaaacctgcgggtaaaacaggcgctggagaaagtggcgacagccggggactgcagacaggttgccggggagatactgcagcagaataagcggtaa

SEQ ID NO: 385045 - DNA, 297 bp, Salmonella enterica
atgtattcagttaaaaaccggttttctgcgggggaaacgaagacctgcgggatatttctgaatatccgtttaaccacacaaaacgaaggtatatcgtttgaaaaacagactgccctggcgtctcataaaggtttaccggtcacgctgaaaggaagaacaatggcacaatggaaagcatcgctgagagaacacgcccatctgcgccgctggctgtgtaccctgaatattctgctgcttaccctgctgattaccgctgccctgctggtatataacggttatctttccccgctgggataa

SEQ ID NO: 385046 - DNA, 477 bp, Salmonella enterica
atggcacaggacaatgaacgggacaggctgaaacagtcagccagagaaagtgccctgttactgctgaaagtcgtcgctggtgtggttgccgtcggtgtgattgcgggggggacgggctggctgataataagcggcaaagacctgctcttcagacattatcagaaccacgctcaggtcatgcgttacggggcctgcgcgctggcatggctctgtattctggtcggtaattttgtctggctgacgtacgagcggttcgaaaaaacacagggcagggagcctgccgggaaatacggttatttaatgctctgtatcatgtctgccacattgttggccgaattcctgcttatcgggattattgtccgtatgctgttttacggggacggtcccgggggcgcggatatttccgtcatgtccctgacggttctggcactggtcatttcggtgggtataaaaatgccggacagtggcaggaactaa

SEQ ID NO: 385047 - DNA, 207 bp, Salmonella enterica
atgaggataatagtttttctgctccggctgacggtgacggttatcgtggcgtctccggtggtgtactggtcgtgggatgctgtaagggcaacaactgcggaagataccctgctctcggggcttatcatcgccgcgaatgtcgtgatgttcatgccgctgtactgtttcgtgctcagcctgacgaaacgccggcaatatgatgaataa

SEQ ID NO: 385048 - DNA, 750 bp, Salmonella enterica
atgcgaaaaaaacaggtcgtgtggctggctgcgttactctgtggtcccctggtggtatacgggaaagacgccggctggcagtggtataacgaaccggcaaaatccccggctcaggaaaccacagagaaaccggcacaggtacgtcaggagactgacatcatgcagaagctggccacgctgcaggctgccacaaaacgtgcgttgtatgaggcgattctctatccaggcacagagaatttcgtgaggtatttccggctacagaattactggacgcagcaggcggggctgttcaccatgagtgccaaaaaagccatgctggcgcaccccgagctggattataacctgcagtacagccactacaacggaacggtacgtaaccagctggctgcagaccaggctgagcagcgttctgccatttctcagctggcagaacgttacggcattatgttcttttaccgtggtcaggaccccattgacggccagcaggcgcaggtgattaatggctttcgtgcaacttacgggctgagtgttatcccggtttccgttgacggggtgattaacccgatgctgccggatacccgtcctgaccggggacaggcacaacgtctcggggtgaaatatttcccggccatgatgctggtcgacccgaaacagggcagcgtgcgtccgctgtcgtatggctttattacccaggacgacctggcaaaacagttcctgaatgtttcagaagattttaaaccgaatttttaa

SEQ ID NO: 385049 - DNA, 369 bp, Salmonella enterica
atgaaattgtggtccttatggccgttacttttcattcagctaataacaatactggtcactgccatttttgtccgggggagtaaaaatcacatttcgtggcgttatctgctgatatgctctctgtcaatgatgatagcggaagtcatcattatcatgaaatataagttatggcttttatcctgtgaacagctcactgttgccgggattccagcgtggttacttttatttttccatacaggatatttttctgatgtatccggaaacggacgacaatggatatggcacagcattgcctttattgtatccggagcgggaatgtttctgtactggtggttatggaatggtactgtacaatccccctcatattga

SEQ ID NO: 385050 - DNA, 342 bp, Salmonella enterica
atgataagtcagaacagtaatacattaaataaaaacggtatttttattatgtgtaaatataaaatatctctgccccgactggatattaccggtgtgtgggttttctccctgggtgtctggtttcatattgtcggacgactggtttaccgaaatcccggaatggccttttttctggctgaactgattgcggtcattctggtgctgtccggcgcgtatcaggtactcgatgcctggattgcacaggtcagccgggaagagcgggaggcgctggaagcccgccaggctgccattctggccgcaaaaaaagaggatgacggggatgaatcacatgtctctcagtaa

SEQ ID NO: 385051 - DNA, 570 bp, Salmonella enterica
atgaatcacatgtctctcagtaaaactctgctgttcatgctgcttctggtaggggcgggtgttcatgcttccacacgggaagagattgaacggctgtataacccgcacgggatgggcgcccggtccgcacaaccgcaacagaagccgcctgcagcggaacagaacgtgcagacagtcagatctgttccacgctggtttcgtctcagcaatggtaaaacggttaacctggctgagtggaaagtggtgctgtttatgcagagaagctgtccgtactgccaccagtttgatccggtactgaaggaggtggcgcagcagtatggattttcggtattcccttacacgctggacggtcagggcgataccgcgttcccggaggcgctgcctgcgccaccggacgtgatgcagacgttcttcccgaatatccccgtcgccaccccgacaacctttctggtcaacgtaaacacgctggaagcattaccgcttttgcagggagccaccgatgctgccggttttatggcccgtgtggataccgttctgcagatgtacggagagagaaaacatgcagggtaa

SEQ ID NO: 385052 - DNA, 489 bp, Salmonella enterica
atgaaaaatctgattcagataggcttggtggtgatgcttcagtatattgcctgttatcttgccggatggaatatgcctgaaaccggatttatcctgacatttgttttgttatggcaggcgttgtttatctggttgtttcaccaaatcagtaaaaaacataactctcagggtgtgtacaaattcagtaaggttatctggtatatcattatgccggtatgttcactgatatcaccgctgttaagtctgatgatatttatattcggaacgttatgtgatttgagaagagtcagtaagtgcatcactataaaagagtggatgaaatctcagattgttgatgaattagatggcaatattagtttggattttgagtctgttgagtttccagaaacaacatgttataaccctgcaactggttaccctatgtttggtggtattgattccgatgggaatccaagtggcactcgttggcaaaattattatgatcgataa

SEQ ID NO: 385053 - DNA, 2250 bp, Salmonella enterica
atgagctttaacgcgaaggatatgacccagggcggtcagattgcgtccatgcgtattcgcatgttcagccagatcgccaatattattttctactgcctgtttattttcttctggatactcgtcggcctggttttatgggtgaaactcagctggcagacgtttgttaacgggtgtatttactggtggtgtaccacgcttgaagggatgcgggatttaattaaatcccagcctgtttacgagatccggtattacggccagacgttccggatgaacgccgcccaggttctgcaggataaatacaccgtgtggtgcggagagcaactgtggtcggcgtttgttctggccgcctgtgtggcgctggttgtttgtctgatgactttctttgtggtcacatggattctggggcgtcagggaaaacagcagagtgaggatgacgttaccggcgggcgccagcttactgacaacccgaaagacgtggccagaatgctgaaaaaagacggaaaagcgtcggatatccggatcggcgacctgcccattattaaggattcagagatacaaaactttttgctccacgggactgtgggggccggtaagtctgaagtcattcgccggctggccaactatgcccgtcagcgtggcgacatggtggtgatttacgatcgttccggtgagttcgttaaaagctactatgacccgtccattgataaaatactcaatccccgggatgcacgctgtgccgcgtgggatttatggcgggaatgcctgaccctgccggattttgataatgcggcgaatacccttatcccgatgggaacgaaggaggacccgttctggcagggttccggccggaccatatttgcggaagcggcgtacctgatgcgtaacgacagcgatcgcagctacagcaagctggtcgacacgctgctctccatcaaaattgaaaaactgcggacgtttctgaaggattccccggcagccaacctggtggaagaaaaaatcgagaaaacggccatctccatccgggccgtgctgaccaactacgtaaaagccgtccgctatctgcaggggatcgagcgtaatggtgaaccgttcaccatccgtgactggatgcgtggtgtccgggaagaccagaaaaacggctggctgtttatctcatcgaatgccgacacgcatgcgtccctgaagccggtgatatccatgtggctgtccattgccatccgggggctgctggcgatgggagagaaccgcaaccgccgggtgtggtttttctgtgatgaaatcccgacactgcacaaattgcccgacctggttgaaattgtcccggaggcccgtaaattcgggggctgttacgtctttggtattcagtccagtacgcagatggaagacatctatggggagaaggcggcggcaactctgctggatgtgatgaacaccagggcctttttccgctctcccagctataagattgccgattatgtcgcacatgagattggtgaaaaagagatcctgaaagccagtgagcagtattcctacggtgccgatcccgttcgtgacggggtgtcgaccggcaaggagatggagcgtgtcacgctggtcagttactccgatattcagtcactgcccgatctgacctgttatgtgacgttgcccgggccgtatccggcagtgaaactggccctgaaataccaggagcgccccaaagtggcgccggagtttattccgcgtgaaatgaatccggaagcggaatcccgtctgaatgccgttctggccgcgagagaggccgaaggacgtcagatggccagtctgtttgaaccggacgcggaaaaggttgcgctggcagccgcagaaatacaggctgaacagccgcaacagccgcaacagccgcaacagccgcaacagccgcaacagccgcaacagccgcaacagccgcaacagccgcaacagccgcaacagccgcagcagccacagtccactgttgccggcgataaaaaatcagcaacggcaggttccgctgtgaatacgcccacaggtggggtcggacaggaactgaaaatgaaggcggaagacgatgagcagccactgccgcccggcattaatgagtccggtgaggtggttgatatggcagcgtatgaggcctggcaggctgagcaggaactgaatacccaacagcagatgcagcggcgggaagaagtgaacatcaacgttcaccgggaccggggggaggatgtggagccgggggatgatttctga

SEQ ID NO: 385054 - DNA, 216 bp, Salmonella enterica
atggaaaccagcgtattcctcagtaaccgcagccaggcggtcagcacgccggccggagaatgccgggatgaatggttcgacgggaacaacgtcagcgccgattttatggatgaccgggaacaacccacgatgcaggaacggaggactggatctgacctgctcatcagaaatcatcccccggctccacatcctccccccggtcccggtgaacgttga

SEQ ID NO: 385055 - DNA, 741 bp, Salmonella enterica
atgacaacggagaacaccacgcataacgattcgcgggctgcccgggcagacaggcggctgcagccgttgctggtctggtcgccggggcagcgggatatcatcaaaaccgtggcgctgctgctgatggtggctgaccatgttaaccgtattctgcacctggaccaggactggctgtttctggccgggcgcggggcttttccgctgtttgccctcgtgtgggggctgaacctctcccggcatgcgcatatccgccagtctgcggttaaccggctgtggggcctggcggttatcgcccagggcggctggtttctggcgggatttccctggtatgaagggaatattctgtttgcctttgcggtggccgcgcaggcgctgacgtggtgtgaacagcgcagcctgtttcgttctgcggccgcgctgttcctgctgacggcgtggatacccctgtccggagccagctacggcattgccggcgtgctgatgctggtcatctgttaccggctgtaccgggcggcggatacggaagagcgtctggcgcttgtggcctgcctggttgtggccatcccggcgctgaatctcgtcaccagtgaggctgcggccgtggccggactcctgataaccggtctggcagtatggctggtatccctgacggcaaaatccctgccccgtttctggccggctgattttttcccggtattctacacctgtcatctggccgcgctgggtgtactgatgctgtaa

SEQ ID NO: 385056 - DNA, 282 bp, Salmonella enterica
atgaaacgaaacatcgcgcaggcagaaacccgtgtgctgacggcacacattccccttcagatggctgaccgggtggatgagatggcagaacgtcttgaacgttcacggggctggatcatgagacaggccctgtctgcatggctggcgcaggaggatgaacgggatcgactgacccgtgaggcgctggcagaggtggagaccgggcaggttattgaccatcagagtgttcaggcctgggcggaaagtctggatacagagcagccactaccggtaccccgttaa

SEQ ID NO: 385057 - DNA, 276 bp, Salmonella enterica
atggaaataaagtggacccgcagggcgctgtcggatgtatcccggctgtatgacttcctgtcacgggtaaacaggcaggctgccgcccggaccgtaaaaaaactgacgctggcccctttatccctgcaaagcaatccacgtatcggggagcagttattccagttttcgccggatgaagtgcggcgaatttttgtcggtgattatgaaatccgttatcagatacaggcctctgtgatttacatattgcgtttatggcataccagggaaaacagataa

SEQ ID NO: 385058 - DNA, 240 bp, Salmonella enterica
atgagtgagcggatgaagcagggaaggcgcaggcagggcatgacgccggctgcactctggcagcaccagaggcggggccgtgaggccctgcaactggaaatagcgggggaatacgatgccgctgcccgggcctggcagcataccgcgaaccgggcgcctcatccgcagtggagaatgtttgcccgggaaagggcgcgtcgctgccgggaaaagttattttttcgtcagggaggttgctga

SEQ ID NO: 385059 - DNA, 261 bp, Salmonella enterica
atgagtcagacagaaaaactgccggcgttaagccagtatgaacgctttgtcctggagtccctgtaccgccaggccgcagaagaggcggggcatccgcccggcgcgcaggcgcgtcagcgtatccgggaggagtatattgcgtccctggggaaagatatcccgcagacacgtccttaccggcggcataaaaaaaccggggatacggcgaagacatttcactggcaaccgtgcggtcccatgagaaaaatccgcccgcgctga

SEQ ID NO: 385060 - DNA, 303 bp, Salmonella enterica
atgagtgagagcgtctggcaggctgagcacgctgaaatacttcacctgttgcatccgtttactcacggggtcgcggacataacgcccttccagcctgcagagggtgccgtcagtccggcgcatgatggcgtggacaagcaaccgggtggtatggatatgcaggttaaagcacccggcaatgtcgacggcggtcacaggcctttttttcctgtaaacccacagcacaatctggtcttccagctgttttttttctttcggggtcagtggtccggtactgatggctgcattcctccggcgcgctga

SEQ ID NO: 385061 - DNA, 345 bp, Salmonella enterica
atgcacagaacgacggatgtgaccggccataaggcgctggcggtactgcgctcatttattgctgacatgcgggagtggggcgttacggtcagcagtgaggagagactgatggcgctggcccggaaatattttgcggatgaccggaacacgctggacgggctgcttctgtatattgcatggtacggtagcggagaaggggtggtgtttgagcgggatcgtcatgacgatgtttttggcctgctgacggtcacctttttctctcatctggtcaccggctggggcatgcccccggttcatgcacgttgtttttactcctcactccgcgtccgggcgacggaaaaataa

SEQ ID NO: 385062 - DNA, 279 bp, Salmonella enterica
gtggcggaagcgctggaggcggcgggactttaccgcagggcagcgagacgctggctggaagtactggaccggtgccgtgacagtgaggaacgggcctggctggcggcccgccgcagtcagtgtctggaaaatgccagaaaacctgaaccggcagcagaatattttgaggatgtataccaggcggcttccgacacgcagaaacggatgggtatccatgcacagaacaggttcagaaggtatccctctgaaggggacacccccaaaaaatcgtcatgctga

SEQ ID NO: 385063 - DNA, 456 bp, Salmonella enterica
atgctgattaccgtggaactgctgctcgctgataatctgcgccacagcctgctgaccctcggggcgctggacctcagcccgttgcccgggctggagagggttgttgaatgctataccgaaagattcgccactcttcctcccggaatgtggtacaggcagtatcagggccggcgctggctgacccgcagcctgccggggccggctttttttctgttcctcagccgctggcggaatataccggaagtcagatgttttctggaaagccatgagcggttcgtttttgcttcacggcagtctgtcacggaagcgcgctgtaatgtatgggtacatcagcctgaagaccggagacagcgtgacgacaggacatttcccgggcagccacgtggctcatgcgaacagtccccgggacggcattatcgttgctgtgaccgcagaaatgtaaaacagtttaaataa

SEQ ID NO: 385064 - DNA, 207 bp, Salmonella enterica
atgaagagtaaatatgactggctgtttcagctgagaagatgcagtaataaagaaaccctggagaaagtcgcagaatctaaccgttataaactgtcggcggatgagctggagagttttaactcagcggcagaccaccgtctggctgagctgacgatgaaccgcctgtatgacaaagtgccggccagcgtgtggcagttcgtccgctga

SEQ ID NO: 385065 - DNA, 219 bp, Salmonella enterica
atgttccctgaatacagagcgctgatatcacggctgaaaaaagagaatacccggtttgctgcacttttccatgaacacaatatcctggatgcggatattaagaagagagaaatgctggccggtttcagcgatgcggaaaccgaaacgctgaaaaaaaagaaactgcagataaaagatgcgctgtaccggatattaaaatcatatgacactgaaaaatga

SEQ ID NO: 385066 - DNA, 150 bp, Salmonella enterica
atggtcagtaacagaaaaatgaaacaacggctgggtataaaaggaaaaatcagcaacagccgtcgcagcacggcgttctgccaggatacacccggtgttttccgtgtggtcagcactgaacgtcttaagcagaacaccaccacagaatga

SEQ ID NO: 385067 - DNA, 822 bp, Salmonella enterica
atgacgttccacagactcagtctttcagtcctggggctggcttttttgtccgggcaggcaatggccaccgcgcccgcgccggaaaaaaccggcccgtccgccagtgtcttcacgccggagcaggaggcccgtatcgggcaggtggcggcagattatctgctggcgcatccggatattctggtgcaggtcagccagaagctgcaggttcagcagcgggatgaacaggttaaaaacataacggcggcagtcctggccagtcaggatgcgctggttaatgaccgggataatccggcatacggcccggcagacgcgaaggtggttctggtggagctgtttgattaccagtgtattgtctgctctcaggaagcccctgagctggaggcggtgatgaaagcgaacccgcaggtacgctatgtgtttaagtcctggcccatttttgcacagcgctgggagaactcgctgaaagcggcacagaaggggctggaaatctggaagtcggcaggggcggatgcctggctggcgtatcacaacggcatttttgccaccggtcataatgaaggcgcgctcaccagtgaggatatcagcagcgtggccgccgcagccctgaaagggcataaaatcgggggcggagacgtgaacacgaagacgattctcgacaacaataaccggctggcgcagaaactgacattacaggggactccggcgctgattgtgctgccggcgaagggggccacagagaagaacgtgacggtgataccgggcggggcagaccgggaaaccctgcagaaagcgattgataaagctgccggtaaaacaacgtaa

SEQ ID NO: 385068 - DNA, 453 bp, Salmonella enterica
gtgttaattaatctgttttgtcaaatcctggatatatataataagatacggaataagtattatcagacccgacggtttttatccattctccctcacctgaaaaaaatggatgtaaagttaaatacgaaaagttatccggatgtctttcgtgtttccgctgagctgaataatgtggaaatttgtcgggctgtggtaattgtcaggggtgagtgtgccacccttgaatatctttttattgaagatgactttatgttatttaatgtgaggctgaaaaacagaggtgtcggaactaaagttttaaatgaagtgataaaacttgcaaaaaaaaggggctgcaaaaatatcagcggtgagatgaaaaaatcaaatattaataaactgaccagattttatggaaagtcgggttttaaaattactggtgacagattctggtatgacctcagggatgagtga

SEQ ID NO: 385069 - DNA, 714 bp, Salmonella enterica
atgcaaccattttcactgaattatgaaaatatcagcagacggctgacagaaaccgttattcctgattacggacgacgaatggacagcacccggttaaaacagcggggcgaggaaattaaaagaaaattcagcgtgctggactcctggccgccagtcaggctggcagaggcggaactgtaccgtgaagacgtcagtcagcaggatatccgtatcagcagactgtcggtacctgattttttaacgctgctttttgacccgtacagcagggcacaatgggatgactttattttaaagcatgcagaccaggcagggaatacttcaggaccggaaaatgattacaggaatatgaccggtgaacgctctcagcctgaacatccacaatacggagagccggctatgccggaggcgtggcgggatgttattgcagaacgacagcgacagattaatacagggcgtacaccggagcatgatgatgaatatatcaatggtgctctggcattagcggcagcctgttatgcccgtcaggccggaatgtggggcactgactgctcggtttattaccgggatgcggttgtgccggacatctggccgtgggcacggaaatactggaagccatccagtccgcgtcgtgacctggagaaagcgggcgcactgattctggctgagatggagcgtcacgatcgcgctgccgccagaacaaataacgaaaactga

SEQ ID NO: 385070 - DNA, 546 bp, Salmonella enterica
atgagactcaggacaggtcacaggctgacgctggtcacactgacgtgtttatccctgctgggctccctgccttccattgcggcaccgtccgttcaggccggtttttcaccggaaggcagcgcagagcagctggttcttaagactattgagactgcgcagcataatatccgcctgatgggctattccttcacctctccggaggtggtcagggccttaatcagtgcaaaacgtcgtggcgtggatgtgaaagtggtcctcgatgagaaggggaaccggggaaaggccagcgtggcggcaatgaacctgctggtaaacgcgggcataccggtccgcaccgtgagtaaatttaaaattctacacgataaaattattatttctgataaaaacactgtagaaacaggtggttataaattcagtcgatctgctgcacgatcgaattccgaaaacgctctggttatccgggatgtaccggaactggccagaacgtacctgcagcactggcagtcccgctgggatgtgggtaaagactggcggtcaacatactga

SEQ ID NO: 385071 - DNA, 255 bp, Salmonella enterica
atgtcgcagcaggtcgaaaatgcagtaacttcctcatcgaaacgtacttacagaaagggaaatcctgtttcggcaaaagagagacaaaggttatccctggcccgcagaagtgccacacataaagcttttcatgcgatcatccagatccggttaaaagataagctgagtgagcttgctgatgaagaagggattactcaggctcagatgctggaaagactgatagaatctgagctgaaacgcagaaactctttgtga

SEQ ID NO: 385072 - DNA, 351 bp, Salmonella enterica
atggagggagagaccgcagccggggttttcgttaataaacgcctccacgtcactgagtatcccgatttttatggggcgaaaagtattgtcttcaggccagagaagaggaaagacctggcgaaaaaggggaagtttctgccggccattgcggagaatgtcccgacgttcctgtttcctgcgcagatacttacgctgtttcttgttcagtccggaaggagggagctgttttttaagcgacgggggttctgtcagcggagcggttgttttttccgcgtcaggcgcagccgccacatttttcgtgaccggcgtaagagtaaactgtcgttttttcttcaccacaataaccggtga

SEQ ID NO: 385073 - DNA, 273 bp, Salmonella enterica
atggctggcacccgtacgatcaccgcaccattaccggttgatatggctgaaaaagttgatgtgtgggcagagagaaatgggcgtacccgttcatggctggtcagggaggcggtcggtcagtttctcgcacgtgaggcccggcgtgacgtgctgcttcaggaagcgcttcatgccgtggatgagggacaattgatccctcatgaggatatgctcgcatgggcggcgtcgctgggaactgatgctcccttgcctgcaccggagccacgtaaatga

SEQ ID NO: 385074 - DNA, 276 bp, Salmonella enterica
atgaggtttgaatggacggtaccggcgaggaatgacgtggtccggttgtatcattttctggctgaaaaaaatgaacaggctgcggcggacgttgtgcagtcactggtgaatgcgccagggacattgctcctcaatcctcgtcgtggtgaggtggtagaaggttatgagccccgcgaaattcgtcgggccattatcggtagttacgaaatgcattatgaactgcagggtgatgtactgattgttttgcgcatctggcatcagcgtgaagaccggtaa

SEQ ID NO: 385075 - DNA, 252 bp, Salmonella enterica
atgagtaatatcattaaagttgctgtaggcggttcgctggtcaaaaaagaaattaaggcgttattggaaaaactgagcaaccagaccattaaagctgacatatttaccgatatggatgcttctgcaaaagtgaaatccggtgaatatgatttttatatgggttcctgccagtcaggtgccggtggggcccttgctatggcctacgctattattggtcgggataaatgttcattgataggaattaagacctga

SEQ ID NO: 385076 - DNA, 1074 bp, Salmonella enterica
atgggggtgcggtcaaaaatcttggcgttgacacacctgctggcgctgttcagaccccggatgtggtcatacaaaaaagtctgtttccgctgtaaaagccgctcctgtccacactgtggggtgaaggccggcgaaatctggatacagtacctgctgagtctggtgcctgacggggaatggcagcacatcacctttaccatccccggagagttctggccgctgatataccacaaccggtggctgctggcggagatgagccgtctcgcggcagacgttataccggaaaccggacggcgtgatggttttctgccgggctgtttcgccgtcatccacacgtggggccgcaaccagcagtggcatccgcatattcacctttccaccactgccggtggtgtgactgacagcaatacctggaagaaacgacaattttacgcccgtaacgtgatgcccgtgtggcgttaccgcataacggagctgctgcgccgggaatactggcggctggagataccggaaagcctggcggcagagagccgttcccggcgtgactggaaccattttctggaccgtcactaccggcgtaagtggaatgtgcgggtatcaaaggtgatggataacgccacgcatgtggcgatgtacttcgggtcttatctcaaaaaaccgccgcttgccatgagtcgtctggagcactacgccggccgtgacgacatcacctttcgctaccgcagtcaccggagcgggaaggaagagagactggtgatgagcggagacgagttcatggagcggttttcctggcatgtaccggagaagcggttccgtatggtgcgatattacggatttctgagtccgtcaaaacgtaacgagctggagaaggtatacgcgctgacagcaacggagcgcaaaacggcgcggaaagtgacatggagggggatgtaccagcgactgctgaaagtcgacccgctgaagtgcattctgtgcggaagtcagatgtgcttcagcggcctgaagcggggactcagactgccggaactgctggcctgccatgagcaactggcgcagatgaaaatttgcgggtga

SEQ ID NO: 385077 - DNA, 162 bp, Salmonella enterica
atgctgccccgcttcgccgacatttttcagcagggtaaccgctggcttaactggctccacaaacagccggaaggttcggtccgccccgtcgtcacagaagctgtgacgaaaatcatggcctgtggcaccacgctgatgggctacacctgtcagcgccaatga

SEQ ID NO: 385078 - DNA, 360 bp, Salmonella enterica
atggcccgctccgcaaaaccccgtaaacgtaaatcccttgtccgccactctgagcagccccgttatgtggtgaagctgcacgatgtcgacgacactggcgaagaggctgctgtcctgcgttttgatgaattcgacgatgccgtgaactgctgtgctgacctcagtattcccttcttcgtcgacgccggtaacaaaaaactcgtcttctggtttgtccgcactgatagctgcggccatcccgaaatcgcccgctgcacggagcgcgaatttgcttccctggccgcacatatcagtgccggagccctgtactgccccgactgcggcacagtacattaccctgaagaccccattcacgcctga

SEQ ID NO: 385079 - DNA, 300 bp, Salmonella enterica
atgagaacgttagatgaagtcattgctggccgcaccccggagagccaggcccgtataaaagaaatgagcgatgaaatggttttggaggtcggcctgcagatgatgcgtgaagagctacaactgtcacaaaaacatgtagccggggttatgggtatcagccagccagcaatcacccaactggaacagcgcgggaacgagctgaagctggcgacgctgaaacgctatattgaagctatgggagggaaactaagccttgatgttgagctgccgacgggtaaacgtgtagcgtttcatatctag

SEQ ID NO: 385080 - DNA, 351 bp, Salmonella enterica
atgtggacggtactttttagccagcgtttcgataactggctgagtgagcaggatgaagagttacaggaaaaagttctggctgatttggggaaactgaaggtttacggaccggagttacccagaccttacgccgatacaattaaaggctcccgatacaaaaacatgaaagagcttcgggtgcagcattcaggacgaccagtcagagcgttctatgcctttgaccctgtccggcgcgccatagtgttatgtgccggcgataagagtaatgacaaacggttttacgacaaactggtgcgtatcgctgaggatgagttcacggcacatctgaacaacctggagagcaaaaaatga

SEQ ID NO: 385081 - DNA, 681 bp, Salmonella enterica
atgatgtcaccttgtgatttaactgagagagagtttaaattcctgcagcaggaagctgaagacaaatatgattcccggatatcatgctatatgcttcgtcgatcacttgcagtgatatctaactatctggaaaactatcaccgggtatttgcattacgcgctgacctgagatttgctcagtcccatgtgcctggagagccagacttgccgctctgcttccagaaagatgatgagaaggccattacacgggctttggaatccctcaaaagccagttacgggaagaacacaagcgttctgacaggacggatgagcctacaccactaggctatatctgggtcagggaacgggttaccggggaacaccatcaccaccatctggttctgctgtttgacagagaggcctatgcctatctggggaattacactaaagtggatgctgataatatgggagcccggatacagaaggcctggtgcagcgcaacagggcttgattaccctgactatacgtacctcccgcatttcccgaagaaccacagcagctggttcactcgggatgatgcgttaacgttaagtgatgattattatgattttttgttacgagtcgcttacctgacgaagtacaacaccaaagacttaagtgacggttaccgtaatttcggtactagtcagattcaagattaa

SEQ ID NO: 385082 - DNA, 1527 bp, Salmonella enterica
atgaaacttacatataaaaaaattgaaaatcatgatgttaatctgaaagccacagcgattttgattttttttcagcaaatcatatttttcatttatggcaaaaccagagcgtcggttgagcttatctttgcaacgcttcaggggagcatggctctggcctgtcaggatatgtatgatgttgaaattgatgatggtgttattgttcctgtatcacattttcacatcatactggcccgctccggaagcagaaaaacaacagtatacaggctcacaatggcgcaaattttacggctggagcgtgaactggcagaggcgttttcagtcaggctgaaggaatacgaacgacaatacgtgctatgggaagaagaatgtaagagccttaagaaagcgcttcagaaagcggtgcgtcagaaagaagggatggaggaagccagatacgaactggaggaatgccttaaaaatgaacccattaagcctgcgagggtgcgtctgacagtaacggatcccacgccggaagcacttctgaaagaactgggggaataccccagtctgggtatcacttctgacgagggaagtgctctgcatgaaagcatcatgcgccgtaagacagcaatttttaacacgttgtggtgtggtgacgattatcgggtcagtcgtgtgtcaacgggcagcacagatattaaggatccccggcttggtatgctattgatgacacagccggagccacatgacagcacgctgaaatcgctgggtaacgcaacacgagctacgggaatttatgctcgtatgttaaccatggatcttacgttactcaccagactgattgatattgatgaactggtttctggcgatgagtccgatctggaaaagttttatgccatccagaaaaaacatttacttgccgggattgaacgcagaaaaaaaaatcaaccccgtatctgtatgacttttgcacctgatgcaaggaagcggttacatgatgttggcagggacgtaaagcatctgatgcagccggggaaaacactttaccattataacgactgggcagcccggtgctgcgaacataccgcgaggagtgctgctgtgatgcagttgtttatcactcctgactcaaccgttattacgctggaaacactggaagctgcgttgttaatatcggaatggtactttaaccattttattgtaaaaataaatgctgtcagagggccttcacattcagaaagagttatcgaatggcttgataatcatcttgtgaaaaatggatcttttgattttttaaaacgtgacattatgcagggcatacatcgttcgctcagaaaaaaagctgatcttgagcctgtcctggaacagcttgctgaggaaggtaaagtccagttatgggaagatgaaagtggaacgcattacgtcagataccgtgaagctaaaatgacgccctcagaactggatgcaaaacataaggcactgaaaggtataccggaatacattgggggaggcagtgctctcagctacgtccctctgagagaataa

SEQ ID NO: 385083 - DNA, 1863 bp, Salmonella enterica
atgcatacttttgcaaacctgatgtacgacgtttaccagtctttcggcttgttcaggaaaggggacaggcgagcggaaatacgtgctttcgctaacttttcagagcaccagcgttttttcggtaatcgtgattgcgaaaaatatacggaagagaaacgctatgatgaaatcattgagattctcgatgcggaaaaggtgttcagtacagatcaacgaagggaaattttttataaatatgagcaactttataatgccctgatggctcacccggtctttacagaattaagtcggaagcaaatacaaaaacgatatactctacatattctgcccaggctaatcgcacttgatatatataaaacttacaaagctgaaaatgaaaatagtttttatcaccacatacatctattcttacagaaagattattgcccttgccgggaagacagaaagaagggcacttactctgcagtaaggcagtatcttaaagaatatataaaaggtttcaaaataccccatacagaaaacctgcttcctgttttaaaagtaattgaaagcattcgcgaagaatactcacagaaaacaggggttctggatgcaccggctatcgtgtgccttgaagcatataccagtattgtgaacaaagaagaactgaaaaccatcagtgctaatctggaacagataaaaaaagcacataattcactgaacgtactccttaatcttgaacgtcattttcctgtgattaatatactgtcgaaatactacagagtgtatgtagaaaatggaataagaccccgtaacatatcggatgttttatgcagatttttatatgagccagaacatggtgacatttttcttcatgatgccatgattaactcaattgtgaattattactatgaacgcgcaataaaaccagtctcactgaatgtaaatagtgaatatttgcaaagcgtggatagagtaaaagatattgtattcaattttaatgaaaaaacgattatttctgtaactggtttaacagacatcgcagtcaggttaaaaaaagaatccgacaatgaatctcttaaaccgtaccttgatctttttatggtaatacaatcaatcagcaaaggagacacagacaaagcttatgaggtagtcaaatgtgttaatcctgataatttgcctgcaggatatctgatgtctgcatttttagttctgtacatcgcattacgtataaaaattgaaagaaaaagcatcaggaatgacgtattttcatcttatataacaaaacttctggagaatcagggtaattacacggattttatgcttgccagcccggcttacatggaaaatgacagcaataatataagcacgaattatgttactttctcagcctcaaaatttcataaaacatcaattttatcagacaccaataatattacaataatgcgtactgtaagaatgtataataatatggtcaggaggataagtagctggaatgatattgaacctgacggtgtttatcctgagtccatctatggacttcttgataaagttgagatgatcctggggaaaatattaaaaattatagatgatgaaaaaatcacctccagccaggatttagccctaatcctgcaaaagaaaagagtccttaccaaacgtgagttgaacgataacctcatcggtatactggttaactgccccctcttaaagtgcgtacaggacttagagaatttaataaagtatctccgttgcccgggagaggaaataagaagcatgatcctgtcagtaagcagaaaatcctatgatttgatttatggtgcgctaaaaattctggagaacgagggtgtgatacagacgaaaaaaacaaagaaggacagaaaataa

SEQ ID NO: 385084 - DNA, 552 bp, Salmonella enterica
atgcctctatataccaatgatgacgtaaatacgttgaaactcaaactggctgatgtcgacaaaagtcagctgattgatgccatgactgaactggctctgtcctggcctgctgtatgtgatgtgactgaatggctggtatccacgccatctgaaaacatggcccggtttgcgtcccgccttgaacagatggaagaacgggattataaatatcctcgtcacacccgcatagatgaaaatattcttatcgagttacgggcattattgagagaggtgtgttccggtgcaacatcagcaaaagaagaaatggaagggctattactcatatgtaagactgacagatttacttttgaacagtatctgcaggaacaatggtcactggaattcttttataccaatgagctggcaccatgtttgatatcctgcgcctcccggattaaagatatacagtggctgattacagtattacaggaaatgttaacagaagacagttatggtattcgggagcatgtcctttcgcctgtgttgcagggaatccagaaacatacagaataa

SEQ ID NO: 385085 - DNA, 1224 bp, Salmonella enterica
atggacaattgggttattcaggagctggattctttggaaatcggtgatgttaggcttgaaaaacgggttaagatcctcctcagtacattgagtcactctcctggcgaaagtatccctgtatcctgtcgaaaatggagtgaaacgaaggcagcttatcgttgtttttccaacgataaagtctcgtctgataaaattatggcaccccataaggaaaagataatagaaagaacccgacaatttaaacgagctttagttttacaggacaccaccgaactcaattattcaggacaaaaacagaaacagggggttggtcccagaaggcacgaggctgagcgagacttatttatccaccctcaattagtaatcagtgattcaggcctttgtctgggggtctatgatgattatcaatggttcagaaaagagttaaaaacacagaagcagagtcgaaaagaaattactaatgattcacttcataaaaagcatattagtgaaaaagaaacgggacgttggattgaaggttataataaatcaacagagctggctaaatgttgccccgacactcagataatatctgtttcagatcgtgaaggtgatatttacgacctttttgaatgtgcagagaagacaaatggggtgaaagctgactggcttgtaagaatgaaaagcgttaaaagggccacattgaatatatcaggagcaagggataaattacttctgaatgaaagagtaatgcaaattccttctcaacaaacagttgagttcatgcttccagagggacgggaacaatcatccagaaaagttcaacaggagctacgtttagccagattgacattacatccaccgacaggacggagaggaaaattacggtgttccccggtgacagttactgttctgcttgcaaaagaaataaaccctccaaacaatgtccagccattaacatggtggttaatgtgcagcataccgccagaaaaactgacggaaccagcgcaactcatccagtggtatttattacgctggcaaattgaagtgttttttaagatattaaaaagtggatgtcaggttgaaaaattacaacttgagacctttgaacggacaagaaattgtttagctttatatctgataatcgcatggcgaatactttacataagttcgttatataaagtagcaccagaagaatcaggtgatttatacccatcgtcattgaagatgcttgatttttcatga

SEQ ID NO: 385086 - DNA, 432 bp, Salmonella enterica
atgcgaacagagcacctggtccccctacccggacaggcgctggatcttctgaaacagatccacgctatcagcggtgaacacgaactggttctcacaggcgaccacaatccgtggaagcccatgagtgagaatacggttaataacgcattacgcctgatgggttacgatacaaaggttgatgtctgtggtcacggtttcagggcgatggcctgtagttcattgattgaatcaggtttgtggtcaaaagatgctgtagagcagcaaatgagccatcaggaacgtaacggtgttcgtgcggcgtatattcataaggcggagtttctggacgaacgcaggctgatgctgcaatggtgggctgattatctgaatgcgaatgcagagaaatcagtgagcccatttgactttgcaaaaatcaataacccgttgaaataa

SEQ ID NO: 385087 - DNA, 1197 bp, Salmonella enterica
atgacattaacagcaaagcaagttgaagcagccaaaccaactgaacgtgactataaattgtcggatacttcaggcttatatcttttggtcaaaaaatccggaagcaagtactggcgactgaagtatcgtttcgcgggaaaagagaaaaaattttctattggtgtttatccagatatcagtcttgctcaggcgcgatttgaacgtgacacagctcgtcgcttactcatggagggtaaagatccatcacaggaaaaacagaacaaaaagaaagaagaaaaagtacgtaatgatgaaacttttaagtctatagccgaagagtggtttattcatcaagcccctaagtggtcagagcgtcatttcctggaaaataaagcccgcataaaaaaccatgtttatccagcaataggaaatcgtccgatcaccgatattaaaccaatggaaatgcttagttgtcttcggactatcgaaaaagcaggcacactacaaacattacgcaaaacccgccagacatgtatacggattttcgcatatgctatcgtaaccgggcgggctaccaacaatccagccgattatcttgatacagttctattatcacctatttcaaccaacaaccgttcattagaggtggaaaaaatccccaaatttattaatgatatgataaataatcacaaaaatcctattatgtccttagcaacacgcctactaatgcttacagcacttcgtagtcacgaattacgctttgtaaaacgtgatgaagtcgacactagaaatgccttactggaaatcccagcaagtagaatgaaaaaacgtcgcccacatgttgtaccattatcgcgtcaagcattgaatctcattaatgccttaagtgaactgactaaagacaggaaatcaagttatctcatacctggatgccgtaatccgcaaaaagtacgcaatcgaaaatgtttcaataaatttttgcaacaaataggctggcatgaatatataaccgctcatggtttccgacatattttcagtacgatagctaatgataatggttttcatactgactggatcgaactacagctcgctcacgtcgataaaaacagcattcgtgggacgtataaccatgcgcagtatctcgatggccgcagggagatgatgcagtggtatgcggattatattgacagtctcgctggtttgtctccggaggtttaa

SEQ ID NO: 385088 - DNA, 786 bp, Salmonella enterica
atgagtgagtcattacatctgacccgtaacggcccgatcctggaaattaccctcgaccgacctaaagcgaatgccattgacgccaaaaccagctttgcaatgggtgaagcttttcttaatttccgtgacgatccggaattacgcgtagcaatcattaccggcggcggggagaaattcttttctgctggctgggacttaaaagcggcagcggaaggtgaagcgccggatgctgattttggtcccggcggctttgctggtttaaccgaaatatttgacctcgataagccagttatcgccgcggtgaacggctacgcatttggtggcggttttgagctggcgctggcggcagactttattgtctgcgccgaaaacgccagcttcgcgctgccggaagccaagctcggcatcgtgcctgacagcggcggcgtattgcgtctgcctaagctgctgccaccggctatcgtcaacgaaatggtaatgaccggcagacgaatgagcgccgaagaagcgctgcgttggggagtcgtgaaccgcgttgtcagccagagcgaactgatggagagcgcgcgcgaactggcgcaacaactggtcaatagcgctccgctggctatcgcggcgctgaaagagatttatcgcgcgaccagcgaaatgccggtagaagaaggctaccgctacatccgcagcggcgtgctgaagcattatccgtcggtactgcattcagaagatgcgctcgaaggaccgcaggcatttgccgaaaaacgcgatccggtgtggaaaggtcgttaa

SEQ ID NO: 385089 - DNA, 312 bp, Salmonella enterica
atgaaagagcgtgatatttttagcgaattgcaggaaggcatggctgcgtggggagagttcaatgttggcaaaaaaacgttgagaacgcacaaggtcagcgcaaaacccgtcaccatgacgcccgatgaagtgaaagcggtacgcgaaaaattgaagctatcacaggctgttttcgcacagtatttacataccggtgtcactaccctgcaaaactgggagcagggactggctaaacctaataaacaagccatcctgcttatgaaaatggttgagcgcaatccccatactctgaacgaactggcagcgctgtag

SEQ ID NO: 385090 - DNA, 339 bp, Salmonella enterica
atggaagctctatttgtcgagttgccgccgttcgagcggcatcgtgctgaatatctcacggatgatgagtttcgggagtttcagcagatgttgctgaaaaatccggtatgcggtgatgttatccagcataccgggggattgcgcaaggtacggtttggggatgcaaggcgtaacaaggggaagcgcggcggcatcagggtgatttactactggtatctggaaaaatcccactttctgttgttcaccctgtatgacaaagatcagaaagatgatttaacgaaagcacagcgcgatattttgcgcgaaatgcttgaacaggccagaagaagggggcgttga

SEQ ID NO: 385091 - DNA, 156 bp, Salmonella enterica
atgcgtaacgatggctttgttcagaatattcattcgcgtaacccgttcgacgttatcgccaaagcccgtgcaccagaagcgcgtgcctggcttatccagaacaaagcggagtacatggcgctgatcctcgatatcaaggtagtgaaagtcggataa

SEQ ID NO: 385092 - DNA, 300 bp, Salmonella enterica
atgaacacacagaacgtcaacgtcaaaaccgccaccaaagaatcttccgaaagatgggatgaaaaagccctggcttcccttaactcgctgcagatgtccgtcagtaatgcattgctggagtatcagcgctgccctgataaagcccggctggaaacgcagaccgtccggctgatggaccatctggaggcgaacatccggctcatcccggtggccacgccgccattgcagcaaaaagtggatgaaatagcacagatgctgcatctgatggcgcactttgccggtactgaactcaggaagtga

SEQ ID NO: 385093 - DNA, 216 bp, Salmonella enterica
atgtctcaacaacaccagtatggcctcttaccgtgcaatttgcaaggaggagtaaaccatgaaactgccgcgaaattcccttatctggtgcgtattaatcgtgtgtttaacgctgttaatattcacctgtcttacccggtcgcgcctgtgcgagatcaggttaaaggacggaaacagggaggtcgcagcaagcctggcttacgaatccaacggtaa

SEQ ID NO: 385094 - DNA, 2052 bp, Salmonella enterica
atgtcagtagcagagtctaaagcaaaacgcgctggaaaaaccagccgtaaggcgaaaaacgccgcaaacgccgcaaacgtcgtcagtgacaccgtgttatcagcggtgctggcgcagacggaagaacagcacgtaccgctgtccgccctggtcaaatccccgatgaacgtgcgtatagtgccgtattccgcagaaagcgtccgcgaactggcggactcaattaaaggcatcgggcttcttcagaatctggttgttcacgcactccctgatggcctgtatggcgttgccgctggcggtcgccgtctggctgcaatgaatctgctggtcacggagagcaccttcaccccggactggcctgtccgtgtgaaggtggtgccggaggacctcgcgaccgccgcttcactgaccgaaaacgggcagcatctggaaatgcaccctgccgaacagattgcaggattccgcgcgatggcagcggaaggcaagactcccgcgcagactggcgacctgctgggctattcaccccgccacgtacagcggatgctgaaactcgcagggctggctccggttatcctggaagcgctggcggcggacaaaatcaccacggagcactgtcaggcgctggcgctggaagataatcctgagcgtcaggtgcaggtgtatgaagctgcctgtcgtgagagctggaacaataaaccggaagtgcgtgtgatccgcaacctgatcaccgacagtcaggtttccacactcaacaacagcaagtacgaatttgtcggggaaaacgcattctcagcggatgaggttcgtgcggatctgttcagcgaggagcagggcggttttgtggacagactggcgctggatacggccctgctggaaaaactccaggtcgttgcggagtgcctgaaagaggccgagggctgggcgtggtgcgcgggacgtatggagcctgtcagccgctatggcgaggatgccacggtgtaccgcattcaggacgagcctgatgcggtttacacggagcaggaacagcagtgcctggatgaattacaggaactgtacgacgaaaaccagaccgccagcgatgaaaccgacgcgatggaatcggagatggaggccatcgaatgtgcggcacaactccgggcatggacgccggaaatgcgcgcggaaagtggcgtggtggtgtcatggcgtcagggtgacgtttatgtccagcgcggagtgatgctgcgtgagcaatctgaaacggaagatgaacccgccacggtgccgacatatgagcgccagccggagcctgtggatgaaatcagcgtaccgctgctgaccagaatgtgctcggaacgcacactggcagtccaggcggcactgatgcagcagccggaaaaatccgtggccctgctggcatggacgctgtgcctgaacgtgttcggcagcggcgcgtataaccgacccgcacaaatctccctggactgtaaacactattccctgacaaaggatgcgccgtccggtgagagcggtgtcgcgtttgtgacgctgtcgcaggagggaaaacgtctggaagcgctgctgccggagggctggggacgggacttcactacttttttcaccctcagcgccacagatcttaccgccctgctcagtttctgtaccgcatgcagcctgaacgggatgcagacacgcggaaccggaggcactacccgcagcccgctcgattcgctggaaacgtcccttgctttccacctgcgcgactggtggcagccgactaaagagaacttcttcggcagccttaaaaggccacaaatcatcgccgcactgaacgaggccggactgacaggtgcggcgcgggacgcggagaaaatgaagaaaggcgatgcggctgaacgggcagaagacctgatgcggaataaccgctgggttcctgtctggatgcgcgcccctgatgcagaaaaatccccgtctgatgcagagaacgacgtatctgataccgaaaacggcggtgctgatgcacacgatgcggcttttgatgcagacagccaccacaccctgcctgatgtagcctga

SEQ ID NO: 385095 - DNA, 246 bp, Salmonella enterica
atggtgacagacaactccacctccccactgaaatccctgtctgacgggactttcacccgcgaacaggccgaagcggtggttgcacagtatgaaaatgttgcgattgaagacgatcagggaacgcactttcgcctggtggttcgtcagaacggagatatggtctggcgcacgtggaattttgaacccggtggcgagtacctgctcaaccgttatatccgggactatggcatccgtaaaacgcagtaa

SEQ ID NO: 385096 - DNA, 573 bp, Salmonella enterica
atgtcagtacgcggaattaacaaagtcattctgattggcaatctggggcaggaccctgacgttcgttacatgcccaacgggggcgcggtggcgaatttcagtctcgccacctccgaaacatggcgcagcaaacagaccggagagatgaaagaactgaccgagtggcaccgtgttgttgtgttcggaaaactcgccgaaatcgcgggtgagtacctgcgtaaaggctcacaggtctatatcgaggggcaactgcgcacccgtagctgggacgacaacaacggcattacccgctacgtcacagaaattgtggtcagcatgcagggcaccatgcagatgctgggaaaccgtcaggcgcagaattccggtgactggtcacagcagcagccgcagggaaaccagccgtcaggcggtcagcccgcatcaccacaggtggcaaaacctgccgctgccgccgcgaaaaaaggacgcggaaagggcaaaagcaagcagactcagaccccgtcagcacctgtaacgtcgatgccggacccgtctgaaccgccctatgacttcgaagatgagagaccttactag

SEQ ID NO: 385097 - DNA, 165 bp, Salmonella enterica
atgtacgcacctcttaaagaaatcataaccagtctcctgaagcatgacatggcgtctgatgaggcgttgctggttctgtgtattactcgtgcggacacgctgttctggattcgcagtgagttacgccccgcgcggcctgtggcttacgccgtgcctctactgtag

SEQ ID NO: 385098 - DNA, 435 bp, Salmonella enterica
atgcagtattcaaatcagcagtgtgcgcgtgttattcacgttgaagagtcagaccgactgtcttttctgccgtacctgtttggcgacgatttcatgattgcagaaatgcatgtgtacgcgctggccagcaaaatgattaccggatacgagggcggattctggcactttatccgcctgccggatggcggcggatacatgatgccggactgcgggcctgtacatctggttaacagtgaaaactggttcgaccgtactgtaagtgccgacgcagccggaattatcctgacgtctctctcgattaaccgccgtatgtggacacatcacgagtgcggtaataccgcgctgacgcgcctgtttcagatgcgtgacgctcagttgtggagccacatcgaatttcaccccgaatgcaacgccatttacgccgcgctcgactga

SEQ ID NO: 385099 - DNA, 768 bp, Salmonella enterica
atgaataacgatacccttaacgccctcattctgcgccacggtgacaatctgctgcgccggtccggctggcccgactcaattgatatgacacccgtcgcgcccgataccgtacccggctggctggtcgcctgcggctctctcagcggcgaggaaatcctgacgctgacagagcaactttgccagccgctgacgtatggccgggcagcgctgctgacagccagcgcccggcgcctcgccgggacacccgcgcggttacatctgtatccggtccagcgtttcccgcacccggagcggctggctgactgtcaggttatccggctgccttatgcgcaggagtggctgacagcggcggaatgtgacgacctgctggccttcctgaaagatttcattgaccggatatgtgacatcgttcgccaggacacgcagcgcatcgcggcggcactggtgccatctgccgcgccgcgactgatggaaaaacgtttcggagactggcgactggtggcggacgaatatgaccacgaaaactggctggacagtgaggacggggaacggctggatcaggtgctggacggggtactggtccgggatgcgcggttttgtccggtcctgctcaccctggtgaatgagtcccgggaagaaatcgaagctgccggggtgatgaccgatcttctgcgtttcccgggggaaccggtccgacgctggtttgaccgccgcgtgctgcgggatgtgctgaacgaggtccgcaacactgaccccacaggggattag

SEQ ID NO: 385100 - DNA, 420 bp, Salmonella enterica
atgtacggaacctgtgaaaacctctgccggcagttgagtgagcaatatcccgctgaaaccccgctgaccctgattgtctggtccccggcggatatcgaagggctggctgacggaatggaatgtaccgtttctgaccaggacataaaggcggtactggcgcgtatagatgccataccggaagaccagcggcttgattttggtgtgccttcttgtggggtgatggatctgattgatcaggtgaaacgggccaccccggcggtgatggtgccggctgacctgcttgaaaccctgctgacgaccgccgaacaggcattgtggagtcgggagtgggccgcccgggatgataaccatccggtgccggaaagtgttacccgccgcctggctgatgcggcgaaagtccgcgcgctactgaaaaactaa

SEQ ID NO: 385101 - DNA, 939 bp, Salmonella enterica
atgccaaactggtgtgccaaccgcctgatgttcagcggtatcagacagggcaatgacgccctgaaaacgtggattgccggagggcagccgtctctgcatctccgcgccagaaaagaggggatacatctgtttctggcgggctgtgcgggcatactgcgccccctgacagagcagaattacgcgccatacccgcagctggtttcttacggggcggccgcagacaaccggccttcagtgcaggcatacagcgactggctggcaatgtttatggccggagctgtgctggatgtggaaacctgccagactctgcatcagtgctggctggacagccatatcgggcatgcccgctgggccaccctcagtgaaccggaacaggtggttatccgtcagctgtaccagcaaaaatctttcgactggggggacagtttccggcctgcgccggtggaggcgtggtgggacggtctgtgcgacggggagagcatcatacctgctgccgaaccgatggatttccgcgacgtgctgccgacgcgtctggatattgaggtgaacgccttcaatggtggcctgctgacgggtatcccgtcgtcatatgaccactatctgaagcagtacggctgcaagtggccggtcggttatgaggcaaatatctgttttgccggagagaacacactgacggtggactttgacaccccctggagtccggttggcgaggacgttgtggctgcactcagtgagcggtatggcggggaggtggagcactggtttgcggagcagggctgtgattactgcggttatgcccggtacgttaacggtgaaacggacgtgtacatcactgacgagctggagtggggggaggctgacccggacgatgaggacagcttcccggatgtgaccggcccggaatggattatcaacaacgtggcgcactttggcggctga

SEQ ID NO: 385102 - DNA, 324 bp, Salmonella enterica
atggaaaagcgcccgtcccgtgacagaccggacgcggcacactggcagcgggtggctgatttatcctcccgcgccgcccggcgggcgcggaaaaaaagcggagcaggaacggcgacggcctttgtgactttaatccacagaaaggttgcatatcttccggataagcctgtggataacagcgctggtccggacatggtccccgccagcaatgacgaccggaggcaaaccccgggaatgcacaaaaaacgaccaaatgcagagttgacgaaaaacagagatgtgtttacgatactgtttatttatccagtaaagaggaaagaataa

SEQ ID NO: 385103 - DNA, 249 bp, Salmonella enterica
atgctcagaattgaaattctcttcgaccgggaaacaaccaaaaacatgaaggccggtaccctgcaggccctgcgtggcgaaattgagcgccgtctgtctgccgcacatccggaaatctggcttcgcatcgacaaaagttcacagacatcactggtggtgtcaggaacgcggaacgatcgcgaaaaagagaatgtgatggaaactctggaggctatctggcaggacgacaactggttgccggcagcatga

SEQ ID NO: 385104 - DNA, 1299 bp, Salmonella enterica
atgattgtccattcaaaggctgcaaccattgtccgtgtcacatcgggcaattttctggagcagtttgatttttttctttttggtttttacgccacttacatcgctcatacgttcttcccggcagaaagcgaatttgcgtcactgatgatgacctttgccgtttttggcgctggttttttaatgcgtccttttggtgccgtaatgttgggagcatggatcgataaagtggggagacgtaagggactgatcgttacgctgtcaatcatggcgctcggcacgtttactattgttctggttcccggatatgaaaccattggtctctgggcgccggttctggtgttgtgcggtcgcctgttacagggattttctgctggcgccgaactgggtggcgtttcggtttatctggcagaaatcgccacgccgggacgcagggggttctatacaagctggcagtcaggaagccagcaggtttccattatgatcgcagccttactgggctttattctcaacgagttaatgggccctgaaactcttcttcgctggggctggcgcatcccgttcatcgtgggctgtctgattgttccgttcatttttattctccgcagaaatctgactgaaacagaagaatattcgaaacgtgatcatcatctgccactggctcaggtaattaaaaccctgttcgtgaactggcgggtcgtggttgccgggatgctgatggtggcgatgaccaccacggctttttatctgataaccgtctatgctcccacgtttggtaaaaaagtcctgttactgagtgcttcagacagtttactggtaacacttctggtagccgtttctaatttcatctggctaccggtcggtggcgcaatttcagatcgctttggtcgtaaacccgtactgatcgcgatgacgctgctggcgattttcacctcctggcctgctctcactgtcctgacacagtctccgggtttcggcatgatgctggcggtattactgtggctctcgtttatctatggtttgtataacggggcgatgatcccggcattaactgaaattatgccggttgaggtccgggtggctggtttttcgctggcctacagtctggcaaccgcgatttttggtggtttcaccccggccatttctaccgccctgatccggtataccggcgataaagcagcaccgggctactggatgagtttcgcagccatttgtgcattgcttgccacaatttatctttatcaccgggtatcccaccacaccacaggaaaactcatcagtcagtctgtcaggggaacataa

SEQ ID NO: 385105 - DNA, 789 bp, Salmonella enterica
atgaaacgattaatcaacttattgatacttttactggcatgtaactgcagcgtggcggtaaatgcggaggacatcacagtgatgatctccggcggattctctgctgcacttgataaactggcaccgcattatgaagcgcaaaccggtgacatcattcatatcattcatggtccttcgatgggaaactctcccgagtccatacctcaccggctggctgccggacaaaaagctgatgtggttatcatggtgggatatgcactggacaaactgcagcaggcaggaaaaatttcccccggaagcaggactgaactggcagactcacggattggcatggttgtgcgttcaggtgcaacagtgccggatatcagcaatgttgctgcactgaaggccacgctgctgaaggctaaatctgtcgcatattctgacagcgccagtggacgctatgtgcagtctgagttattccgtaagctgggtattgagaacgcactccataataagctggacatgattgaaaaaacccccgttgctcaggtggtagccagaggtgatgatgaggtcggttttcaacaggtcagtgaattactgccggtaaaaggtgtggagtttgtcggaaagatcccggaacaggttcagtatgtcacgcgtttttccggagcgatcgttgccggctcagtacatcagaaacatgctcaccagttgttgcgctatttagcgtcgccggaaacgcaacccgttgtgcgtgaaaccggtctggactcgctggacattaaggcagaaacagcccggtga

SEQ ID NO: 385106 - DNA, 891 bp, Salmonella enterica
gtgcttaatattgatttgcaggatctctacgctttcacagcattatgtgaatatggcagcttccgccatgctgcggactctgtctgtatctcgcagtctgcactgagccggcgtatcgaaaagcttgaatctgctctcggagtacgattattcaacagaaccacccgcagcgtcaggctgacacaggccggaagaacgtttgccccccgcgtcagactgctgctgaatgacatggaagatgccgttaacggcgtcagtgataaactgttttccgacagtggtatcgtcacagttgcctgcattccttccgcagcccgttattttatgcccggagtcatcgcccgtttccggcgtcgcttttccgcagcccgtatcagactggtggataccagcgccggtaatgtttattcctcagttcataacagggaggcggattttggactcagctttatttccagcggtgagtctgatctgaattttataccgcttgttgatgaaacttatcagctcatctgcaggcaggaacatccttttgcacaacgcccctttctgggctggaaagagttttttaactctgactatatctggctgaataaatcatccggcaaccgtcatttactcgatcaggcgctgggaggaattacactccgccggacacctgtatgcgaaacgcagcatgtcaccaccatgaccggaatggtggaagccgggcttggtatcgctgccgttccttcgatgatatttccgggtatccaccctgcactggttaaaataaacctggtggagcccgtggtaaaaaggcaggtggggttaatcaggaaaacgggctcagatctctccccccttgcgagcgaactggaaaaaattatcaccgggctgtttctgccttaa

SEQ ID NO: 385107 - DNA, 327 bp, Salmonella enterica
atgcgggtcagcgaacaggtgcttctcagtgtgctccgcaatggcggctgtatccgcagcttctggcgacgttctgcccgtctcgccggcacccccgcccccggtgtgccggatggtctggtgctggaaaccccgggagagtcaggcgacacgccgctctctcatgtggattttgcggtggtggcgaaaagcctggtctgtgcggagacctggacgcaggtggccggctgcaccgagttcggcggcgccgtctggcgtctggctcaggaagatcatatgaccgccgggcaccccgttcagggggacggaggccgggatgaaccgtga

SEQ ID NO: 385108 - DNA, 306 bp, Salmonella enterica
atgcagtttaaggtttacgcctgtaaaagggagagtcgttatcatctgttcgtggatgtgcagagcgacatcattaatatccccggtcgccgcatggtgatcccgctggccagcgcccgtctgctgtcggacagggttccccgtgatctttgcccggtggtggatatcggcgacgacagttaccgcctgatgaccccggatatggccagtgtgccggcctcagtcaccggagacgaagtggccgatctcagtcaccgggagaacgacatccagaacgccatcagtctgatgttccggggagtctga

SEQ ID NO: 385109 - DNA, 621 bp, Salmonella enterica
atgagcaaactgccttcccccgacacggtccgtcgcatcgaggacgccgctgcggcgctcatcgcggccggcaccccgaacccgaccaacgtccaggtgcgcgaccacctcggcggcggctctctggccaccatttccccggtgatgcgcgcgttccgcgcccgccagcgcgggcaggcccgggaagaaaccattccgttaccgccggagctgcagcagttgctcaccggccagctgaccctgctgtggcaggcggccgtccggcaggcggacgccgggacgctggcctcgcgggagcaggccgacgccgatattgaacaggccgacctggagcgcgacgccgcgctggcccgggtggctgagctggaaagcgggctggcggtgctgcgggaggttcaggcggagcgtgaccgcctgctgctgcaggagcaggggctgcgggagcacatgatcacgctgcgcgaggaggtggtgcgccagcagacgaagaacgagcacctgagcgcacaactgcaggagagccgggaggaggtgaaaaccctgcgggccggtgaaaaggcgctgcagcaggaactgctgctcctggcgcgcggcggagcagaagacgaaaataaaacctga

SEQ ID NO: 385110 - DNA, 1071 bp, Salmonella enterica
gtgaaagcaatggtttattatggcgagcatgatatccgttttgaggagcgcgcaaagccacaacttcttcattcaggagatgtcatcatccggatgacaaaaacgacaatctgcgggacagacctgggtatacttaaaggaaaaaatccagaaatacaggaaactgcgctgaaaaaatctggcagttttaacggacgtattcttgggcatgaaggtattggaattatagaagaaaccggttcttctgtatctaattttaaaaaaggtgataaagttattatttcctgcataagccggtgtggaacctgtgaaaactgtcagaaacaactgtattcccactgccagaatggagggggctggatcatgggatatatgattgacggaactcaggctgaatatgtccgggttccttatgctgataactcattatatttattgccgaaaaaccttagcgaagatacaggcgttttgttatctgatgcattaccaacaggacatgaaataggggttttaaatggagaaatcaaacccggtgatactgtcgccattgtcggggctggtcctgtcgggatgagttgcctgttaacttctcagctttattcaccttctgtcattataatgatagatatggacgataaccggttagcgatggccaaagaaatgggtgcaaactatacaataaactcaggtaaagaggatgccattactaaagtgatggagctgaccagccagcggggtgttgactgtgctgtcgaggccgttggaatagagccagcctggaacatttgccagaatattattaaggaaggggggcatctggctaatgttggtgttcacggaaaatctgttaatttttcagttgaaaagttatggattaaaaacctgacaatcactacaggtttagtcaatgcaaatacaaccggaatgcttatgaaaaattgctgctcaggaaaacttacagcaggaaaactgataacgcatcatttcagattcagtgaaattgaaaaagcgtatgatgtttttaagcatgcagccagtgaaaaagcgatgaaggtgatcattgaattttaa

SEQ ID NO: 385111 - DNA, 1500 bp, Salmonella enterica
atgcacaatgaaattcaggcgatccatttccagcaaaagcacaaacgaaaacaagttaataatatagcaatgatcaccttctggagtcagtttgcttcttatacactgaataccgttttaatcctctacctcactatgccacttattcagaacggactcgggatgtcgcaggttcaggcttatgctttcatcggtgtcagccaggctatgggatacctgatgccgatgatgggtggatttatggctgataatatcctagggttaagacgttccattctgacaggctcattattactggcagtcgcttatctgctggtcatgtccggaggtgttgtcgttcatatctggggacacattgcatttattgccgcttacgctctgatcccggtgactaactcattactgatgggaacggcttctgctctggtgtcgaaaatatataaacaggatgaagggaaagccaaaggaggcatgactctttattacatgtcaataaatgtgggggctttacttgcaacgatcatttcgccttccctgatccattccagatatggaccactgtctgtttttgccgttgtttttatcgggaaagcattatcggcattaaattttgcttataagtacagattatatgaggatgttgcggaagccattgacaaatcccgcatggatttaaacaagtggataaaactcacggcttatatagtaacagtttatatttttacgctttttgcatatcttactccccagatatccagttatattattggtgcaggttgtattggtggtgttcttatatttttattgcgtacactgaccctgaaaggaacggagcgcacaaaacaactggtggctgtaatactcattgttgtcgcgatactgttttttgttatgtataatcagatgaatacaacgatggtgttatttgcccagaataattcagatctaaaactattgggaataacggtatcaccggcgtcgtatcagatgattaatccactttcaatcctgttattaggttttgtgttaccaaaattttataaccgtttcaaaaatttcacgataccttatcagttttcgacagtcattattctttccggtgcaggtatgttagtattgtggctggcatgtatgtattccacacggggaattattaatggaaactatcttattttaacatattttatcataacaatatctgagctttttgtcagtgcgttagggctgagtatgattggtatttactgttcagaacgaatggtggcattcgcaatgggcgcattttatctggcttcggcgctgtcaaatatcataacaggacagcttggtaagatagttgccctgcctgtcggacacactaaccctctgacatctcttcctgtatggcaaagttattatttaggtattggggtcattgctatttttattggtttaatattattgatgggggcagtattgttatccggtatgatgagacacagaggtattcatctggcttaa

SEQ ID NO: 385112 - DNA, 666 bp, Salmonella enterica
ttgcactatcccgtcgacgttattgctcagtgtgtccgctggtatctggcttactcactgagtctgcgtgatctcgaagagatgatggcggaacgtggtcttcatgttgaccactccacgcttcaccgctgggttatccgtctggtaccattgttggatactgtgtttcatcggcataaacgggcggtaggtcgtcgatggcgaatggatgaaacctacatcaaaattaaaggccagtggaagtatctgtatcgcgcggtcgatacagcagggcacaccatcgactttttgctgaccgccagacgggactctgctgccgccttacgcttcttttgcaaggcgattcgccatcacggcgaaccggaaatggtcactatcgataaaagtggcgccaacaccgcagcgttggccacactcaacgccggcaaacccgatgaggaaacgattaccatcaggcaaagcaagtatctgaacaacctggttgagcaagatcatcgaaatatcaaacgtcgaatacgcccgatgctgggatttaaatcgtttcgccgggcacagaccattctggccggcattgaattgctccacatgatacgcaaaggacaatatcaacatccggcaggtgatggaatgtcacctgcggaacagttttatttactggtagcctga

SEQ ID NO: 385113 - DNA, 951 bp, Salmonella enterica
atgaagaagaaacccggtacacccacaccccatgacgcaacatttcgccagttcctggcgaaccccgatgtggcccgtgacttcatgacattacatctgccggcagaattacaggcactgtgcgatttgaatacgctgaagctggagtccggtaccttcgttgaggatgacttacggcagtacgccagcgacattctctggagcatgaaaaccaccaccggcgatgacggatacatccatctgcttctggaacaccagagttcggcggataaaaacatggcctttcgccagctccgctatgctgtcgccgccatgcagcgtcatcttgaagcggggcataaaaaactgccgcttgtcatcccggtactgttctaccacggcagccggagtccgtacccgtactccaccaggtggctggactgcttcagcaatccggagcaggccggaaaggtctacaccaggggcttcccgctggttgatgtcaccgtcatcgatgatgatgagataatgcaccaccgccggatggctgccctgaccctgctgatgaaacatatccgccagcgggacatgatggaactgctggacagactgccacgggtgatggtggaatggatttcacccgaacaggtgcgcgttctgataaactacatggtaaatgcaggcgaagcgcctgctcctgaatttatgcgggcgctggcacagcgtctgccgcaacacgaggatgaactgatgaccatcgcacaacagcttgaacagattggcatcgagaagggcctgaagcagggaattcagcagggtatccagctcggagaagagcggggtattgaaaaaggccgtaatgaaggcaagctggaagttgcccgcaccatgctgcagaacggcattgatcgcaataccgtcatgaaaatgactggtctgtctgaagacgacctggcgcagatccgccattaa

SEQ ID NO: 385114 - DNA, 234 bp, Salmonella enterica
gtggcgctcagtgcgggtgtgaacggcatttatctctcacgggtcaacctcgatgccgcttttgacgacaatggccgacagataaatccgctgatggcccgtctgacggggagcatagccgggatgatgaaggtgtttgaacgctgtggctggcaggctgagcctgcaggggatgtctccctgccccaccagtttactctgatggccagacagggagtgtcagaaaaggattaa

SEQ ID NO: 385115 - DNA, 237 bp, Salmonella enterica
gtgacgttgacagaaaaatcaggccatctggcgtggtgtgccctggtggcacttgcgcaggccaggcaggatagtggcgttctctcgccggcacaggaaaatctctttcttacccgctggctggcgaccgcactgaagcaacgccggttttcgcgcgaggtaacgccggacatcgagtggccgctgaacgtcgggaatggtccggccggaatgctgtggcgctcagtgcgggtgtga

SEQ ID NO: 385116 - DNA, 495 bp, Salmonella enterica
atgccgcaggatgaatccgccgtcgacatcgaacgggccagggaatactttttccggcaccacaggtatacagaggaagacctggaatccgactaccaggcagagctgcgtaaatacagggatgacacctgggaagcaccgcaacgggcggccagactcagtgcggccgtcaagcgctacaaaacgtatgagatgttgtacttcttcttccagatcgctgatgaggccgggctggacttcactccgctggttgtaaagcgcctgtgcgctcatcttttcgacagacagggcagccaggctgttattgttgatatctttggccagaagggacgcatgcaccgcagccatgacagcgctcctgacattattgcggcagtggctgaacagtaccggcagcaggcagataaccactggcagaatgtcctgaagaacatcgaaagagtgaaacaggactaccgaaaaaatcagaacaggcagcaggctgaggaagattaa

SEQ ID NO: 385117 - DNA, 525 bp, Salmonella enterica
atgaacgatagtaaaaaaaacaacagcgtaacaatatatatgttctgcatactattacttggaataaccccaatattaatattgttttattgctatttaaaaaaccctgatacatatttttttcatactattttaacctatacagattctttcccagaaataacctcatccaaaaacccaacaataagtaaaattatatcattatatataaaaacagcacctttcattgcttttatatcttttttaaagatatataaagacgtatcaataagaaaagataactctaccgttaaattattaacaagccttattttatatataattttttacaccactaccatttttttatttttatttcacaatcatgaattaaccacatcagggaaactacttagaattatgtctcaaaatgattactttttattgttttttttcattagtttgtatgcctccatttatattttatcatttatgttactttggtttttagttggctcatataaagtaattaaggagaggatataa

SEQ ID NO: 385118 - DNA, 1311 bp, Salmonella enterica
atgagtggcggagatggacgtggtccaggtaatacagggttaggtcataatggtggtaaacccagtggtaatgttcacggttcttccggaacaggcgggcattcaggggggagaggtggccgtcacggaggtggtatgcgcgccccgacggcatcagaagttgcagggcagttcaatagtaacggtggcacgcagatatctgcatcacaggtgtcaaatatacgtagtgatggaaatgggggatattccgctaatatcaaaggccaaactcataccgtttcatatggcggtgaaagtcatacatccaatacagttggtggtttttctggtgtccccacatctggtcatagcaacggaaatcataacagtggctcaggtggtggtaagggggggaatagttccactgataatggtaaaggaaaaacaaccaccaccccgggatggagttcagactccgggaaaccaggtagctatttaccgacaaagaaagataagttaattaagggatttattaaatcaatagatgaccattcgtcaaatggaaccggatcctacaccatccattataccggtggcgctgtagctacggtaaccgtaccaaatgatgatgtgaataatatgaccgttcattatcttgttgggtatggacctgtatcagggaacaaattaacccgtgatacgattaaaagctttattgactataaggctgagaaaaatgagagtgatttgttagaaaaaaccagtgaactgatagttactatgggagataaggttggtgaatacctgggggttaaatataagacgttagcaaaagaaattgctgaagaaattaaaaactttcagggcaggaccattcgcagttatggtgatgcaatggcttcactaaatgaaattttatctaatcctggaatgaaagttaacaaaggtgataaggatgctcttgttaatgcctggaggcagattaatgctcaggatatcgctaacaaatttggtaatatcagtaaggcatttaaggttgctgattttgttatgaaggttgagaaagtccgggaaaaaagcattgaaggttatgacacagggaactggggaccgctgatgctggaggttgagtcttgggtattaagtggcttgactgctagtgtagctataagcttatttagtgaagttgtgtctacattccttgttgctagctcccttcctgctaccgcactagtgatagcaggaataatgactatttcgtatctatcatcatttattgatgctaatgtagcagataaactaaatagagaaattattcctctcgttcattaa

SEQ ID NO: 385119 - DNA, 405 bp, Salmonella enterica
atggctagagatttaaatatttttattagtcattcgtgggggagtcacgacgaattactacgactgcgtaaccttctaaatgcaagaccctattttagggctgaattctctgaagttagcaaagatatacctattaattcagtgaatgctgattacatcaaaagagttcttggagaaaaaattcgcaacagtaatgtattacttgctatagctggaatctatgcaagccatagtacttggatggagtgggagatggacaccgcaattagacatggagttcccgttattggtgttattcctcatggtgcatcaagagtatctcaggttgtagctaatcgttctgtcgaacaggttcggtggagcacagaaagtattgttgatgctattcgtcgacgtgccaaataa

SEQ ID NO: 385120 - DNA, 864 bp, Salmonella enterica
atgaatattcaataccctcatctatatgaaatcactaatgagcgctcagcaaaaaatcagtggtattttttaaatggagtgagagcagaatatgcattactaatattcactgctgttaactcatctttatcttacgatgggaaatacattactaatttagcattattcatcttattgattatattgctactagttaggaatgttataaattttgaacaaaaatggtataaatatagagcggttaccgaatcaataaaaaccacaacatggaaatttgcaatgaaagcggagccttttaatggcgatgaagaaacacataatgcaaaacaatatgttgaatacttaaaaaatatcttaaaagatagtaaatatgcgattcagacaaaagcgctaaataatcttgaaggagaccaatttagcatttgtttaaaaactattagaaaaatgagctatgaacaaagaagagatctttacgtagaacaaagaattgaagatcaacggacatggtatgctaaaaaatctctattcaacaaaaggattggtaaggggtgggcggtggctatactgattctctatgttttatcccttgctatgacagcataccttgctaaagaaccaagtcaatctacctcgttaccaacagagctaattacaacaataatttctgctctcataggctgggtgcaaattaaaaagtataatgaactttcggcatcgtatgcccttacagcacatgaaattggtctaataaaagagcaatcttattatatttctagcgaaaaagattttttagattttattcgtgatgctgagacagcattttcacgggaacatacacaatggcaagcgagacgaattgtataa

SEQ ID NO: 385121 - DNA, 558 bp, Salmonella enterica
atggcgttactgggctatgccagggtatcaaccagtcaccagaagctgacgctccaggtggctgaactgaaaagtgccggtgtgcgtgaagaccggatttttaccgacatgatgaccggggccactgacgagcgtgaaggactgcaacgactgcttggccgtgctgaaaaagatgacatcatcatctgtaccaaaatggaccgcctcggacgcaatacggctgatatgatccatatcgttgacgcctgctataaaaaggggatctccatccggtttctggaaaacggcctcagtacggaaggtacgatggggaaaatggtcattcagatcctggccgctgttgctgaagcagagcgcgagcgcattctggagcgaaccaatgacggacggattgctgcaatggcttctggcgtcaaatttggacgaaagccacaccctaaaacgacaactgcacaatttcttataaaacaaggtgaatcattcaaaatgatatatgaaaaaacaggaatatctcgggcaacatattttagattgaaaaaacaaacacaatccgcataa

SEQ ID NO: 385122 - DNA, 3030 bp, Salmonella enterica
atgcagaagcataagaaaagaattagtatcttaacaaaaaatgaaataaatgaattatatcaggcaccatcttttaatcctgttgagagagcagagtttttttcattagatatctctcttaaaaaagaaattgataaaataatcaaaatagaaagcagggtatacttaatattgattatagggtatttcagatataaacctgtgattcctgagtttacatcaaaaaacgtaaaaggggatgtgaaatatattatccaaacgtattataaaactgaaaatacgaatctcaatttaaaaatacctaaaagcacgaagtatcgccttattaaacagatgctttatgtacttgaatttgagcaactcacaccatccattaaaagtgagttaagcgaacgtctgaatgatgttgctaccatatgtatggagccaaaatatatttttgatgaattacttgcttttttagggcaaagacgtatagcacttcccggatacagcactgtccagaaactagtttcagaggctttaaactttgaaaggaaaagaacagttaatattttgtcaaaaagaattagccctgccacagcacaacaaattacttctattctccatgatgaaggaagcttaaatgctatcagaggatataatggcggcgcgagagacttctcagtatcagaaatagaaatcgaattaaactcacataatgtgataagtagcgtttattatgaaataaaagacaccattaattcattaggcatatctcagggaaacatggagtactatgctaccatagtaaaacatagcacaacattcagacttaagcgccaccctaaatggcaagggatactttatttatgctgttatttgtacttcagatatcgggagataaatgacaagataatttcagctttccgatatctggttaaaaaacacaaagaagcttctgttttgtccgcgaaagctcgggcaactgaggagatagttctaataaataaaaagcttaagtttgcgagtgaggtatttaacttcttcattgatggaagtattgatgacagcataccctttggtgaagttcgcaaaaaagtatttgcgcttatatcgaaggatgatatgcatcttgtgagtgagttttttgataaaaataaaatcgatgtaattgaatatcaatggcagtatattgacagtaatcaccttaagatcgccaattcaatcagaaaactttttttggctatagatatagtatatgacaacgagaagtcagttattggacagcagattgatgctaccagggatgatctaaaaggcaaaggaaagctggaagctaaagatcagaggataatccgtccatccgagaaaaattacattgtaaaggaaggagaaattaacgctcaacgattcgagtttcatatgtacagcagaatatctaaccatctggaaaacggcgtcttttacgcttcagagagtgaacaaaacaagcgactggaagacgacctgatagagcgcggttactgggctgagaataaatcgactttgatagagaagaccgggcttgagcgactaattacaccaataactcagactcttggctatctggaaaatatctttaacgaaaaactggaacgtataactattggcataaactcagatgctaatgagtttgtaaaaaaacagccacagtcaaacagattacagtggagcctagccagtaaaaaatggaagaccagtattgacaatccgatttacaatcaaataaaaaatatcggaatagttgatgtaatgaagtatgtaaacaatgaaacaaattttttgtctgtgtttaatgccgtatcatccagaaaaaataatctggaagctgactataatgatcttcttgcctgtatatttggtaacggagcaaactatggtgttcatagaatggcgtcagcatcagaccgaagtataggtatattacgagatgtaaatgacaaattcattcgtcccgatacaactggaatagctaacacggtagtatctgatgcgattgcaaacctttcggtgtataaatactggacaataaatgaagaatctccatttggaagtgttgatggtcaaaagcacacttgcagaataaatacattcaaagcacgtttttctgccaagtacttcagaaaaggaaaaggcgtttccgcgatgacactggtatctaatcatgtgccattggcaacagtagttatttctccaaatgagtatgagggacattttgcatttgacctgttatataataacaccagtgaaatacatccaaagtcattagctactgataatcatggtatcaataacgtaaatttcgcgatacttgatatatttggttatcaattttcaccacgttatgcaaaattcaaaaaagtatttaatgaaatgtttgaggttatactggaggatgagcaacttattatcagacttaaaaagcaatttaatatcaagctcatagtacaggaatgggaaaacatacagcatataatttgctctttaagccgtaaaacaaccgttcaaagtacggtgattaagaaattatctaattcaaagcgtagtggaaagacattagcagcgctcagggagtatgaccgaattataagatgcatctatgttcttgactatgctgacaataaaactttaaggcaatttgttcagcaagccctgaacagaggcgaggcttaccatcaactgagaagagcaatcgcatcagtcaacggaaatcagttccgtggaggcagcgattatcagatagatcaatggaatgattgtgccagactgatagctaattgtgtaatctattataattcagcaatattatcaggactggtcgagaaatttgaaaaagaaaataataaaaaagcgatagacgttctggctaatttatccccagtagcatggagacacattctccttggagggaactattctttcgaagatcaagttgcgatcacaagtctggacagtcttctggagggtgtagatcccctaagcgatgaagatgacacggcgtacgaataa

SEQ ID NO: 385123 - DNA, 321 bp, Salmonella enterica
atgcaaccgggggctaatgtggcccgcatagcccgggaacatggcattaacgataatctgttatttaactggcgccatcgttatcgtcaggaactgatctgtcagcacgaggaacctgagttgttgcctgtcagtgtctctgctgcgcccggaccggatatccaccccactataaggggttccgcgcccatttcctccaaaagtctcacctttcacataaaaatcattatttatcatattcttaatttttttattcgtacgccgtgtcatcttcatcgcttaggggatctacaccctccagaagactgtccagacttgtga

SEQ ID NO: 385124 - DNA, 654 bp, Salmonella enterica
atgttttcagatgcccgggctgcacggctggccgcgctcgtcatgtatgcatgggatatgtgcgacagggatttacactgcctctctcccgtcccggacccgagtattagcgctgccggatgggaggtcaccgcgtatattaccggcggagacaaactcatccgttccggaaacggcatccgccgtaaggtcctggacgtctgtccgcaaagtgatgaccgcgtgtgctacggttacctggcgaagaacggggaaggtgaatatattgtggccatccgggggaccgatggcgctgaagagtggcttgatgactttgatttcatcccacgcaggccggaccgcccgcttcagggcctggttgacgggggtttttatggtatttactcatcgctgcagctgaacattcctggcggggagtgccggccactggctgccggtactgcacggacagtggctactatgaggactgagacaatttatgccctaactggaataatcttcggagaaggtacacaccccgccgctccccgtgtggaggtcaaaaggtatctctctcacgaattgagagtcgaagttcgaggtgacgtttacagtgcatttcccgttgtgctctcccgggatagaggagactgtagtacaggaaacggtcgttga

SEQ ID NO: 385125 - DNA, 420 bp, Salmonella enterica
atgcatgcggtctacggacagtttgacagcatatacaacgtatacgtggagagcgatggtatcccacgacaagggaatattcgactacgtatggaagaacttaatgccggtaaccttgacgatattcagggcgcgatgcgaagtctgtatggcaagctacctgaggactgggaaaagttgaacagcctattacaaggttcaaagggtaatatcggcagctaccatccttccccctcccttgatttgccatcaacgaccgtttcctgtactacagtctcctctatcccgggagagcacaacgggaaatgcactgtaaacgtcacctcgaacttcgactctcaattcgtgagagagataccttttgacctccacacggggagcggcggggtgtgtaccttctccgaagattattccagttag

SEQ ID NO: 385126 - DNA, 138 bp, Salmonella enterica
atgccccacgtcaaagaggaatgtgtgcggcaccttatggtgctctttgttccgtctcttctacgcaggaaggcagtggaagtcaacaaaaaagaagggtcgcttgcggagccccccaggtatgagatagtcgtctga

SEQ ID NO: 385127 - DNA, 378 bp, Salmonella enterica
atgataagcaatgttatattatattttctttggaaattaattcatattagagtgagttcatgtgcccttcaaaccctgacgggctcactccaccgggagcgcagaccgggtacctcattagggcaggagtaccgcgacagcagcattactgacctcgccagtgtgccgcgcatcttctggacgctgttaccgccggacggtaaatacgccaaagcagcgatcatccacgattacctttacgacaacgctctacgcacaaagaaagaagccgacctgatatttctcgacagcgtgccacgctggaagagaacggtaatgtaccaggcggtgcggatgtttgggagggggaactacgggaaacgtattaagatagcgtga

SEQ ID NO: 385128 - DNA, 219 bp, Salmonella enterica
atgatacacgttaagaacatatttttagtcctggtctttgcattgtcggctgcagctttttcgacatctgcgatggctgccagtgagactaaagcccctccaaaatcggatgatatcccgcaacctgttcttcccgaaatgcctaagtggtgtaaggatatgttagatagtggaatgttgttaccacctgacttttataagatgtgctggggacgttaa

SEQ ID NO: 385129 - DNA, 2523 bp, Salmonella enterica
atgtccgtagttatctctggagtactgaaagacgggaccggaaaaccagtgcagggttgcacggttacgttaacggccagaaaaaacacagcaacagtaatagtaaatacggtggcgtcagaaaatccggatgaggccgggcgctacagtatgaatgtggaaccggggcggtatgctgtttctctttttacagagggttatccaccttcccgtgttggcgatatcacagtatatgaggactccctgccgggaaccctgaatgattttctgggtgccgtatcggaagatgatgttcgtccggatgcgttgaaacgctttgaagacatggtggcggaggttgcccgccagaccgatgaggcttcccggaatgccaccgccgcaggacaggcatccgggcaggtgcagacttcagcaactcaggcagcggaaagcgccacggcggcagagaacgcagccggagcggcagaaacatcagccacacaggcggcctcatcagcagcatctgcggagagcagtgcaggtacggcgaccacaaaagccggtgaggcatcagccagcgcggcgtcggctgacacagccagaacggcggcagccgcatcggcagccgcagcgaaaacatctgaagcgaatgcagatgcctcccgtactgccgccggcgattctgctactgccgcagccgccagcgcgacggcagcgcaggcatcagcagagagtgctaaagcatccgaaaccgccgcagtgactgatgctggcgcatcagtcactgcggcggcagcgtcggaaaaggcggcaaaagtctcggaaaccagtgcaaaaacatctgagacaaacgcagcaacgtcagccactgcggcagcagccagcgcaacagccgcctcgtcatctgcatcggaggcatccacccacgccactgcatctgagaccagcgcatcactggcggcgcaaagcagtactgctgccggagacgctgcgaccagatccgaagatgcggcaaaacgagctgaagatattgctgccgcagtacatctggaagatgccagcctgacgaaaaaaggtattgtccagttaagcagcgccacggacagtgatagcgaagcgctggcggccacgccaaaggcggtcaaagctgtcatgagtgaggcacagaccaaagcgccgctggacagcccggcattcactggaacgccgaccacaccgacgccaccagatgacgctaaaggacttcagacagcaaacgcggagtttgttcgtaaactgattgccgcgctggtcggttccgtacctgagtcgctggatacgctgcaggaactggcggacgcgctgggtaacgatccgaactttgccaccactatagtaaataaactggcgggcaagcagacattggacgaaaccctgacggcgctgtcaggaaagagcgtggatggtcttatcgaatacattggtttaggagaaaccataaatcgcgcctctggcgccatgcaaaaatcacagaacggcggtgatattcctgacaaggatttgtttgtacgtcaaatcggcgctgcgctggcgctcagtggcggggttgctatcggcggtgattctaatccgtggacgacggcggagtttatcgcctggctggagagttgcggcacattcaatcacccttactggatgtgtaaagggtcatgggattatgcaggtaacaaagttatcactgacactggctgcggaaatatctgtctcgctggcgcagtgattgaggtaatgggagtgcgtggtgcaatgaccattcgggtgacaacgcctaccacaacgtcaggaggagggattgccagcgctcagtttacttatatcaataacggcgaaggctacgctccgggctggcgacgtgattacaacacggcaaacccgcctccggattcgcatcccgtaggggcggcgattgcatggccgtcggatgtcaccccgtctggttatgccattatgcagggacaaacgtttgataagtccacatacccgttactggcaatagtatttccatccggtgtcatcccggatatgcggggctggacgattaaagggaagcccgaggggcgagtggtattgtctcaggagcaggatggtattaaatcccacgcccacacagccagtgcagccgctacagatctggggaccagaactacaacgtcatttgattacggctcaaagcagacaacggggtttgactacggaaataaaacaacaaacacaaccggagggcatgcacacccgcttggtgttaataatgccagtggacagactcatccaagcgcgctgtcgagtaattccacgatggtgaatgcgacattgtatacaggacaggctggtgatcacgctcatacagtttatataggagcacatgatcactgggttggtattggtgcccatacacataatctggttattggcgctcacggacatgctgtgtcagtggatgcgacaggtaacgccgaaaataccgtcaggaatattgcatttaattatatagtgaggcttgcatga

SEQ ID NO: 385130 - DNA, 591 bp, Salmonella enterica
atgagtgagggatggtatcaggtcaggattgcaggcagggatgttgcaccggatgatgtcaccgccagactgcatgagccgttaccgactagtgcggtgatccacatcgtgccgcgtatggggggagcgaaatcggggggagtgtttcaggtagttctgggggctgttgcgataggtgctgccttctttaccggaggggcatcaatggcagcgtggggcgcactctccacaggattgtttaccgctggtgccagtatgatgctgggtggcgtggcgcaactgctggcaccgcaaccgaaagccccttccatgcattccgccgacaacggcaaacagaacacgtatttctcctcacttgagaacatggtggcccagggtaatccgcttcctgtggcatatggtgaagtgatgagcggctcccggcgtatatcgcaggagttaagtacgcgtgacgagagttcgccggataagatgattaattttgggcggaagaaagggtttatcggactggcgactcagcacctggaggatcagcttaacgctgaactggctgcgcagggcatcacgaagcccagggtggtgatccggtaa

SEQ ID NO: 385131 - DNA, 738 bp, Salmonella enterica
atgattaacgatgacattctggctcatgcccgacagtgtgcgcctgcggagtcgtgcggttatgtggtcagaacggcgcagggagaacgatattttccctgcgaaaatttgtccgctgagcccacgatgtatttccgtatttcgccaaaggaatatcttaaagcgctggcggcgggtgaggtggtggcgctggtacacagccaccccggaggactgccgttccttagcagcggcgaccgcacgatacagttacagacggcgctggcgtggtggctgatgtgcgatgagcagatttataaattccgctgcgttccgcaccttacaggccgccagtttgagcatggcgtgacggactgttacacgctgttccgcgatgcgtaccatctggcaggcattgatttacccgattttcatcgcgaggacgactggtgggataagggccagaatctctatctggataatcttgaagccagcgggttttacagggtaagcgcagacagggcgcagccgggcgatgtgctggtttgttgcttcggttcaccgaccgccaatcacgcggcgatctactgcggcggcggtgaactgctgcaccatattcccgatcagttaagcaaacgagagaggtataccgacaaatggcagcgcagaacgcactcactatggcgacaccgacaatggcgagagtctgcctttacggggatttgcaacgatttggaaagcgcttcagcctcagcataa

SEQ ID NO: 385132 - DNA, 696 bp, Salmonella enterica
atgcaggatataccacaaagcaccctgaacgagaccaccaaagcggagcagtccgcgaaggtggatttgtgggagtttgatttaaccgcgattggtggtgagcgttattttttctgcaatgaagctaacgagaaaggtgaaccggtaacctggcaggggaggcaatacgaaccatacccgatacaggcgcaggattttgagatgaacgggaaaggcgtatctccccgcccaaacctcgttgtttccaatatgcttggtatggtcacgggcatggcggaggacctgcaaagtattgtcggcgcgtccgtcgtgcgtcatcaggtgtacaggaagtttcttgatgtggtgaactttgttgacggtaatccggacgccgacccggagcaggaagctgtcgcgcgatacagcgtggaacaactttctgaactgaccacatcgaccgcaacgtttgttctggcctcaccagtggaaacagacggctccgtcttcccggggcgtatcatgctggcggaaatttgcacatttgattaccggcgtgaggagtgcgggtataacgggccgccagtggccgatgagttcgataaaccgacagccgacccggcgaaggataaatgcagccactgcatgaagggatgcaccatgcgcaacaacgttcggcgggcaggctttttcgcctccatcaataaattgtcttaa

SEQ ID NO: 385133 - DNA, 327 bp, Salmonella enterica
atgaaaaaactgtatatcctcattgccaccggctttttactctcaggccctgcagtggcgaaggttgatgccacaaccgtacaggccgccacgcagacggcacagaaagcgtatgaagccgtgacagggaatgatgccggtgacgttaactggtcgtcgtatgaagaagttccgggtattaaagatccggccagtccggggcataaactccgggttctgcagtgggaagggtttaatcccggctaccacacctacgaccgtgtgcgcgtcctggtgaatgacggcggctctcctgtcggggctgaagtcctgtatatgggacgctga

SEQ ID NO: 385134 - DNA, 528 bp, Salmonella enterica
atgacagaacccgccatcacttcactgaaaaacagactgaacacctccacctggcatctggtactgctctcactggtgaccaacggcatttactccctgatgtggctgtataaacaccaggacaccatcatgcaggagaccggacagcgtttttcctcccgtacgctcatcatctggatggcagtatgcgccggcgtttccgtgctgctgcgcctgacattcccggttcagacggacgggtacgattacggatacagcgacaacaatgccgcggatgtcatgcagggcgtggcgatgctgatttctctggcctggtgcgttctgactatcgtctgggcgtttaaagccagagccgccctgcgccagtatgccctgaccaccttccgcttcgacctcagaatgaatgcgttttataccgtcatttttaatgtgttttacattatgtactgcatcaacgacctgccgcaggcgctggcgaaacaccagattatttatggcaatacacagtccggtcaggaacctcagtaa

SEQ ID NO: 385135 - DNA, 222 bp, Salmonella enterica
atgggggcagccggatatatccgcttcaacaaaaagcagtatgactacgtgctgctgagtctggacaccggtcgccgggaattccacggtatccgggtatacagggacggcagccttgtctcatcccatgaatgtttctcaaaactggaacttgatgtcagcggactgaccgacccggctcataccgacagcgacaaaatgggtgatttcctcacggactga

SEQ ID NO: 385136 - DNA, 204 bp, Salmonella enterica
atgaacactcctgtaaaagtaaacacagtactacgtgagctggatgcactaacttatagccagtgcgatgtgattagcatagagaaacagcttacggacatgattaataaaacaagcccggaggaattcacgcttggattatcttactttattcatgtgactcgcaacctgcttcaggttaagcgaaaacaacaggaagggtga

SEQ ID NO: 385137 - DNA, 774 bp, Salmonella enterica
atgccttacttccataagtttgttgatgttaagtgcgttacctgcgatagccgcactgggttttcgttaataatgtgcaccccactgcgtgagaaagagcgcaaccattatcggggtatggacgaatgggtcgacagcaaaacccattttcgtggcctctttacatgtaataactgccacaatcctgcctgtattgagtttcactttaaaagtgactactcgaaaaatccttctcttactgaaatggtaagatcccctatggcgttcctgaactgcctgcggcccattgatcttaataaagagcggacgttttcggtcgatatccagaatatgggaatagtacttaatcagtatttttccatatccctcatccatcccgaaggtagacttgcgatacctgaacatttaccagaaaacattcgcaaaatttttgttgatgaccttatgcagacgacctcaacaagatttatcgttatggcctgtcgctcaattattgaagctgcctgtcgcgataagttgggtgaagattcatgtaaaaaaagccttgtgcaaatgattaacatgctgattgagcgtggtgagttaggtagtattgtaggggattgggcgcatgtagtgcgacaactgggcaatgaagttgtccatagatttgatgctccatctcctgatgctgaagaggctaaagacatccttaatctcaccgtgatttttctcgaattgctttatacatatcccgctaaaattcaaaaactgaaagaaaagagcagctcttga

SEQ ID NO: 385138 - DNA, 561 bp, Salmonella enterica
atgggcggcattcgggaagccgccttctccgttctttcccggcgcggccttcctgctgcgacagcaaatacagtcagcgtagccatcatcaggcagctcgcgtttgcatgggaggggaatgttatctacatcaccaaaacccctaaccatgaagtcatgctgcgtaaccagcgcatctttgatgaattcaaggggggcaaccacgacgcgctggccgaaaaattcggtgtgtcaatccagtggatatacagcattgttaaagacatgcgggacgaatatgtcaaacgctaccagcctgatatgttcgatagcaatgagccggacgacaacgatatcagcgagtttattcgggaacagttcagaaccctcggcgacatcatggaccactcagcgtactgcctgcgccagcatgtgccagacctcagtgaaagccaggcgctggccatcggcagggagatagcctacctggcatcagaactacgcaaggggcagtcggcgcacattaagaaagagaagaatgtttccgatgaagcgcaggctgatatgttcggtgacggatag

SEQ ID NO: 385139 - DNA, 441 bp, Salmonella enterica
atgaaaacaaacagagcaagactcatccagtttattcatatcgccaaaagccagatgggtatggataccgatacctatcgccagatgttgttatcaatcaccggtaaaacatcaaccagcgacatgaaccccggccagctcaataaggtactggccgccatgaaagccaaagggtttgtcgtaaaaccctccagaaaggcgcgcacaacgcgccaactggcggattatccgcaggccaagaagctgcgtgcgctgtggctggaaatgtacgcacagggcattgtgcgcgacagttcggaagaagcgctgcgccgatgggttaagcgggaaaccaaagttgacggcttgcaatggctggaagctgataaggccagcgcagccatcgagaagctcaagaaatggcaggagcgggagttacaaaaactgcggggtgagacatga

SEQ ID NO: 385140 - DNA, 507 bp, Salmonella enterica
atgaatagcatcggaatatcaacagcccgcatccaggaaatagcagccctgaatgccaggcttgataatatcaagaaatgcgcagccgtcacttttacaggtgaaaccgttatgcattactcgcttgttgatgaaattatccgcgccatgactgacctggctacaccatgcctggaactggcacaacaaaagcctgtagccttcacggataatgacgaactggaggaaatgaagcgcggttcatgcgcatacatgtttaatcctgaatgggccaacacacagcccggttcgcgttgccaaccgctttacagtatgccgttcccggctttcatgttgattaaccgcctgcagattgcactggccagaatgctgaccatgcacgagatggtaatgagtaaaaccaacatcaaagccagcttttatgatgctgactgtgtacgggaaatgaacgaggccccgatacaggcccggcgtgtgcttctggatatcaaggagggtgccgcatga

SEQ ID NO: 385141 - DNA, 219 bp, Salmonella enterica
atgagcacttatatagcaataggctggacatggatctggatgggatataccaccgcccaaattcatcaccataccggcagtctggatcattaccggtattccgtgctccgctggggtgttgtctggttgtttattttcctgttctggccgttggcgcttaccctctacgaagaccagctggctcagtggagtaaatggaagccctacgggaaaaaataa

SEQ ID NO: 385142 - DNA, 204 bp, Salmonella enterica
atgagcaagctaaaaacccatacaggcgttgttatcaccaaagaaggtgaaaagacagtaaaaatgcgtgagacagcaacaaccttgtgtgtcggccctaaagaaacatacgacaaatttaccggacgtcgcgtaggtgctccgcttacaaagcgtcggctaaggctggagagtattaaaccaatcgaaggcggtgcggaatga

SEQ ID NO: 385143 - DNA, 684 bp, Salmonella enterica
atggataaaagcaaagataaagccatccgccgccttaaaaagctgatggcgctgaccagttcatctaatgccaatgaagcctccgcagcgctggcacgcgctcagaagctgatggaagctcacggcgttactcaggacgatattgagatcctcgatatcaacgaatccatctgcgattactggcccgttggggccagcaatcccccgcactatatggcgtacctgctacaggtaataaaggatgcgtttggagtggactatattctgctgggtggttgcggcgtcagcttttacggcttatataaccgcccggaactggcggcatatacatttgaagtattaggccgccagttaatgaaagcccgtcgcgattttattaagacgcagaataaacgcattaaaaccagtaccaaaaccgcacgcggcgataaattcgccgagggctggattattgcgacgctgaataaaatcgagaaattagccagaacagcccgcgaagtggagctggccgaacgctggctggagaagaaatacacccgcattgttacacgtcctgcccgccagccaggcaaaacccgcgataacgacaacgcccggaatagcggttatcgcgagggtaagcaggccagcctgcaccagcccgtcaacggtcaggaacaagcgaaaataggagtgaagttatga

SEQ ID NO: 385144 - DNA, 288 bp, Salmonella enterica
atgaggcatataaaagaagagaaaaagaaatacgctgaaataaccgatgtggagaaactcgaaaacatcattgcagacatgatgcaaagcttcagatacaccacaagcagcatcatgactgtgatcggcaaagcacctgatcgagttatcgcgttgactatttatagctataacgcatttgaacatgaattcaatcagagtccagaagacgattcgcgcggtgatatttgcctgagaattgaagtgccaccaccgccgccgccgccatcatgtactcgccgaaagtaa

SEQ ID NO: 385145 - DNA, 201 bp, Salmonella enterica
atgaagatgatgattaattttttgcgtattaaagcccgtctttgtttcgaattgcaggcattcaaaaaagccattcgtgacatgctgcctgagatggtcaatttatcaggtaattgcctcatctttttctggtacgccttttttatcggggcaggattaacactgggctttttcttcaccgtgctttgtatgcagaggtga

SEQ ID NO: 385146 - DNA, 198 bp, Salmonella enterica
atgctggcgtgcaaacactgcagtaaagaaactgaatatctggactttgtacaggccaacattatgcagtctcctgttaatgatgcctgggttgttgatctgattctggcctgcccgcactgcgggcagcaattaaacctgtttccggcagtgatggactttgaacgactggaggcaccggatgaagatgatgattaa

SEQ ID NO: 385147 - DNA, 222 bp, Salmonella enterica
atggcgacaaaacagaaatacactaatcgcgcgaaagcgaccatctggaataaaagcctgcgcatggaaacagaaggctcaataccaggcatggctattatgacgttcgaaatgattaacaccattgaggaaaaagaacaagcgttggtacagatgcagcagtgccttgagagatgcaaaaaacgggaggcagccaatgctggcgtgcaaacactgcagtaa

SEQ ID NO: 385148 - DNA, 189 bp, Salmonella enterica
atgaaattcgcggatattcaacacctgcgtaaacaagccgagaaagatattaaccgcgccatgcgtgcagctgaatccggtaatgacctggaagcagcaaagctatttatgcgtgcaggcggaacactgataacactggggcgtggactggagattgaaatcaatggcgacaaaacagaaatacactaa

SEQ ID NO: 385149 - DNA, 540 bp, Salmonella enterica
atggcgaagaaaaattcgcggcttaaagctgcggcggctgcttacatgccgcaatccagagagcaggttattgccgatattaaggaaattggcgatatccagcggaaattaacccgtatggaaacacagaagaatgaccagatagcggttattgtcagcaaatatacgccggatactgaagcgttgaacaccaagctggaactactgaaatcaggcgtccaggcgtggtgcagcgttaaccgtaataccctgaccagtgacggtaagaccaagacagtgaagttcactaccggcgaagtgtcatggcgaactaacccactgtcggtgaatatcaaaggcaccaaagcagtactggaagagttaataaaacgaaagtgggaacagtttataagccgaaaaatggacattaataaagccgctattaacgacgcacttaaagccgatgaggacgcagatgtcgggaaattaaaaggcatcattgtaaacaaagacactgagacgtttttcattacaccatttgaacaggaactcgataaatga

SEQ ID NO: 385150 - DNA, 240 bp, Salmonella enterica
atgaatgacacagtaaaagttgctatcagagcagaagccaccgtcagattcgaaaaaatagtggaaatggaaaaagcagattacgaccgctatctgaaaatttgcgaggaatggtcatctgccagagaagttgaagagcagataaaagaaatcgcttttaaatatgactttgatgacgccgctgacgatataaatgatattggtgaacccgaagaaatagagtttgtattagttaaataa

SEQ ID NO: 385151 - DNA, 288 bp, Salmonella enterica
atgcgcagccgactaatcatcaactgcgataataagcgcattcaggagcagatggctcaggtcggtagtgctattgcccaacttaacgctatggatttcactgtcgatcgcgtggagattgacggctaccagcgccccaatatccgggttaactatgacaaccgctgtcgccaggaacaggagcacggtaaagccgttcgctatggtagcggtaatgacgataaaggtaattatgaatggtggcagattcaggtgaataactgccgcgtaacatgggaagcacgataa

SEQ ID NO: 385152 - DNA, 366 bp, Salmonella enterica
atgtcagatataaaacgctataaagtcacctggaaagggcataaagataatccgacattaaccgtagaaattaatcacacattgtgctctcagcgtgatttatttcatcttgccagcctgtatggtgatgctactgatttaatagaaatgatgagcggagatgtcaccacagcagcattaaaggttcttggtgagagctgccttttcgaaaaaaccggtatgagtcttgatgtcgatgagttagctgaaggtctcaacacgtaccccaatatcccacgcattaatagtggccagggaataacaatcattaattgcgacaccccaaaaataaattacgacgacatagaagtggaagaggtgtcgtga

SEQ ID NO: 385153 - DNA, 381 bp, Salmonella enterica
atgaaaacaatgaatgaccttaaaacatttaaaattcaatgggcggggcatgaggataagccctgcataacaatacaaattgaagagtcaatctggactgaagaaaaatcctttaagtttgtcagtgacttccatctggcaaagtcatatctagaaagtacagggaaaaacaactccgtcaatgcaatgctaaagcttattgcctgtgagatgatctaccagactatggctgggaataaaattaattaccagcttttccgacatttaaaatccaacggctatcccatgatgaacggtacttcaggcatacgtgttttggaagcggatcgggtttccattaatcctgaaagtcttgtcattaccgaaataaaggaagggtaa

SEQ ID NO: 385154 - DNA, 1188 bp, Salmonella enterica
atgttgctactgaaacaacaactgcagcacctgcagatagaccagaaggaggttgccgtaatgctgggtatatcaaaagcggctatggcgcagctggtaaaccacgggcagtggccacgtcgtaaaactgaacaactcaggaagcggatcactgagctgctgcaggctcacaacgtggacaccacccacagttttgacgaggtcaggcagcaggcaaccgccgttactcaggtacaacagacaacagaagaggacagcatgttactcaaaaaacagacgttaagccagaaggcgaaaaaggcgtttaagttattcactaacccgttcgacgataccgctattcagagcgcggcggacatgttcatcacgtccgatatccgctatgtacgcgaggcgatgttccagacggcggttcacggcggcatgctggcgctatggggtgagtccggttccggcaaatccaccctgcgccgtgacctgattgaccgcctgcaccgtgaaagtgcgggtactgtggttatcgaaccctacgttctggcaatggaagacaacgatcgcaccggcaaaaccctgaaatctgccagcatcgccgaggccatcctgcgtgcggttgcaccgggcgaacgcccgaagcagtcaccggaagcccgcttcgcgcaggtacatcaggcgctgaaggacagcgctgaaagttccaaatgcggccatgtgctgattattgaggaagcccactcgctgccgactcccacactgaaacacctcaagcgattcctggagctggagcacggctttaagcgtctgttatccatcatcctgataggccagcaggagttgcgtgacaaactcagtgagcgcagcgcctcggtgcgtgaggtagtccagcgctgcgagatggtcaggcttgagccactggaggatgaccttgaagcttttctggcgtttaagtttgaccgcgcaggccgcaatgtcagcgaatttattgacgagtcaggcgtacaggccatccgcgacaaaatgaccgttaaggtgggcaggaaccccgataccgggaaagacgtttttgccagcaacctctacccgctggccattggcaacctgatgattgccgccattaacgaagccgcagctattggcgtgccggtggttaacggcgacgtaataaaaaatatcaacccacacatccgataa

SEQ ID NO: 385155 - DNA, 246 bp, Salmonella enterica
atgacacaacagacacaacccctcgctatcgccgttaagcgtgccgtgcgccacgacctgacgatacgttttcgggataagagctacagcctgcgcggcatccccaacctcgtcagtggcatgattgtcaccatcacgcactacggctggtatccacatgacagcctgatagtgaatttcgtcaacaatgctggcgtatccagtgactggctggtcggatgcgccgacatggcgaccgctgcctga

SEQ ID NO: 385156 - DNA, 1800 bp, Salmonella enterica
atgaacgccgccctgaatcagcgcctgatgcactatgcagatgccgcccggcatgccggtcatgggcgtaaagaagcgatatacaaagcagcctgcgaggaactccgtatgtcacgcgccacattactgaaaaagctgaaagcatttcagcctgccgcacagcgcaagcaacgcgctgacgcgggctgtagcgccctgacgcgtgaagaagcgctggtgatatccggggcatggctggaatcgcggcgtaataatgacaagcgcctttacagtcttgaaagcgtggtcaaagccctgcgcaccaacggcatgattatggcaggccgcaccgataaagagaccggtgaattttttccgttatctgttgacgccatcagtcgggcgctgcggtcatatcgcctgcattacgatcaactccagaatccatctccatcgctggagctggcaaccaaacacccgaaccacgtatgggagatagacgcttccatctgcgtgctttattacctgaagaaccccggcaaaaaagtcaaaggtgataccggcctgcgcgtgatggacagggatacgttctacaagaacaagcctaaaaatctggatcgtatcgttaacgaccgcgtgtggtcctttgagcttatcgatcacacgaccaactggatctacgtggaatatcgcttcggtggcgaaagcgctgaaaactttctgtcggtgatgattaacgccatgcaggaacgaggcggcgcagatgtgttacacggcgttccctccatcctgtataccgaccccggctcggcgctggtctccgcgtcgatgctgaacatgtgccgggcactgggtattcgttgcctgcagcataaggcccgaaatgcccgcgccaccggtgcggtggaaaaggcgcgtgacattatcgaatgcgattttgaagcgggcctgcggttttgccgcgtggagaccattgaggaactgaaccgctacgtccgcctgtggcgcatgagttacaaccgcaatcatattcatagtcgttatggcatgagtcgcacggagagctggctgcgcatcaccccggaacaactgataaaagcccctccggtagatatatgccgggaactggcagtggcagcgccggaagagcgcactgtcaccagcaagctgcgcgtgtccttccgtgggcaggaatttagcgtggaaagcgtaccaggcgcctgcgttggcgacaaactgcagattacccgcaatccatggcatgagaacgaggcccgcatcatcgtcaccgacgaggacgggtttgaacaatatctgccggtttacgcggtagaaaaagatgagtggggatatgccgttaatgcgccagtgattggcgaacgttacggccagatgccagtgaccgatgcacagcacagccgtaacgaagtggaacaacgcctttacggtacgggtaacgaagtcgaaaccgccgccgcccgcaaggccggagcgataccattcggcgggcgtttcaatccgtataaagaaattgaagacgcacagcacaacagcccgacttatctgccacgcaaaggcagtgaagtacaacctcgggtacgagtccaccagattgagatagcgccacttagccacgtcaaagcggcgatggcattacgcacccgatttgatgcgctgcggcgcgagtggaaccccactcactaccagtatctggtagataactggcctgatggtatccctgaagagcagttggataacgtcatgcaggaactgctggccctgagcgataacgtcgtggtcagcctggcggcaggcaaataa

SEQ ID NO: 385157 - DNA, 231 bp, Salmonella enterica
atgactaacgcaccagtcatcaaactccgccgcactaaagaacagcaggcgcagcgtgacgagttcctgaaagccgccgcgctggcccaaaactggattaactgtatcgtccgttttgccgagcaggacaactggtctgaagtggagttttacgttgggagcggcagatacgactacgaaaaattgaagagtctgttgcccacagaccgcgccgaaccacaaggtaactga

SEQ ID NO: 385158 - DNA, 318 bp, Salmonella enterica
atggataacaaacagaatgaagccacccgcgcaaacgggaagcgactgttaacccagaaagaagtaggtgattttctcaatgacgtttttagcccggactcagaccgcgacagccagaatcgcttgcgcatgaaacgttttatatgcggcatccagactgtactgaatcaggctaaccgcgccctggagttcgcacagaaggaccgctggagtatcgcgcgggcatacctgaataacaccgcccgcactatcgacagcctgaaacgcgtggcgcgggaaaaatcatcagcccctgctcgggaggtcgatcatgactaa

SEQ ID NO: 385159 - DNA, 951 bp, Salmonella enterica
atgggacgcagagctaaaaatactatcgatgttgaaccgatgacacccgctattcctgggcaggactttgagcacccataccctgatttatcacaggaagaggttcaggcacaggatgaacgcgatctcgtaaatcaattacttggtcaagtccaaatggcacggtcatttgctaattttgccgacgtcgtcagtttaagcaaattaaatcatattaaagaaaacaagatatatcgggcacttagaggcaaaaaaggagttgatctagatggtaatgaaattgccgacgtcggcacttgggatgggttttgccaagcgctagggttgtcgcgatcaaaagtagatgaagacctaacaaatcttatggcatttggcgaggtggcattaaaacaattatccgctgttggcgcgggctaccgcgaactgcgccagttccgcaagctaccggaggattccaaaaccgcccttatcgaagtagcgaaagaaggcgacaaagaaagcctgctcgatctcgctgaggaattgatagcccgtcagaacgacgagaaagaacaactggcgaagcaactggccgacaccgaggccgaccttgaagccagccgcaagcgggccgctgacctgaaatcttcccgcgatgagctggaagacaagctgcacgaagaacgtttcaagcccattaccgacagtgaactggctgaacgtacccgactggaagcgacatctatcagcagcaagattgcccgcgaactgatgggcgcactacagggcgcgtttgccgaactggagaaagacaccgctgaccgtggcgttgaccacagtagcttcatggcgggcctcgtttgcgaaatccgcagcgagcttgacgatatcgtcacacgattttctatccctgacatggtggccgaagtgacgccgccagcatggattaacgacaataccgaagaggagtaa

SEQ ID NO: 385160 - DNA, 330 bp, Salmonella enterica
atggcaaaacctactggcaagtcaccgtcagccgcgcgtacagccagaatcctgaaggcgctttcaggtcgtactaataccggtatgtccgcaggtgaaatcgctgatgcaacacatattcccaaaacccgcatgtccgaactgctggatgccctcatagaagaaaacctcattatcgaggtcttcacccctgatggcgaaagcaccctgcgatatgcgcactcaaccgcgctcctgcagatggcatatgactgcatgaaagaagacgcacttatcaggcaacgtctggagcgcaaacaaaaactcttaatgaaagggacgggtaaataa

SEQ ID NO: 385161 - DNA, 186 bp, Salmonella enterica
atgacccctgaacaggtcaaaaatcgcttccgccgacagggtaaaaccatcaccagttgggcgcttgaacacaatttcaaccgcaaccaggtctatcaggttctcaacggccaatgcaaagccaactacggcaaggcgtatgaaatagcagtaaagctcggcctcaaaaccgacatcgccgcttaa

SEQ ID NO: 385162 - DNA, 357 bp, Salmonella enterica
atgagcattgagattggaaaccgtgtacggcaaatacgagctaatacagggctgaaccagcgggagtttgcatcacgccttggaatttctagcggcgggataagccaaattgaatctggcaaggcgatgccgggtggggattttttacttcgaattcatcaagagtttagcgtggatattacatggctgctcactggaatgagcgtgactgagccaaaagtaaatccaactgagctaccaaaggaaaagcaggctcttctggatgcctttgatggcatgagtgaggagaacaaaagagcacttcttcagattggcgaatcgttatcacagtcaaaaccaagtaaattcgttatctga

SEQ ID NO: 385163 - DNA, 1167 bp, Salmonella enterica
atggagaatttcaaaactaggctaaagtcacacgttgaacacgtaaaaagcatgggtggttactgcactaccgaagaaacaactaagcaggcgcttattgttccttttcttgatattttgggtttttcagcgtacgacccaagaaaggttaaagctgagtattctgctgatttcccaggagtaaaggctaatgaacgggttgactatgctcttttttgtcaagacgttcctgtaatgttcattgaggcaaaatcattttctgaagacgttaataaccattgcccgcaactttcacgatactttaactccactcctgaagtcacaatttctgcaataactaatggcatggaatggcgtttttttacagatttaaagcaaaaaaacatcatggatgacacgccttttctcaggcttagaatggattcgcttagtgactctgacgctgaacagttataccgttttcgttatgataaatttaagcccgaagcgctaagaactttagctgaggaaagtgtgtatctcactgctttcactaaaactattagcactagtttacgtgatgttgataacgagtttgtaaaatacatagctagtcgttcaaatattgagcgacaactgaatcaaaagtttctggatgcaattacaccattggtcaaactagcagtagaaaaggcagttagtgctatggttgtatccggtcttgctagtattgataaagagcgggctgtggataatgagcatatagacaacaagttaactccagaaaacggtgtagatccaatggatcaaaacaaccctgaagaacttgctaccaaacgtaagatggcagtttttaacaaggttaagcaaattgttggcgaagagtatgatatgcaatataaagacactgaatcttactttggtgtcatgtatgaaggaaaaacaaataggtggcttataaggtattttgataagagagagccttacgtagtgtttcgtattgatctaactgatgtccagttaaatgaaatatcaagagccggacttgaggttgtaagtggtcgagtgcatattaatacgccagatgatgttttgcgtgtttcaggcattgttatggacgcctttgaatttgtcaaaaatgacgaaaacttcagaaaatcaacaaaattttctgatggtgaagagtga

SEQ ID NO: 385164 - DNA, 771 bp, Salmonella enterica
atgaaagaacaatcacttccgatcgtgccgtggataggcggtaaacgccgtctggcaaagcacatcttaccgttatttcccaaacatacctgctacgtggagccgttctgcggcgcagcggcgttgtattttctcaaagaacccagccgcgttgaggttattaatgacgtgaacaatgagctggtgaacctgtaccgcgtggttaaacaccatctggaagaatttgtgcggcagttcaaatgggcgctagtcagtcgccagatctacaagtggcttcaggtaacaccagaagaaacactgaccgatattcagcgtgcagcacggttctattacctccagaagcaggcgtttggcggcaaggttgccgatcacacgtttggtacatcgaccaccagcgccccgcgttttaacctgctgcgcattgaggaggaactgtcattggcacatctgcgattggcacgcaccatcattgaacatatggactggactaagtgtattgagcgctatgaccgcccgcatacgttgttctactgcgacccgccgtactggggaacggaaggttacggtgtggagtttgggcttgaggaatacaacctcatggcgcagctggccaccagcatgcaggggaaaatgattatctcggtgaacgacataccggagatgcgtaaagcctttgcgggactggagatgcaatctgtaggtatcaagtacaacctgcaggtaacggagaaggcaaagccaaagcgggaactgattatcaggaatttttag

SEQ ID NO: 385165 - DNA, 261 bp, Salmonella enterica
gtgaaacttatatcccctgaagagtatgttgaggaatggagacgcaaagaccgtaaaaacttcgaaatggcagcaacgacgttaattccaggtatgatcggtaaagccgctgtcattcttatagctaatggtcagcagataactacagaaaatctcattcattattttgagactgagcttcagaactcccctggctccctgattgaaagctggttccaagcggcgcttcagttcctaaaggattcagtttcttcgcaataa

SEQ ID NO: 385166 - DNA, 258 bp, Salmonella enterica
atgagctggaagaaacgagatagcggtaactggcaattcatctgtcacccaaacgaatcatataaggagtcacttatacggtgcatgaataccaacacatacaccgccaaagaagaagactggttagctgttctggcattagcaacagatattattgcgaagaaactgaatcctttaggaactgaagcgccgcttggaaccagctttcaatcagggagccaggggagttctgaagctcagtctcaaaataatgaatga

SEQ ID NO: 385167 - DNA, 360 bp, Salmonella enterica
atgaaaaaactcaaacgcctttcccgctttgttgccgccacaccacgccctcgtttgtggggctggctgctggccgctgtcgtgatgttcctggtgattgcagtggtgtcgccacagcagctgccggtggtaatttacaagcttgccctgatttcacttgccgccgttctcggctactggcttgaccgttcgctgtttcccaaagcccgaccgggacagtttcagcgccacgttccacaactgatggatatcgggcgttatccggttgaggtgggctgtcatatggtctttgcggccaccctgattcgtcgcgcgattattgttgcggcggtgtgtctggccgtggcgatggggttatga

SEQ ID NO: 385168 - DNA, 732 bp, Salmonella enterica
atgacgatgacactacactgggtgcaaatcgtctggcttgccattactggtctgcttctgctgctccggttcactggtatgcgggccgccgcagaacacgctgagttctggtttcaactgacaagtgcgctgttgatggcctggctgctgtggtgtggcgggttcttctcgcaggcgaacgccgccgaaccgccgacagccgcccttaaataccgcagcgatgtgattcgttctgcccgcgttgactgggggcttaacgcgccggtcgccgatttcgccgcgcagctgcatcaggagtcgggctggaatcctgcagcgcgttcgccagtgggtgcgcaggggctggcgcagtttatgccgtcgaccgctgactggattgccggactgatgccgcatctggcctcgcgcgagccgtataaccctggctgggccatccgggcgctgatcagttacgatcgttggttgtggcagcgcgtgaccgttcctgacggctgcgagcgtatggccatgacgctgtcggcctataacgggggtttaggctgggttaaccgtgaccgcaggctggcacgaatgcgcgggctggatgatgcccgctggtttggtgcggttgaaacggttaacgccgggcgaagtgccaccaactggcgggagaaccgccactacccgcagcgcattctgcgtgaactggccccgagctacctgtcatggggagggtctaattgtgtgggttaa

SEQ ID NO: 385169 - DNA, 651 bp, Salmonella enterica
gtgtgggttaagttgattaagcgtattccgtggggtgacctgctgttactgctggttgtaatcgtactcctcggctgggcgtgggttaagggatacggcagcggtcatctcgatgcgcagcatgacggtgaacagcggcttgcacaactgcagtcgcagtttgatacataccggcgtgaagacgcggtgaaacagactgaagcgctgatggatattgtcaggcgctataacgcgcaggtcgccgcagcccgtcaggcggatgcggattttcaggccaaaaaacaagaactggagcgtgagaatgttgcccttaaacaacagattgccgatgtcacccgccagtgggtggatgaaaaaggcaagcatcatcccattgagtgcgtgtttactcgcggtttcgtgcagcagtacaacaccgctctcggcgtcaccggcgcacacaacgccggtcatcacgaatccactgccgccacttccgccagcgctggcacaacgaccggggcaactgataccgctgtcacccggttacgcgactccggcgtcagtcaggccgacatcctcgccaacgttaccgacaacgcccggcagtgccgcgtctggcgtgagcaactgaacggcgtgctggattacacagaaggattgcatcaatga

SEQ ID NO: 385170 - DNA, 324 bp, Salmonella enterica
atgaccatacaggttgagttctggacgctggttggcttcctgatttcgtttatcggtgcggtctgcgggctggcgaaatggttattcaacaacgcagaagcgcggcaggcagcccggttcgcctcactggagcagaccatgaaagagacggcgtcgcgctggaacgatctggagcgtgagttcctggagtttaaggcgaagctgcccgtcgactatgtccgtcgagaggattacatacgcggccagacggtgattgaagccaagctggacgccgtctacgagaagctcggtagcgttgcgcaccaacagaatctgagaggttaa

SEQ ID NO: 385171 - DNA, 312 bp, Salmonella enterica
atgactgatattatccgcgttcgccgcgagtccctgcgctggagcctgctggttgcgctcaacaagtcgcgcccgtacaccaccagtgaacaactgctgtttgatattgcacgctccatttatcaggacgccacaaaacttgaggtgcgtcaggagatggactacctgaatgaccgacgtctgattgaaatcacgaaacagcccagcggcatgtggtttgccgacttaacccgcaccggtattgacctggttgagtacaccattccctgcgatccaggcattgcccgcccggacaaatactggagtgaatga

SEQ ID NO: 385172 - DNA, 555 bp, Salmonella enterica
atggggcgcaaaagttcactggatgtactaccgcaggacgtccgccgttggcttgagcgggcgctgaccgaacgtaatttcacgggctatgccgagctggaggcgttactgaaggacaagggctttgtgataacccgctccagcctgcagcgctttggctacaagatggagcagcagctggcgcgcgtacgtgcggccactgaggcggcgcggctgatggcccgcgaggcggaggatgacagcgacgaccgctcaggtggtctgatggcgcttatccagaccgagatgattgatatcttcatgcgtctgaaggccgtcgagggggatgatccaaaggagaacgagaagcgcgcgaagctgctggcgattgcctcgaaaaacatcgccaccctgacacgcgcctctgtgaacctgaaaaaattccagctggatgtacgcgacaagctgaatgcgaaaatggacgaactggagcgtcaggccaaaggtggtgatggtcgtctgagtcttgagacgctgaagctggttcgcgagcagatttacgggattgtgtcatga

SEQ ID NO: 385173 - DNA, 1317 bp, Salmonella enterica
atgagtgccgccattcagttacacccctatcagcaggcgtggttccttgaccgcgcccgcttcaagattggtatgtttgcccgtcagaccgggaagacgttcaccaccacgcttgagctggtcgacgactgcttcgaagtggaagccaccggcgggcgcacccgctgggtgatcctgtcgcgcggggagcgccaggcgaaagaagccatggaagaaggcgttaaaaagcactgccaggcttacagcatggttgcgcaggaagttgagagttattaccacgccgcgaacggtgagcgctacaccatgctggaagcggtcctgccaggcggctcccgtatcaccgcgctgcccgccaacccggataccgcgcgtggctttgccgccaacgtctttctggatgaatttggtttccatgccgacagccgcaaaatctggacggcgctgttcccggttatttccaacggctttaagctgcgcgtcacctccacgcctaacggtaagggcaataagttctacgaactgatgaccgataaggcactggatgccgtctggtcacgccacacggtcgatatttaccgcgccgtggccgatggtctgccgcgcaatatcgacgagatgaagctggcgcttaacgatgaggatgcgtgggcgcaggaatttgaactgaagtggctggatgaagccagtgcgtggctctcctacgaactgattgatggtgtcgaacacgacatggcgggcatccctgaacactacaccggtggtccctgctatgtgggcgttgatatcggtattcgtcatgacctgtttgttatctgggtgctggagcaggttggtgacgtgctgtggacgcgggaaatcattacgcgtaagcgcgcgacgttcgccgagcaggacgcgctgctggatgatgtgttcttccgttaccgcgtgttgcgctgctgtatggaccagaccgggatgggtgaaaagccggtggaagatgcgaaacggcgctacggggatatgcgggttgagggggtgatattcactccggccaacaagctgacgctggccacgcgcgggaaagaagcgtttgaagatcgcaaaatccgtatcccgctgggcgatacagaaatcagaagcgatctgcacaagctgcagaaggtctccgggccaacgggccagccgcgctttgtggcggagagtgacgctgccggtcacgctgaccgggcgtgggcgggctttctggcgctgaatgctgccggaacggacaacgggccgaccatggtgtactcgcgcggttcgcgccggatgccgggcattctcagggggtattaa

SEQ ID NO: 385174 - DNA, 1530 bp, Salmonella enterica
atgagcagcgttaaagggctttatatttcaccaacaaaatttgtcagctttgccgagcgcgacaagcgccgcctcactgatgagatagcctcgcggggtaataccgtctggggctttggctcgttctttggcatgctgcccaatcctgacccgatactgaaagcggcaggaatggacattcgcgcctatcgtgatctgcgtgttgacccgcttgtcggtagcgccattcgccgccgtaagtcagcggtgaaggcgctggagcgcgggttcaatgagggcgataccgacacgccggtctgcgagtttttaaaggagatgatggctgcgtgggatatggacgccatcatcggcgggctgctcgatgcgccgctttttggctggcaaccagccgagctgatgtgggtgaaggataacgggcgcttcacggtcagcaatatcgtcgccaaaccgcctgaatggttccatttcgatacggacaatcagctgcgctttcggggtaaaaacgggccgtctgagggtattctgcctcctgactataagtttatctgcccgacgcaggatgcgacctacgataacccttacgggttcgctgacctttccatgtgcttctggccggggatgtttaaaaaacacggctggcggttctggatgcagtttgttgagaaatacgccacgccgtgggcggtgggtaaacatgcacgcggggccacacagtcggatatcgaccagcttatggacgggcttgagcagatggttcaggacgcgattgcggttatccccgaaggtgacagcgtcgaaatcaaggagccgatgggcaaaagcgcgtccagtgatatcttccaggcgatgatcaccatggcgcgcgctgaaatctcgatagcgctgctggggcagaaccagaccaccgaagccgagaccaataaggccagcgcgcaggcggggcttgaggtcactgatgatatccgtgacggtgatgcggcgattgtggccggtgccatcaatcaggtgctgcagtgggcggcggagctgaacttcggcgatgtgccggtgccggtctggaacctgtgggaacaggagagcattgacgacacccaggcaaagcgcgaccagacgctgagtcagacgcgcggcttcttcaccgagcagtattaccagcgtgagtatggcctgcaaccgggtgacattaacccacaggcgatgatgctgccgtcatcctcatgggggcagatgccgctcaccggtcagccgtcactgggctttgcggagggcgcagcacgtgctgatgctaatgtccgggataagctcgatgaggcgctcagttcggtaagtgacaccctgatgaacgatgacgtgatggccccgctgctggccccggtgtttgaggcgatacgcaacggtgccacgcccacagatctgatggggcggttggcatcaatttacccgcagatggacggtgacgagctggtcgaacggctggcaaaagtccgcttcctcgcaaaggtgctggggattcattatgctcacggctag

SEQ ID NO: 385175 - DNA, 819 bp, Salmonella enterica
atgctcacggctagcgatattgcggtctgtatgcgcctgccgcccgaaaaaattattgaatacctcgccaaaaaagaggtgttcatttcgtgggactggcatgacttatggcaggaagagcacgcgggcgcgaagactatcgcgaaggtgacccgccttgatattctccaggatatttataatgcgctggagaaggctgcggctgaaggtaagtccgggcgctggtttcgaaaggaactggagccggtgctgcaggcgaaggggtggtggggacgcattaccgatgtcaaccctgataccggcgaagagcaggaaattcaggcgggcagtccgtggcgtctcgataccatctttcgtaccaacatgtcgatggtatacagcggcggacgctgggctgaacaaatccagaatgccgacgaccggccttacgggctgtatgtggccattcgggacagccacacccgtccggctcacctgctgctggatggtacggtactgccgctttctcatccgttctttcagaaatactatccgccgaacggctggggctgtcgctgcagcgtgataaccctgacggcgcaggaggtcaaagagcgcggtctctttatcggcggtcttgaaggcgtgctcggcgagaagatgcagctggtttcccgcaataccggcgagatgcgcccggtggccacctggacggtgggcggtaaaaccgtcagccccgaccccggcttttcgtataaccccggcgtggcgtttcgtcctgacctgaacaaatacagcgggccgctggcagaactggcaaaacaggagttgtcgcaatga

SEQ ID NO: 385176 - DNA, 573 bp, Salmonella enterica
atgagcaaaaaagacctgatgaccattgacctgaacctgactgacgtcacccggatgattaacgggatggcggaggccgggcgtgacacctccccgctgatgcgtaaaatcgccggactgcttgccgccacgaccgcgctgaactttcgggatcagggtaatccgccgtgggaaccttccgctgctgcgcaggcgcgcacaggggaaacactctcgcactttggccacctgcgccggagtatcactgaaaagtacgatgccggtcatgcgatggtgggaacgaacatagagtacgccgcgatacaccagttgggcggcacggtgaagcacaagccccgtgaaacgtcgctttactaccatgtggataaacacggcaatgtgtcgaatcagtttgtcaaaaaatccgtatcaaactttgcacaaaaagcccgtatcggggcctggacgcaggtgtttgtggcgcgtccgttcctccccgtcgatgccgacggcaaaccccagaaggggctggagcaaaaaattcttaccctggcgaccgattttctgcgtgaggccgcaaacgggcgcggttga

SEQ ID NO: 385177 - DNA, 1140 bp, Salmonella enterica
atgaatctgatccatatctttcgcgccggtacgcataccgatatgcatggtcggcaaatcaacttcagcgacgccgacttaaatgagatcgcgcaaagctacaatccggccctgcatgaagcgccggtggttgtcggtcatcctaaaaccgatgcgccttcttacgcctgggtgagcgggatcaaaaaagaccgcgacggcctcaaggccgagccgcgcgatatcgatccacagtttgccgagctggtaagaaagcgccgctacagcaaagtgtcagcttccttttattgtcctgactcccccggtaacccgacaccgggtaaatactacctgcgtcacgttggttttctcggcgcacagccgcccgccatcaaggggttaaaacaggtttccttcgctgaagacgaagaaggcgtggtggagtttgccgactggagcctgcagaccaccgcgtcgttgttttcgcgtatcagggatttcatcatcagccagttcgggattgagaaagctgacagcgtggtgccggactacatgattgacaccctgcgcgatgaggctgcacgcaccacaacgactgacccaacacctgcattttctgatcctgtcgggataccggcagaagacgctacccaacccgtggccgaaaaaccggcccccacaccaccggaggaacctgccgtggataaagagttacaggcgaaacttcagaaagagaacgacgacctgaagcgccagattgaagaacgtaataaagcggaggcgctgcgtgtggccaccgagcgtcatagcgcaaacgtggcgtttgcggacagcctggtgagtgacgcgcgtctggcccctgccggaaaaggtctggtggttgccgtgctggatgcgctgagcggcggtgatgagccggtcagcttcagtgagaacggcagcgagcagccgctggtcgatgcgttcaaaacacagatgcagaaggcccgaccactgctggactttggcgaggtggccaccgctgacaacactgaccgtagcgccattccggctgagttcgcggaggccgacccggcacgccttgagatgcacaccaaagcggttgcgctgatgaaggctgaaaacatcacctacgagactgctgttcgccgtcttatttaa

SEQ ID NO: 385178 - DNA, 957 bp, Salmonella enterica
atgtcgtctgaatatttaaaaggtaagcgcgttgccgaccccatcctcaccagcgtcgcacgcggctataaaaatgcggactttatcagctcgtttattttcccgcgcatcggcgtggagaaggaaggtatcaaggtgccgacctttggtaagggcgtgttcgccacttacgagaccctgcgcgccatgggtgcggcaagtaacattgccatccgcgagaagaccggcgtgatgggtatcgtactcgatgagcacgatctggcgttcccggtggactaccgcgagcagcatgagtcgatgttcaacgagcaggcaaaggccgtcaagcgcgcccgtaacggcattctgttaagtcaggaggtggcggcagcggcgatggcgcagaacaccgcgctgtacctcaaagagaatgtgcgcaaatttaccgccgctgacagctgggccggtggtaaaggtgatccggtgcgtgatgtctcttccgggatggatgcggtacgtgatgccatcggcctgcgtcctaacctgatggtcatgggggcaagcgtgcttccgctgctgcgtttccatcctgccctgcaggcggtgatgggagccaacgagcgcaagcgtattaccgtcgagctgatgaaagatattttcgagattgaaaatatcgttatcggttatccagtgaagcttgaggacaacgacaaaaaggatgcggcggcgaagaccgtcgatatttggaaagacaacctgatgctgttccacgtttccgggccgcagaacgaaggcgacaacggcgacgagaatgagccgtcgtttggctacaactttgagctgaacggtctgcccattgccgatacctacaccggcgagggtggcaaaatcagctacgcccgctataccgacatctacaaaatggcggtggttggcggtgacgcgggctacatcatgaccaacctgaagggggcgtaa

SEQ ID NO: 385179 - DNA, 342 bp, Salmonella enterica
atggcaacgcaacaggtcattctggccactaccatcatcgcggcaggtgcggtgacacagcagcgtctggtgggctatgacggcaacacctgcgcgaaaggtgcaaaagcctttggcgtggcggaggttgacggtgttgaaggtgatgcggtgccgttgaacgtgctgggcattatcgccgccgaagccggtgcagccattaaccctggcgataagctgcagtccgatgataacggctgcgtcatcccgctggaggcgaccggcaagcccgaacaggtcggcgtggccatcaccgctgcagccgctgccggtaacacgcttcgcgtgatgtggggtgcgtaa

SEQ ID NO: 385180 - DNA, 492 bp, Salmonella enterica
atgtactgctcgcaggcggatgttgaaaaggtcatctcccggcgcacgctgcttcaactgacgaacgatgcgtctgctgatgcgccggtcgccgatgatgacgggcgggtgttctcccgaccgcaggcgtctgttattaacagcgatgtgattgacgatgccattcgcagtgcctgcgagctgattgatgcgtacctgcgtcagcgttacgacgtggtcgcggtgaaagcctccagtcccacggtgctgcgtgatctggccgttaatatcgtgcgccagaagctctacgagcgccgaccggaaatggatgtgccgaagaccgtcgagacgtcgtacagcgccacgcgccagatgctgaccgacatcaaaaacggcgcgctcaccctcggtatcaacccggacgggcaggatatgcctgaccccggtcagatacgcgtgaagtcccgtccggcggtactgggtggtccgggcggctggctggagaaatactga

SEQ ID NO: 385181 - DNA, 462 bp, Salmonella enterica
atgaacaccctgaagatactgaatgccacggtggcaaggctgcaggagaaactgcctgcgctcgactgtgagctttacccggatgacccggagagctaccggctcaatcacgataccggcgcgctgctggtcagttacagcaatgccgactttggtactaacagcgccattgactgcgtgatgcaggagcagccggtgcgcgtggttatcaccctggtctttcgtgagctgaacacgtcgaccggtgccattcaggcgctcgatgagacccgccgcgcactggccggattccggcctgcaggatgccatgccccgtatgtgctggtcagtgaaaaatgtctcggctttgcgtccggcgtctggatgtttgtgctggtcgtgcaggcgcgaacgatgtttgtgcaggatgaccctgaagagccggaaggcattcccgcgtcgctttatgaggatgaagaataa

SEQ ID NO: 385182 - DNA, 216 bp, Salmonella enterica
atgaaatacatttacagcggcccgccgtccggtgtgagcctcaatgacggcgataccgtccgcgaggtcatgctgtggccggggcaggaagtggaatttgcgccggataatgagtacgcgatggcgttagtggcggaaggtcacctgcaggaagtgaaagccccgaaacgccagactaccgctaaagatatcccgtccaccggaggtacacagtga

SEQ ID NO: 385183 - DNA, 1437 bp, Salmonella enterica
gtgaacagtcagaaccctaactggttccacggcgcgaacacccgcgagaccctcggcggcccgcgtccggtaaaacaggttaaatccgccgttatcggcctgattggtacggcaccggctggcccggtcaacacgcatgtactgattgactcggagaccgctgctgcgcagtacgggccggagctgccgggctttaccattccgcaggcgctaagggccattgccgaccacggcgtcatgtcggtggtggtgattaatgtgctgaatccggcaacacacagcagccgcgtaacggatgaggttatcccccctgaaggtggtgcgaagcttgctcacggcatggtcagtgaggtggtggtgaaagacgccaccggcaccaccacgtatgttgccggtaaggattacaccctcaatgcctcgtccggcgtgattacccgactggctgatggcggcatcatggccaccgatagcgtgaaggtgtcttatacctggcttgatccatcaaaagtgacagcggcagatattatcggttcggtgggtgcttccggtcgccgcagcgggattctggcgctggatgatgtcttcagtgacctgggctttgacagcaaaatcctgattgcgccggtgtactgcacgcagacgtcggtgacggcggcgctgtcggtgatggccgataagctcggcgcggtggcgtatgtcgatgcgccggtgggctgtagtgttcagcaggtactggccggacgcggcccgaaaggcaccatcaacttcaatacgtcatcagatcgcgtccgtctgtgctatccgcacctgaaggtttacgatccggtgacgaacgccgaccggctggagccgctgtcagtgcgtgctgccgcactgcgtgcgcgcgtcgatctcgatgaggggtactgggtatcgtcctccaaccacgagatcaaaggtgttaccggaatggagcgcccgatttccgcgcgtatcgatgacgcgacctgtgaggcaaacctgcttaacgaggcgggcgtcaccactgtttttaacagttttggcacagggattcgtctgtggggcaaccgtaacgcggcatttccgacctcgacgcatatcaccagctttgagaacgtcagacgcacggcggatatctttaacgagtcgctacgtctgacctcgctgcagtatgtggaccagcccatgagtgatgccctgatagataatatcctgggtacggcggagaattacgcccgcaccatgtcaggtgatggcgcgctgctgggctttaaggtctggtacgacaaggcccgtaacacccgttctgaactcggctccgggcatctgcgtatcagctataaaatcaccccctcgatcccgatggagtggctgacctatgaagcagaaattaccgacgagtacgtgatgaacctgaaaagcggaggcggcaaatga

SEQ ID NO: 385184 - DNA, 525 bp, Salmonella enterica
atgaccagaaaaatcgcgcgtaacatcatcactaacgccaatatctatcttgacggtaaaaacttcctgggacgtgccgaggaggtgaagctgccggatattgcgacggtggttcaggagcacaaggcgctggggaaaatcggtaaggttgagctgccctacggctttgacaaaatggaaggcgaaatcaagtggaatggcctgtacccggaggccgcaaaacttgttgccaacccgtttaaggtttaccagctgcagctgcgcgccagcgtggttcgctatgctggttccggtcgtcaggatgaagtgccgctggttgtcacactcagcgtgaactttaaaaaatccccgttggggacgttcaaacaactggaagcgccggacctgaactcggaatacggctgcacctacgtcaaaatgatgctggacggcgaagagattctggagctggacgtggacaataacattttccgcgtcgacggtcaggatatgctggccgactacaatgccaatatcgggggctga

SEQ ID NO: 385185 - DNA, 279 bp, Salmonella enterica
atgctgaagattgaaaaaagtcacattgacgccctggcggacagtctgacattccatacttatcatttccccggcaccacctgcacggtggccattgcggtaatgcccgatggattcgtggcgggaacggggaaaagcgcctgtattgatccggcgatgtttaacagcgataccggttatgatattgctgttgagaacgccagaacggacgcggttaaccggttgtgggagatggaaggttaccgtctgaagcaggccgcaaaacagaacaccctgtag

SEQ ID NO: 385186 - DNA, 318 bp, Salmonella enterica
atggaaaacacccatacagcagataacaccagtcagtcccccgttaaggtgcaggatacttgtgttgataactacacgctaaaatacccctacaagctcgccactggcgaaatgctcacctgcgtcaccctgcgtcgcttaaaggttgccgatatgaaagcggccaaacgacagtttaaaaactcagacgaatgggatgaggcgcttatcgcccgcatgacggagctgaatcctgaagatttaaccggtatggatctggaggattatcaggcgctgtcaaaacgatttcgacagttcgccgggctggctgacgagtga

SEQ ID NO: 385187 - DNA, 267 bp, Salmonella enterica
atgtattttgttattggcgtttatattattgccgtgctctccgcgtatggttatgtagcctggtatgtggtcaccgaatttattctctcaggacagacgggaatcctcggtggcattgctttatttattattggcggtctggccgttttctttattcaggccatggtgacaccgctgatgtatccgctggcatatattgccgaaggtatctggtggctgatgaaaaaagcctggcacggcattatccgtcgccgtactcacgcttaa

SEQ ID NO: 385188 - DNA, 2619 bp, Salmonella enterica
atgtccacatcgttttcattaggtgtcgttatcggggctgccgtctccggttcatttacctcggcgatggggactgcgcaacgcacgctaagtaaactcaccgacaccacctcccgccttaaaaaccgtcaggacgccctcagtcgtgcttcagaacgctatggtcagattggttccggtatcgctgaccgcctgcgcagcagttatgacagtgtcggtgacagcctgaagcgcgtcgaataccagcagacgcggctgctgaaatgggatgcgaaggtcaacaccatgctgctcaagcgccagcaggtgatgtcagaacttcgggggcttgttggcggcgtgacggcggctggcgctctggcattaaaggccacagcgacttatgccggggaagagacgctggtacgttcaaccagtcagggggcgcgtaactatgaccgggctgaagagcgtcagttgctggctgacacccgcacggcctcccgcgaatcttcacaaagcgtcattgaacttttaaaagccacggatgacctggtcgatctgtcctgggatcgtaaggacgccgccaggctgagcgatattatcggtaaggtggcgaccgtctataacatgggtacgcaggacacggcgaaagtggccgatgtgctgacccataacctcggctatgacaatgacaaaggggtacgtcacgccctgaacctgatggcagatgccggtaacagggtgggctttgagttcccggatgtggctggttcgtttaaccagattgctgagtcattccagcggcgagggattactggtgacgaggcggtgacggagatattttctgcgctcggtacagcccgccagaccatgcgcgacaagggggaaacagtctcagcgctgcagggctggatgaataccagcgacggacgccagatgactaaacgcttcgatatcatgggtgtcgattacgcccgctcccgcgctgattatatgaaaggcggtatgtcggattttgaggctggcatccgggtgacgcaacgctatctgaaagagcttcagggcggcgagttcatgaagaaattcagcgcgctggaaggtgacagtgatgcacaaaatcagttgatgcaggccttcggtatggggcagatattctcatccccggaacagattaaatttatcaatgccatgaactggtctgagtatgagaaaaagaaacagaccgtaaaaaaccaggctgaccccaattacctgaatatggcttacgatcagaaggcagatacgcttggcgtgcagggtaagcagcttaaaaacgagctgagtattctgtcctcgacgttcggtgaagcactggccccggtggtgcgtgagaatattgacctgctgaagggctggcttaccactgcgactgactgggtaaagaacaatcaggcactggtacagcactacgcaaggcttgctgtcactgccgggaaatacttcctgatggtgcgcgggggctggctcatcagcaagctcgtttacaacagcacccttggctggctgttcggtcttgtccggggtgggtggcgtggtgttgcaacaattgtccggctgacccatgaataccgcacgctgggtaaaagcacctcgacgctgtttaacctcaccatgaaagccggaggcggcttcaaaatgctgtggggcaaaatgcgcggactggggccgctggtttccagactggctaccggcgctggtcgtctcggtcgcgttctgggcggtggtcttctgcgtggtctgatggccaccggtcgcgccgtcctgtttattggtcgcgcgttactgatgaatcccatcgggctgctgattaccggtattgccgttgcggcataccttatttaccgctactgggaaccaattaaaggattctttacccgtctgtggacgggcattgaaaatatcggtacgcaaatctggtcatccattaccggcttctttaccgaccgctggcaggagattcagacggcatttgacggcggtttactgggtattggtgaattaattattaactggtcaccgctgggattattttataaagcctttgccggggtattaagctggtttgatattgacctgcccaaaaactttaccgactttggcaaaaatattatcgacggtctgacgaagggaataaaagacaaatggaactccgttaaagatacctttaaagatttaaccgacggtattaaaggtttctttaccggcgaggtaagaattcaaagcccctcccgtgtctttatgggatacggcggttatatcgtcgaaggtctgcagctcggtatcaataatacagcatggaaagcggagcaggccgcaaaggggctggccgctaaaatcatgcccgatggcctgcgttcgccacgcattcccgctgtaccgtttattgctgatattccgcgtggtgccactgcaggcggtggtgaatcctctccggcaattcatctggtctattccccgtcagtacatataaaggaagcgacgcccggcacattaaccacggacctgataaagcaggcgttaaaagagaacctgccggaacttgagcgcctgctcgatgaaatcatgcgccgcaaagagcgccgcagctttgatgcgtaa

SEQ ID NO: 385189 - DNA, 891 bp, Salmonella enterica
atgtttgcattactgggtgacatcgaaattaacaccggcatttctcccgacaagctcgacgggacatatggcagtgattttgccgaactggaccgcatcagcggcaagccgggcctgcagtatatcgggggcaagctcgatgaatacagctggagctttgttctgcattttcgctattgcgatcctgccagcgtctggaatcagattaacgccgcacgactggcgcatcaggcgctggcggtggttatcggtacggagtatccggggtggtttgttattactgacgccacgcgcagtatcacgcttgcgacaccggatggtcagattcaggcgctgaccgtcacgctgacgttgcgggagtttacgggcgacccgaacaacccacctcagccggtcgccgtcagttcagcgttatccggtgtcggcgcaatcacaaagcccctgcagcaggcaaccggtattaccggcatgctgcacaccgccgtcacggctgcgcgtaccgcacagtcggcgctcagtaccgcctcaaacgtcgtgcgcgtggcccgtcagtttaaggacaacccggttgccgcgataagtcgcgtaccgggcatgataaccagcctgaataacgttaccggcccactggaaaaagcctttccggcgctttcggggttaagcgcacaactacctgaagcggcaagaatggcccgcgccggtagccagatagtttcactgattgatggtggtgctgacaccttaaagcgtattgacctgaagcatcccgctaacctttccggcgcgttcgacagcgtggccggtgccgtgggcgaggcgacagcggtgatgacggataactcgtcatacctgagcaagcttgcctcgcgcatgatcacccggagtatgtaa

SEQ ID NO: 385190 - DNA, 225 bp, Salmonella enterica
atgagcgataacaacggtatttttctggagcacatcaccaccgagggggagcgatgggatcacattgcctggcgttattatgctgacccgatgggttatggtcgtattgtgctggccaatccgcatgttgcggtgacgccggttctgccgggcgggctgcggctggctattccggtgattgacgccgttgacattactgaggagctgccaccatggctgcgatga

SEQ ID NO: 385191 - DNA, 1164 bp, Salmonella enterica
atggctgcgatgaacacgctgccggtgccggaaccggtctttgtgctgcggtacaatttaaaggacatcacgcacgacattactgcgtatgcgaccagtatcacctttaccgacaaactgagcggggaaagtgacgaactggaagtggagctggaagacagcgagcaacgctggcgtgatgcgtggtatccgggcatgggtgacacgctcgccctgcagcttgggtttaagggtaagtccctgaccgactgcggcgggttctccattgatgaaattgagctgtcaggcccgcctgacagcgtcagtatccgtgggcgttcggcaccggttacccgcgccatgcgcaccaggtcaaacaggggctttgagaacaccacgcttgcggccatcgccgggcgtattgcccgcaagcacaagctgaaactggaggggcagattgaaccgctggcccttgagcggatcacccagtacggcgagtccgatctggcgtttctcaaacgtctggcgcaggactacggctatatggtcaaggtcaccccggagaaactgatattttctcacctgggtaaactgcgggatgcgccggtcatccgtaccatcacgccacaggacatcagccactggacgctgcgtgacaccctgcatgaggtctataaaggcgggaagaacaagcaccagaacagccagacccggacgcttgtgacctacaaagcagatggttcgaaagatacccgccaggagaagcgcgcgcaggtgcaggttccgttccgcctgcccgaagaaagcgccggtgcggatacgctgaacacctacgagcgcgcgtcaaaccctgccgagtctcatgccaagggcaaagcgaagctcgacagtaaaaacgagtacaagcacgccgggacgctgtctcttggtgatggcgatttgtcactacgggcaggcggcagtgtcaccttatccgggtttggtcaggccgacggcaaatggctgattatcagcgcccgtcattccctcacgcgcagcagcggactgaccaccgatattgatattgcccgtggtctgaagcataaagcgggcgcgggtaaaaaacaggcccggaccctgactgtctttaaggcggacaataccactgaacaggttaaggctgacaagaggatttcgacgcgatga

SEQ ID NO: 385192 - DNA, 735 bp, Salmonella enterica
atgaacggtgtgatatttgcgaccggcacggtcagcgccatcgatccaaaaacggtccgcgcccgcgttcgtctgccggatcatgataaccttcgcacctggtggcttgatgtcatgcagaacaatacttacaaaaataaggattactgcctgcccgatgtcggcgaacaggtaaaggtgctgatgacccctgacggtgtcgagggggttatccttggtgcggtgtattcaagccaggatacaccggtcatcagcgacccggacaagcgccgcaccgactttgcagacggcactttcgttgaatacgatcgcaaaaataacgcgatggccattggtggtgcgataaagacgctcaccatcactactcacagtgatatcaccctgcagaccgacacgcagattaccgttatcgcccagaacagcgccacggttaagacgcaggatgccctcatcaatgccgcaaattcagcgaccatcaaaacccaaaaagccacggtagattcacctgaaaccgaagtcaccggcaatgcgacaataaaaggcgatcttctggttaaaggcagtattaccggtcagggaggcatggcgatttccagtggtaagggaggcgctgcggccaccattaccggcagtctgtcggccaccggtgatgtttccgcaggtggtacatcacttaaacgccacgagcacccaaaaggtcacaacggcgcgcccaccggtccgccgtcctcataa

SEQ ID NO: 385193 - DNA, 363 bp, Salmonella enterica
atgaatacgaacagttcttctcagtcacagccgctgtggtggcaacccgcactgggccgcgatggccgggtgaccggtgctgcctccgttgcgcagtgtatccgtaccattctgtcaacacccaaaggcagcgatccgctgcgaccggagtttggcagcgatgcgtacctttatcttgaccagccggtccctcgcgcggtgccaaacgtcattcgtgagtctgtcgatgctattcgtcggtgggagccgcgctgcctgaatgtgcgtgtaaaaccggttattgccggtgaacacgtcacgctgcgggtgagctggcagttgcaaagcggcggtgaggagtatacggaggtcaaatggcgctag

SEQ ID NO: 385194 - DNA, 1110 bp, Salmonella enterica
atggcgctagcactggctgaaccggtctttctggaaacccgcccggaagtcattctgcgcgaggttattgactggtacgagaaagaatccggtaaaaagctctatcccgccgatgatgaggcgttgctcatcaacatggtggtttaccgtgagtcgctggtccgcgacattatccaggatgtggccgggcagaatctggtggccatagcccgtgcgccgatgattgattttctcggccatatggtcggggtgtttcgtctgcctgccgttcctgctgtggcaacactgaaattcagtgttgatgaagcgcctgcaactaacattcttatcccggcaggcacgcgcgtcagcgccaccgacagcgttatttttgcaaccgacagcgacgcattattgctggccgggtcactcagtgttcaggttcatgcaacctgtaccgacgcaggcattgccggtaacggctggcaacctgctcaaatcagtaacctgctggatgatattgacggtgcggatttgcaggtcgtggccatcgcacccagcgccggtggtgcggatgctgaaagcgacgatcaccttcgcgaacgtatcattctggcccctgagtcattcagtaacgcaggctctattggggcgtaccgttttcatgcgatgtcagcacatcaggatattgtcgatgtggccgtcacgtgcccgcagccggggacggtgaaactgacgccgctgatgtcatacggcatgccggaccaaaccattctggatgcggtcgacggtatttgttctgacgagaaggtgcgcccccttacggataccgtcatcaccagcctgccggatgaggtgacgtattccatcaacgccacgctgattgtgtatgacaatcaggatgaaaaaacggtactgacgcaggcgcaaagcgccattactgagtgggaatccggccagtcgtcccgccttggccgggacattattcccagccagatatccgccgcactttccgttccgggcgtttacaaggtaagtctggacgcgctgacagaacgcattctgactgaaacacagtgggcgcactgtctcgccattcgtctgacgccaggaggaaaggtacatggctga

SEQ ID NO: 385195 - DNA, 573 bp, Salmonella enterica
atggctgagaacaacaatctgccgctggcccctccactggctggtgataaacggttttccacgctggcaaaactggctgaagcgcgtttctccggtatcagtctgacaccgctgctggtttatctcatcgatatgaccgagaccactgccttgccgtggcttgccgggcaattgtcactgaccggagataatggctggagccttgccgagtctgacgaagcaaagcgggaactcatcaaaaacgccatcgagctgtttcgttataagggaacgccatggtcagttcgccaggttatccgcggtctgggttttggcgaggtgcagattattgaaggtggcgacgggcttgatccggctatcgccatgaagtggccaactgacacgcactgggctttgtatcgcatcaaactgagccaggcagttacaaacgatcaggcccggctgatgcgtaaaacgctggcggcatttgcgcccgcgcgttgtgaactggcgagtcttgattttgtcgccgcccccatccgttacaacaatactgcccgctatgacgggacttacaatcacgggagcgcctga

SEQ ID NO: 385196 - DNA, 225 bp, Salmonella enterica
atggcttttttggtggcggcaagcccgacgtcttccggcgtgggtttgttcagggtgttgaagtccctggaccatctgaattttgccgttgtggtggtgccgtcatcgaatttaactcccatccagctaatttcaggagtgctgacctgtatcagtctgataacagccccttttctgttggggttgtttgacgagttgtccagatttcccgcaacctcaagataa

SEQ ID NO: 385197 - DNA, 993 bp, Salmonella enterica
atgagtcagaatacgctgaaagttcatgatttaaatgaagacgcggaatttgatgagaacggagtagaggcttttgacgaaaaagccttgagtgaagaggaacccagtgataacgacctggctgaagaagagctgttatcgcaaggggccacacagcgtgtgttggacgcgactcagctttaccttggtgagattgggtattcaccactgttaacagccgaagaagaagtctattttgcgcgtcgcgcactgcgtggagatgtcgcttctcgccgtcgcatgattgagagtaacctgcgtctggtggtaaaaattgcccgccgttatggcaatcgtggactggcgttgctggacctgattgaagagggcaatctggggcttatccgtgcagtcgagaagtttgacccggaacgcgggttccgcttctcaacatacgcaacctggtggattcgccagacaatcgaacgggcgattatgaaccaaacccgtacgattcgcttgccgattcacattgttaaagagctgaacgtatacctgcgcaccgcacgtgagttgtcgcataaactggaccacgaaccgagtgcggaagaaattgcagagcaactggataaaccggttgatgacgtcagccgtatgcttcgtctcaacgagcgcattacctcggtagacaccccgctgggcggtgattccgaaaaagcgttgctggacatcctggccgatgaaaaagagaacggtccggaagacaccacgcaagatgacgatatgaaacagagcatcgtcaaatggttgttcgaactgaacgccaaacagcgtgaagtgctggcgcgccgtttcggtctgctgggatatgaagctgcgacactggaagatgtaggccgtgaaatcggtcttacgcgtgaacgtgttcgtcagattcaggttgaaggcctgcgccgtctgcgcgaaattctgcagacgcaggggctgaatatcgaagcgctgttccgcgagtaa

SEQ ID NO: 385198 - DNA, 903 bp, Salmonella enterica
atgagccaaaacttagattcaacgttagaaacatatatttcctggcaactagagcaattcaaaggggagttttttcctaattgtgatgttatagcatattatggtggaattttcccttggtcaaaagacgtttaccagcctaaactagagtcaatcggtcaaatggcaagtaaccgtcttaacagatttctcgtaattatcctcaacacgagcggtggttacgttgagtcagttgaaaaaatggtcgaaataacaagacatttttatcaggaagtatattttgtagttcctgacatagctatgtctgcgggtactatatggtgtatgtctggtgacaaaatttacatgaactatgcctcttcattagggccgatagacccccaggttcagtcctcggatggcaaatgggttcctgccttaggttatcttgataaagttgaggaaatgattgccaaatccagagagggtactataacgcaggcggagcttatgatgcttggtcagcttgacctcgcgcatttacgtagatatgagcaagccagagagctctctatagacttgctaaaaaaatggcttgtagagtacaagttccgtgaatggacagtacatcaaggtgacaagaaacttggtaagctggttacccacaaagaaaaagaagccagagccaaaaaaattgctacggcactcagtgacaatggtaagtggcattcacatgggagaactattggaataaatacacttatcaacgagttgcgcataaaaatagaagatttcacttataacaaaaactttgatattgcgttaaaaaatcttcacggcgtaataaatgagtatatgtttaaaacaaaccgacaggtcttagttttatcttcattcccattttcagatccaaccgaggcttaa

SEQ ID NO: 385199 - DNA, 171 bp, Salmonella enterica
atgaataaggaaaaatcattaacaaatcaggtggaagaaatgttaaaaaatcaaaaagttaacgaacaaagtaaaatgatacaatcattgaaaaacaatggcttaattaacaaacctgtttttaatttagcatacggaccagatgttacaacttaccatacacagccatag

SEQ ID NO: 385200 - DNA, 8298 bp, Salmonella enterica
atggcatatcagcctgaaatcatgcgccctgaattacagcgtgctaacggtaatcgtaatggactgaatattcagcagcctggtgaaaatgactgggctactgattttttcagcaatccggagaatgcagtcgatcgcagcaaatctttcggcctgggtgatgttttgccgtcagtgggcgttggtgccgctcagtccgttcagggaactggtgaactggcgagaggcctcggtgacgggctggttaacagtccggtaaaaactgccgccagaatcgagaatgaattacttaaactatggtcacctggtgtttccactataaatgacatcattccgggggcgggtaaaagcgttgatgaaaccattgatgcgctccctgatggtaagaacgcggtaactgacgcgataggtaaaggacttaaagttaccgggaagggcgtgagcgatgtcgctggtgctgtcaaagactggtcttacgataagatgtcgccgggcgcacagcgggcgctgaataccccgatgagcgaaggctgggatgattctgccgtatgggtggcaaagggtacaaacctgattggcagcctgttacccgatctggctgcgggagggctcactaaaaaggtcggagaagttgcgctgaaaaaagcgctgaccagtggacttgagaagaaatttattgcttccggactggcaccagaaaaggcgggcgttctggcagctaaagctgttgaagaaaaaatgcctgatttgttccaggcaggaatggtgacatcttctaccgccagcgctcagggttcgacggcaatgaatgcggctcagtcgattcttaatgctgattactccgaactttcaaagtcgccaaaattccaggaggcgttttacgctatcgatgatgaccctcagtatgctgaactcagcgaccgccagaagatggatatggcgaaagagcgtgttgctgatgaggtgcgtacacaactggcaacagacccacagtcgctgatagtcaacgcgctggcggcaaagctgggtgatgctcaactggtcaatctggcattacgcggaacggcaaaaagcgtagccagcggtgttgcccgcaacatggcagaacaggcagggattaacgccgcgcaggggggcttctcccgctatcaggaaaacgcagcgctgcgtgatactgccggaatggatgtgcctgaatggcagggtgtgggcgatgcagcttttgaaagcggagttatgggcagcgctttgggtgcgccgtttggtgcaattgcaggtcatcgcggtaaaagccaggcagaagccggagtaaatgccagaaaagacgcttcccgtcaggctatggatgaaaaagccgcccgtgctcaacagatggccgaaaattccccatacacgaagcccgccgatcccgttgaaggttatcgccagcagttttccggtctgagccgcgacgaactgttacagcattatgctgatgctgaccttgcccacgaaaatgatgctgatgcggtataccgtaaacatgcggctaacggtcttctgaaggagatggatcgtgctgaccagttgaagggcattattgatgaaatgcagggtaagccgcgtaatgaggtactgaaggaataccgcgatctcaacgagaaagacaagcgcaacgagacagaacaaatgcgctgggaagccgcacgtcaggtactgaaacctcagcctaaagcacaggtggaacaaccgcagccagcacagaatacttcccccaaaaataccgcacgtcgtccactatatgatgcagataatctcgatattccagcgtttatgcgtgatccgcgcttccgtgatttcactgacgagccaacggaggttcaacagcatctgacccgtggtaacgcgccgacgccggaagaactcgttcatgagcagatgactaagggggatgcgggaccaactgagtatgagatggcggagcgtccccgcttaccgccgccgggtgatatccatccgggacagggctatccgctgccgggtgaagtgcgccatatgcctgatgagtctcccgctggccgtggtgggcgttacaccacgactggcgaggtccgggggcaaagctacgagaaaggccgtcagactgttgcgcctgaaggtgtgcagcgtcagggggaaacattccagggtgagcagtctcatcgtgaattgcccgcgccagaacgtcaggggttgccacgtcaggaagcggctgaaccggaagaccgggagcaagtatccgctgaacagcccgataactcgtcccgcgagcaggaacggcaggcggaagcacagcgccttgaggaagatgttgcgaaaaaactcgcagagaaaaaagagcgggaaacgcaggaaaggaatgatgctatccgtaagcgtaaagaaaggctgtcgtcgtatctggattctgttgatgagaaaaaaagggatatcgcccgcgattttctgcaccagggtttaaacaatccgttcggcaaagggcagttatatatttccgatctggtggagaagcgcgttgatgacggctggcgtatcaaaaaggacaaggatggcaggccgcaacgactcgtggggtcgaatggtgaatcgctggatgcaggggatataactcagtatggactggattatgcagatcacattctgcgtactgaaaaatccggcgaaaaaattgatgatttcggtgaagtgatccacggtgcagccaaacatcgccgtgcggcactggctgaagaactgaatacggataaaacagcggaagattatcacacgcagccgttcagtaaactgttccctaaacccgattatgaaaaaatggctgccgaagggacggacaacaagacgctggcgatgctggcgctgttacgcaacatgatacccgcaaagccccgtgtctctcatcgcctgaatcgctgggcgaaacaggttgaggaagtgcgtgataccgccggacaactgctggatggcagtctgtccgccgataagttcattgaccgtatccgccaggaaagaggttcgcattacagtgaaatagtgaaaacctgggagatgttacaccggctgtcaccagcgcaactggatcaggcggcgggctaccgtgtcaaatctcatgcttacagcatgttcgatggaaaggagtacaacccgccgaaagtgtttcacaccctggaaaacgggaaaggccgccgggttctggactcagatgacctggacgatctgagtaaaaaagcgaaggcgtattttgaccagcaggccgcctcacctgaacctgccgacagcaaaacgaaactggatatctaccagaatcgccgtaccggggaagtgttcattgcgtacggtaaaaataaaaccccgcttcagggtggctttaaaacggcagcagaagcccgtgattacgcgaaaactaaccgtgctgaattgctggaaaaactgaataagttgcgtgaacagtcccgcgaggaacagcgtaatgcttccaaccgtgaccgcacaggcccggaacgtcgtgaaggtgatgtcacgccggataagttcagtgatgcgtttggcttccgtggtgtgcagttcggtaactatgttgaggggccgcgccgtcagtctgatctcaaccgtgcttacgattcgctgatggatatggctgacgtgctgaaagttccggcgaaagcgctttccctgaatggtcgtcttggcctggcatttggtgcgcggggtaagggtggcaaaaatgccgccgctgcccactatgaaccggatcaggttgccatcaacctcaccaaaggtaacggtgccggttctcttgcgcatgagtggttccacgcgctggataactatttcggtcagcatgatatcgctcaggatggcaatgttgtttccggcgataatttcatgaccagatggaacggtaaggcgtatgcgtctgctgaacatccagtgcgtcgggaagttcatgacgcatttaaaggtgtcgtgaatgctgttaacaaaagcggcatggtggaccgcgcccgacgtcttgatgaggttcgcagcaagccgtactggtccactgatattgagatggcggcgcgtgcctttgagcgttatgtgcaggataaggccaaagccgctggcgttgagaatgacttcctggttaatatccgtaaggccgatgaccacggttcacctgatacctatgcttatccgacgaacgaagatctggacggcggtattcgtcaggcattcgatcacctgttcagcaccctgaaaacccgcgaaaccgataaaggagtggcgttttactcacgtaagggcgtgaagcgtacgccggaaggtaactccatttccgatgccaaccacagcaaggaagccaaaggcagttccgttgcgaaggtaaaagccgtcgcgcgtggcgtgatggaccgcatcaaggataacaccctgaatgtgcgggtagtgaagtcgcaggctgaggcgcagggtctggcgggcgaatcgttcgacggttacggtaaggttcatgccttctatcgccctgatgagcatgaaatcgtactggtcgctgataacattcctgatggtcgcactgtacgtgaaaaattacgtcacgaaatcattcaccatgcgatggagcaggttgtcacgcctgctgagtacaaaaccattgttgataatgtgctgaaaacccgcaacagcggcaatgcagccatccgtgaaacgtggcgtaaggttgacactgactatggcaatgagtcgccggaagtgcaggctggcgaatttctggcgcatatggcggagaaggagccgggtaaactgggtacggcatggaatcgggttgtcgcgctgattaaagccgtcctgcgtcgtaccgggttgttccagccgtcagacctcaatgatattggttatgtccgtgacaccatccgcacgttaggccagcgcgtacgcgaaggatatgtaccgcgagaaggcggcgatgtgtcgtactcacgtacgggtaaacctgatccgttcaaagtgccggaaggagaaggtgagcggtatcgccgtgatttagcgaaagccgtaaagtctcaccgctcatccgatatcagcattacgataggccgtacccctccggtacttcgtcatattggcgcacctgatttaccgttggttatatcccgcgataccgtgcgtaaggctacgaatggcgtgaaacacgatgtaccgatggaggttatagagcaattgccggaattaatgcacgatcccgatgctgtttatcagtctgccactgaaaaaaatgcggtcgtgatgctgtttgatgcagttgataaaaatggcgatccggtgattggtgcggtgcatttaaaagcggataaaaaaggacttgagattaataaggttgcatctgtgtatggtgcctttcccagtaagatgagcaaaatggacagggaagggttagcgctgtacaaaaaacaaaaccctgataatcaaactgccggggtgctccaattgcacggggacagtgaccatcagggttcggttaataagatactctctcccgacgatatccgcaaggggccatattactcccgttccagaagcgctctttcgccggaagaaacactttccgcgcgattcgttcgttccatgcaggataaattccaggtactgaaagcggttcaggataatatccgcaaatcaggcggtaaactcgatgacagtaacgatgcgtatctggctgaagagttgttccacggtaaggccgaaaatgacctgaacgtgatgaaggagcgttacgttaagccgctggcaaacctgctggcgcagtatgacattcctcagtctgcccttgatgaatatctgtatgcccgtcacgcacctgaacgtaacctccatatcgcgaaaattaacccgaaaatgccggacggcggttcggggatgacgaacgcggaagcggctgggattatggacagggtgcgccgtagcggtaaacaggcgcagtatgaccgtctggccggaattgttgatgacatgctggcgcgtcgccgtgagttaattcgcgaagccggacttgagagcgatggtactgtcgacgcctggcaggatacctataagcactatgtgccactcaagggacaggatgcagacggtacggtattgccgcgtaccggaagaggctatgtgataagcggcaaggaaagcaaaatggcgatggggcgtaaatctaaggcacagtccccatcgacgcaggccatgcaggatttaaccgcttcccttatccgtagccgtaagaacgaggtgggtaatactctcctgaaactggtacaggataacccggacaaggactactggcaggtattcactgaccaaagaccggataccacgcgccggattgtggagaaaaatgacccggcaacgggtgataccattcgccaggttgaagagatgccagtagcaatggcattgatgtcagacaagtattttgccaccaaaaaagacggcaaaacgtactacatcaaacttcacgatgagcgcctgatgaaggcgatgaagaatatgggaccggaaacgggtaatgcggtgatccagacgctcgccagagtaaaccgctttatgtcggcgatgaataccagccttaaccctgagttcctggtcagtaactttatccgtgatatgcagacggcggtgatgaacctgaaagctgagcagggacgcgacgacggcaaactcaatggccgggatattgcgatgaagaccgtcagggacagcggtattgccatgaaagcggtatacgccagtctgcgggataaatcactgagcggtgcgggcgctgactggcagaaaacatggaaagagtttgtcgaggatggtgcaaaaacgggctggttccgcatggaagatctcaacgggcagatgaaggaaatggaccgtctggtgacgctggcaaaaggcggctggcaggggcagggcataaagtcctggcattcattcacaaaactggttgaggacgccaacaacgcagtggaaaacgcgctgcggctttctgcctataaacatgccagggatgcggggatatcccgtgctcaggcggcatcactggcgaaaaacatgacggtgaactttaaccggcgcggtgagcagggcattttgctgaactcgctgtatatgttcgccaacgcaagcattcagggtacggcgaatatgatgcggtcgctggcgcaccttaatggcagtggcccgttactggagcggttgcgctggggcaatctcaacatggcgcaaaagctggcgctgacggcgacaggtgccggatatctgctggcctccctgaaccgtgccggagccgggcaggacggtgacggtgagaactggtacgacaaagtaccggactacgtgaaggagcataacatcgtcatcatgaagtcgctgtttggcggcaaggctggcgaatactggagtattccgttgccgtatggttacaacatgttctacctgctgggcagtacggcggaaggcgtgacgcgtggcaatatgactgcatctaaggctgcgggtaatattgtcggcggtatgctgggtgcatttaacccgctgggcagtgaagactcgaaaacactgacgggtacgctgttcaaaaacgccgcgccaaccattcttcgtcccgttgctgatttgtgggcgaatgaaaacttcatgggtacgcagatttaccaggagaacttccccggaggtacgccgaagccggaaagtacgctcggcagacgttcaacgccggaagcgtataaggcgtttgcgggctggcttaacagtgtgagtggtggcagccagtaccgttccggtgcgctcgatatcaatcccgataaaatgaagtactggattgattatgtatcgggcggtatggggcgatttgcgggtaaaactatcgatgccgccgctaaatcgtacaacggcattgatattccgcctcagcaaatcccgttcctgggtaaaatatcagggaaggttatgccctatgccgaccagcaggccatgtatgaccatattgacgaactgcgccagtatgacgccgaactgaaaacgctgcggggcgctgaccgtacggctttcctcaacaaatatcgtggtcagatatcgatgaacggtattattcaccagtcgcagattcagcttaaaaacctgcgtaagcaacgggacgagatttattcagatccgacgctgacggccagacaacaggctgacagggtactgatggttgagcagaacatgaagaaagtcgtggatcggtttaaccgggagtacagggagaaggttggggagtga

SEQ ID NO: 385201 - DNA, 1359 bp, Salmonella enterica
atggacggatttgcaggaggtttactggcgggattcagtaccgttgataatgcgatgcagcagcgtaaagcgctggggttgcgtgaggctgcactggcacagcagcagaaaaattccgatcgtaattttcaactggctcaggatgagcttgggtatcgcaaagagacgggcgatcgagactaccagcatactctttaccgggataaaattgatgacgatttcaagaacagggagtttggacttaagcaacgagaagcaaattcacgtattggaattgccagtcagcaactggcgatgcagaagaaggaattcgatttcaggatgaacaatgcgaagtatttacaggatatgcaacagtgggaacctcataaccgtgttttggaaagtctgatttcacaagggaaagtccaggaggcaagggaatatgcgaagaacaacaacatgccacttacaattccggttgtcaaaatgctgaatgataccggatatacacagagtattttgagtggagggcaaaaactccacagcatcatgtcgtcgcccgatgcgcataaagacccgatggctacgctgaatatgataaacgagaacagggatgagatagcgccattgctacagactgaagccgatcgcgcgattggacaggttgacccaaaaaccgggcaaaaaatagtcgctgcgaagtttaaccatatagcccctgtaccggataaaaatgaccctaaacatcattctcctgatgaagttgccgtttttatcaaggtgaagtatgccaatggaaaggaagccataaaacccatcacggaaaatcgaagtgctaatccgaaagatccggtactgcgtgccaatatttatgggctgcttgatagctcaagttcccgtgtagttggtgcgcataaaataatgaactcgccgcagagtggtaattatgatgatgctattaccagtgcctatcagccgcaggggctttcaaaggccgatatccagaaagaagaggctaagatttatgcgagcgcggcaagaggtggctcagatggacaggtagcggtcgaccagttcgaggcgaggcttggaatacctggcgcgaaggaaagactacagcaggcgaaggcaaccgatgcggccaaaacatgggttaataacgacccgtcgaaactgaaatttgcacaaggggtgctcgctcagatgccggaactgtttgaaccgggtaacgagaagcagcttgaaatttatttccagaattacctcgaaagcaaaacggatcaaggcaaaacgcaaagtgccgtggtgactgctaaagacttacgtaaacgaagagagcagcaacaacagggtgattttctgtacggttcagactaa

SEQ ID NO: 385202 - DNA, 261 bp, Salmonella enterica
atgggatacggattacttgatgtggcaaaccagacgcggcagcaggcattacagggactgggagaagccgatcaactgaatgaacagcgcgagatgatgaataagcagatgaaagagcaggccagcatgcagcacaagcagaatattggtacaggcgtggcaacgggggcaatgattggttctgttatccccggtgtgggtactgcgataggtgcagttggtggtgccattgttggtggtctttttggctcatttatgtga

SEQ ID NO: 385203 - DNA, 453 bp, Salmonella enterica
atgagcgtgacacgtagaggtggagatccgaatctgatagggcgtgtttttgggtttaataacaagcactacgcctccgacacattcgcacaactcattcgcgagcagtatgacgactggcttaacaggtattatccgaaacaagaacaactcatgcaactcggcaccaatagtgagttgatgaatgcgcagcttggcagaacggacggcatagcggcaaacagtcttcggtctgcacaactcggaatgaataaccagatggcgcgttacgggactatcaggccgcagaatccgcaggataacaccctgggacttcgttcggcgctggcaatagccggtgcgaaaaatggtatccgtgaggcgcagcaggacagacagatgaacattctgacgggcggggcggcaccagtacgtcagcagcttaatatcggcggtcaggcacaggcagcatag

SEQ ID NO: 385204 - DNA, 651 bp, Salmonella enterica
atgggtaagggtggcggaggcagcggcgaaatcaaggagacctcgcagcagagggcacaggcagaaatcgcccgtaagcagtgggacctgtacaaccaaagactgaagccaatggagaacatcttcatgggtaaagtggataagctgaatgatgaggacaaataccagaatctggccggagtaacgaatctcggctatcagaaacagtttggtgacgtcaggcaccaggccgcgaatcagcttactgccgcaggtatcgatccgggcagcggtaaattccaggaaacgatgaacgatatttccggtgagcaggcgattggtcaaactgacgccaccaaccgggtacagtcctctcaggctgataagtacattgccggtttgcaggatgtggttgcgctgggggcagggcagaaagctgatgcgttgcaggggtacaacagcctggcggaaaatagtcttcgtaaggcaggcatggatgctcaggcggcatatatgcggcgtcagggtaatgcttcactggttggtgccggtctgggagcgctgggtggttatgccatgaatagattgggaagcggaggaaaccttacaccgaaaacggcaggtactggtgctaacgctattcagaactatggcaacggattcaatttttaa

SEQ ID NO: 385205 - DNA, 315 bp, Salmonella enterica
atgaaagagaagatggtagttatccctgatgaggtgacggacgtgataaatacagcgcaggataacttgcgtattctttatgacgggctgacgcgctacaaagatatttgtgaaaaaagtggtgacgtgggcgtgctgaatggctggacaagttctcttcgtctgtccaggaagctctttaacctgcttgaaagaacaagatggctcattgatgagcacaatattgattgtgattgtaagccaaaaggtgaagggaaattattgtcttcaccagaagaaatcaaggcatggtttgctaccttgcgagatgaataa

SEQ ID NO: 385206 - DNA, 372 bp, Salmonella enterica
atgacaaaactcgaacattacatgcaacgggtaatgactgatactggcaaccctgaactgctgaatgaaatacatgacgcctgccgtaaaaagcaggcgttttgctttggtgcgccggatggtcaactggtccttaaaccgatggtgaaagacggcgtcccgtacgtgctggtctggttggggatttgcgatggttatgacagcgtggcgcggtatctgccggaggtcaagaaattaacccgtatgtccggtggtcgctgggctgaatttcataccacgcgtaaaggttttattcgtctcgccagacggcttggatttgaacggatagcggatgatgaagacgggttcatggtgtttcgcattcgggtgtga

SEQ ID NO: 385207 - DNA, 153 bp, Salmonella enterica
atgaagccacaaaaactggcgctgatggcgctaatcgttgtcagtatcacgcttctcggagtgctgttactgaataacaaaaccctctgtgacgtcagcttccgaagcggcggaacggaggtggtggctcacatggcttacgaatccaggtaa

SEQ ID NO: 385208 - DNA, 1503 bp, Salmonella enterica
atgagtaaaaaaccgtggcgtgcaggaaaggatttagccgccgttgtcgaaaatatggagattgggaccggccagcgcggtgacggaaaagatgcgtttgtcacgcagcgccagcttgcagaactgaaactggcgaaaatgaacgccagcggcggaggtgggagagtcagccttacatccggtcttgggccggggattttccctgcgatgccacctcctgaacgtcccacaaagccggagggttttgaggtgacgggcggttttggctatgtgctgcttgagtggatgatgccgaaatataacggtcattccctcgctgaggtctggcggggtacggaggataacctttctgacgctgttctcgtagggacaacaccggggcaggtttacagcgatccggttgatccgggctggaaggggttttactggatacggtttgttaactcagcaggcgtgtctggtccgtataactcgcctgatggtactccggcagaaacgcagatagatgtgcaggccgtgattgaccagatacacgatgaagcggctaaatccccgattgttgaggaactgaaaaaggaaatcagtgattcagcaaaagctgtgaatgagcatatcgagaaaatcagtgaagatggtggcaaagcgtttcaggcgatgtgggcgcagaaagccagtgccgcaggaataacagcaggtattggtattgttgccgggagagacgcggcaggtaatccgattagccaggtggcaatagcttcatcgcagttgtttgtttttgacccgaacaatcctggtaatacggcgtacccgtttgcagtgtcgggcggcaaagtggtgatccagaaagcggttatttatgacgcagtggttcagactctcgctgcacagcgaattgtggctgatgaagttaaggttggcgcaacgctgacggcaccctatatcagaagtgggactatcagtaacggtaattttactgttgactcaaacggcaacatgaatgccgttaatgcgaacctgaacaatgttacctctcgaggaggtactttttacgatctgtatgcggtcaggggaacaatgagcaatgttcacattcttgagaactgtcagatagacgggcgcctgagtgcggctcagatttacggggatattgcgaagacgtacgttctgtaccagaacagcgtgtatattccaccgcagatgtttgatatgaacctaatatctctgggggatggaaggcctattcgttttaatggggttgatcaaacacctattatgagtatagatattactcctcctgtagtaacagaacacacttccggaggaagttcgggacatgcacatcatagttattcatctaaaggcggcacgtacgctcaagttttccgcctggagaaagggagtgctataacgctttccgcatgggagattcacaccaccaaccccttaaatggtcaaccttacgatgggtatgcttcggcgatcgtctggatgtcgaaagcttga

SEQ ID NO: 385209 - DNA, 378 bp, Salmonella enterica
atgagccgtttcacaactccggcaatccttgaaatgctgggccactataactggcgcgtgtatgagccgttcgcgttttacctcagtgatgacgaaagcgacgtgatagaagtgccggcaggctttattaccgaccttgcgacagtgccgcgcattttctggatactgttaccgccagacggcaaatacgctaaggccgccatcattcacgattacctgtacgacaacgcgctacgcacgaagaaagaagccgatcgcatttttctcgacggcatgacggtgcttggcgtgccgcgctggaaacgaacggtaatgtattgggcggtgcggttgtttggtcgggggaactacgaaaaacgtattaaggaatacagttag

SEQ ID NO: 385210 - DNA, 519 bp, Salmonella enterica
atggctatttacagcggctttaacccgatacccccggtaaagggcctgcatgttaagggaatgataacgctgggatctgacgtggttattcctgattcgctccttctgaaactgaaaccgcagaacagtaccgggctgggttccccgaccgttctgggcaatacgaccaatacccagcttccggagcgccgcatccttaatgtggtcaacacgtatctgaaaacgccactgaccgatgatgagctgaaactgatactggcaaaccgctataagtttgagttcacgattggtacaggcgacaggcgggaagttcttaaagagcgattcaggctgacaaccaactggcacggtgaagatgtgactaatttattgctcagtgaaccgtgggacggctggccgccttacgatttcacccttagtttttccggcagaacgggcagcatgaagctgacagacagccacgccagcggaaacacctacggtgctatacgttatcttactatcagggttaagccatga

SEQ ID NO: 385211 - DNA, 234 bp, Salmonella enterica
atgaccactacagcaaaaatgattaaccgggactggcagcagataacggacggtacgcagacaaaggtgattcagataaccggctcggcagacgtctgcgacagtccggttaagccgggtgaagagcaggcttctctcagtttcagtaatactgaactgaccattacgccacccaccgcgttgtggatacgcgcgtcgtggtttgagaggaatatccgggtggtgattttataa

SEQ ID NO: 385212 - DNA, 570 bp, Salmonella enterica
gtgctatttgagggcgaaactaacggcgacggcacaccgcattatctgcctttcaccgcagccgaacacgatccacaggattacgggcgggagttatttgccgatttgaaatcgggaaaatatggtgaagtaaaacccttcacagttacccctgaaatgctgaccgcagcaaaacaggctaaacatgccgaaatcagcgcatggcgcaatactcaggagagcggcagcaccaccttcagcctcaatgggcatcgctgggactgcgacaaatcctctcaggaacgtcttggcgcagcccttgccgccgctcgcgcaaatatgcttcctgctgattttttctggacggacgcagacaatatcgatgttccggttaaggcggcagaccttgagtccatgagtacagcaatggccgccacgatgttttcgcagggtttcaaaatccacgaacgccagcggcagatgaaagaggaagtggacaaactgaccacgattgatgatgtgagagcgtacatcccggactggccgccagcgccagccagcacaactgattcaaccggagccgggaaatag

SEQ ID NO: 385213 - DNA, 1188 bp, Salmonella enterica
atgccgttaacagatgctaaagtaaaaaacgcacgcccgaaagagtcaccctacactcttcctgatgggcatggtttatatctggaagttcgtccttctggcgctaagttctggcggtacagatactggataacaccaacaagggatggtcgatttaccataggtgagtaccctttagtttcgctttcagaagcaagaaaacatcgtgagtgggctaaagagcaagtaaagaaaggcttaaatcccaccgaagtaaaaaagctggaaaagcttaaacaagctaatgaggcggcaaacacgtttgagcttgtagcgaaagagtggattgaacgaaaaaagcacacctggaaagaagccacaaaagagcagatagagtcttttcttgcaattaatgtatatcctgcgtttggatcacgacctatcagggacgttacagcccatgacctgttggctgtattaagaacaatggaggcaagggggtctgtatcttcagctataaaagtaaggcaatggtgctctgctattttttgctatgccgttgctactttgcgggctgatgtagaccctgctgcggccctgaaaggtgctatcattccgaaaaaggttgtacactccagggcgttaacagccaatgagctaaaggatttttatgtgaagctaaaatccttcagtggcattaaaactaccgagatggcgcttagattactccctttgctgttcgtcaggcaggctgagctaagatatgctgaatggtcagaatttgattttggctccgccttgtgggttattcctgaaacaaaaatgaaaatgagaagaccgcatagtgttcctctttctgattctgctatcaatttgttaatgcaactcaaggatattaccggggcgaacaagtaccttttcccgaacgtaagaaatcctggtcgggttatgagtaatactacaataaatagggccattgaatatcttggttatccttcaaagttcatcacggctcatgatttcagggctacagcatcaacgcgtttgcacgaaatggggttcaggcatgacgttattgagcggcaactggctcatgtcgaacagaacagaaccgttgccgcttacaatcatgctgaatatatgccggaaagagtggcactgatgcaggcgtgggatgagtggctggtatcactaggcgctaacgattga

SEQ ID NO: 385214 - DNA, 207 bp, Salmonella enterica
atgagtaattttattaaagaggtaaaaatgtctagtcttcttagcgctaaagctgtttgccacaggcttgatatgcatcgggctactttgtatagaaagataaaggcgggagagataccagccccgttcaaagacggccccagatcaaagtggaaagaagaggatattcaggcgtacatcgataaattatctaacgtcaatcgttag

SEQ ID NO: 385215 - DNA, 147 bp, Salmonella enterica
atgcacaaagaattcgaaatatgggtgcgccaacgctacggctacctctatgatctgacgagagacgcagagggcgtttactgtcgcgagattgtacggcgcatgtttgatgtgtggcgctacttacgtggcttcgatgtggtgtga

SEQ ID NO: 385216 - DNA, 183 bp, Salmonella enterica
atgatgagtaaacgattaaaaaaggcaatctgcgttttcgtacttatctgcgcgataggtttgttttgtgcgctggctggcggtgtgcaatggggtacacctgaggcgggcaaggcggcattatctacttttttacccgctgtcattgttgctgtcgctttctatgtacagattatggagtga

SEQ ID NO: 385217 - DNA, 228 bp, Salmonella enterica
atgaacctgaaactgaaacttatccaggttgtgggtacgagttcgttctgcccacggcggataaagatgtttttactttggcgggtaatgagacaggttgaatgggaaatcaaccggacactcgcagaggctgatgtatcgaaaataaccccggagcagcgcgacgagctgaacgcgctcgttaacaggatgaatatcgcatgtggaaggaggcaaaatgatgagtaa

SEQ ID NO: 385218 - DNA, 306 bp, Salmonella enterica
atgtttcccgatgaacctgtaggcactgtctatcaccgtcactacaagataactgctcatgccataagccgctatgcagagcgaattggcggtgacgtgtgggacctgatttctgacctggacagttgctgggtattcgatgtggatcggaaagggatgaaccgtaatctgtgcgctgcggtcgtcaaacgagaacgcaaaggtggatatgccctgtgtaacgacagggtgatgtttctgatacagccaggacggcattacgccgtcttgaccacgctggcaatgaatcaaggggtggaacgatga

SEQ ID NO: 385219 - DNA, 237 bp, Salmonella enterica
atgactgacacgtacactaccgatgatgatggtctgaaactggcaaaactggtcgcttacgttgacgacggcagggattataccgcccgtattatctggcgcatgaaccgtaagcgctggttgcacgaaaaacggattatccccatgccaccagcgccaaaagtggcaaagggaaacgttgaggttaaaaagccaaaagtaaaacggcagcgccggaaagtgacggaggtggagtaa

SEQ ID NO: 385220 - DNA, 435 bp, Salmonella enterica
atgagtaataaaatcgagaaccctgtagtgtttatttataagcgcgaaaacggtgacacctacgccgttgccattaccagcgacagccagagctatcacgatgccttgttgatgacgtcaatggagccagacatggccggcgatgacatcgatactcggagtaaaaccggctactacatgacggcggagattgaacagcttcgcgaaaaactgaaacaggcagaagaaaaaaaccttcgcttactgggttttgttgactcttacgactggcagcgtcagcgcctgcgtgaagcggctgaaaaagttatcgcctggaacagacaggaagccaaagaccgttacggggatgcgaataaagcagaaacctacgcctgtgttcgtgaattacgtgatgctatcaaattctgcgaacaaaaggagaccggcaatgactga

SEQ ID NO: 385221 - DNA, 225 bp, Salmonella enterica
atgaaaatcgaattccaggactacggcacagtagcgaacgttgttatcaccagtaccgtgtttgagcttcgtaagcataaccgggttgtcgataccgtgctgtttctgacacctgaagttgtcagcaaaaacagcggattttttatcatgaaatcagttttgtccggcaaagtgcctcacgctttacgggcttacaggattgcgcaacaggaggcgaaacgatga

SEQ ID NO: 385222 - DNA, 402 bp, Salmonella enterica
atgcagggatcaacctacgcagtcacttttattgccaattacccggatggcgatcgctacccgcttaaaatcgagattggtgcttccggtgtcgaagaggctatcagactggctacagcaaaagctgaatcctcccgtttccagaaagagagcctattgctcatgtcggttattcccgatctgtgcccaccagccactgaagaggtaaacatcaatgggcttctcaagccctgtcccttctgcggtaacccgcacgtcagcctggtagaaactctccgtgaatttgatggcgagagtacctggttcgcaaactgcggatgctgtaacgcttcgcaacaaccagacgacaaagaaggcgctatttggaactggaatcagagagatacggagggcgacgcatga

SEQ ID NO: 385223 - DNA, 885 bp, Salmonella enterica
atgaaagctataccgattacggcaggctttaatgctgaaaatctgcccgttgtggttggcgttaaaattccgctcgatatctccgggcggtacaacctcaatgcgatacataaggcgagtggtgagggaactcataaagaacccaatcaatggctacgcagcaggcgagttaaagaacttatcgccgaacttgaagctaagttattgaaagataatcaagccgcagatttgcaggctgctcagaaagtgctcaatgtcgttaacggaggtgcaaaccccggcacctatgcccacgaactgatagcggtttcttacgctggctggatacgtcctgatttccagttagacgttaaccaggcctttatcgactttcgcaccgggcaatcagcgccagtaaataccagtctgccaaacttcgacgatccaatagctgctgctgaagcatggatagaagccaaaaaagcagaacgtctcgccattggatacgtcgaccgtcaggcgcgttacatcaacaaacttgagagccaccttgctgatggcattacacctgtccagttttgcaagcaactgaacggcgtaaatattcgtatggttaacgcttttctggaagaacgcaactggctatttgacgatcggcctaaatctaaaaatccacgctggcgtgtaaaagcttatgcccgcgatcagtatctcactgagcatgccggacaagttgagcaggaagatggcgagatgcgcgacatctacaaaccgcttctgaaacgtaaaggtgcggcatggctataccgccattacctgaacggtgaacttccgatgaagaaaacctggaatggcgaatacacccatgacactgacctggcgaaactccttgaggagaaaaaataa

SEQ ID NO: 385224 - DNA, 897 bp, Salmonella enterica
atggcaacgataagcaaagggcttgactcagtgattaacgggcgctatgttttccctgcaccttataaagcgggtgccgggtttcgcagcctgctaatcacacgagcgcacaaccgcgcccaagcggtttttttgtgtgccatgcattgccacgtccagataatggcggggcgtatgggggcatcctcggatgcgccggattctcgtgtgaccggtactgcgaaccctgtacgtctcgccacctatgagtttcgcagctccggtggtgagtatttctacttatcacacgaggctgccatcatggctactaccccaaccctttctcatcctcaggtcaccattgaaaacggtcgcgccgtgactacgtcaatggctgtagcgctttatttcaaaaaactgcacaaacacgttcttgaaaaaatcgataacctcgattgctcccctgaatttacgtcggccaacttttcggcccacgtagaaaacatcaaagctggcgcggtaaatcgggactccagaagctacaaaatcaccaaagacggtttcgttttcctcgtcatgggctttactggcaaaaaagcggctgcatttaaagaagcctacattgctgaatttaaccgcatggaagccacgcttcatgacagggctatccctgctcccgccgaaccatcaccagcagaacgtgacgcctataacgttcagtgcctcatgcagcactaccgcgtacttctcgaagcctggacacaacagattgagccagccctcaaaaagctggaatccccgctcgtcggaagactgcatgaccgcttcggtgatggctggcttttcctgaacagtctcgaaaaaagcctcggcgcaaaactgctgccagggcagtcaccgcgaatttttaacgaataa

SEQ ID NO: 385225 - DNA, 267 bp, Salmonella enterica
atgaaaaacgaacttattaacgtgtggtatcgcgtcacattcatggtgaccgagaacggcgaacgccgcgaatactcaatcttcgctgaagggagttgcgaaacgggcgctgcggtttctgctgcggtcggtatctgcgaaagcggggatggacttagcaaccctacgtttaagtctatccgcatagcaacctacggtgaggccgaatcgcttgatgcagaactggatgctatcgccgggcgtgaggcgagagaactggaggcgtaa

SEQ ID NO: 385226 - DNA, 774 bp, Salmonella enterica
atggctatgaaaactgaactgatgaccagctttaatgtggcggaaacctccggagaaattgactcagacaccctgctggaaatggtaaacgaagcccgtaaagagtgcggtgaagagccgattcgcaacaatgtttttatcgctcgcatcaaagatgagcttgagggggaatattacaaaacttttgtaaaatcccacggcacaagggctggacgcccgtctgagggagttaccatgcagacgaaacaagccctccgcgtcgccgcacgagaatcaaaagctgtacgccgtgtgctggttgataagattgaagcccgttctcagcccgtctttgacacttccgccgcacttaacgatccggagttcctgcgcggcacgctgcttggttacaccgaaaaggtaatagcccttgagcacaaggtagaagaagtcaccactgagcgtgatgaagccattcgcgctaaatccagaatcagccgcaagcgtgaagcctcagcactcggaaaactcagcgccgcaacccgccgttgccgtgatctggaagaacaactcggcgaaaccaccagacacgccaccattatcaaagtggaaaacgctaccggacgcaaagacgagtttagttacgttccgctgcgtcgctggtgcaaagacaacggcgttgaggctaaagctgtaccggatgaacgctacggcagagtgaagtcatggcctgctggcgcatggctggacatctatgggatcgaccttaaatcacttttcggggagaaaaaataa

SEQ ID NO: 385227 - DNA, 282 bp, Salmonella enterica
atggctaatcaggataacgccaatgcattttcggctgtgtcatctcacaaggtgccaaacgcaaagcaccttcgtaaccagtcgaaaatttacagcccggaagaattcctcgcgctgccaatggttcaggagtttatcaaaaacaacccggaccagtatttcgtcaatgaagaaactggcgagcaaatgatggctcaggaactggcagaactttattgctcagtgaataacggcaagagaatgaagaaagcgctgcgtcgcgcctttggggagaaaaagtaa

SEQ ID NO: 385228 - DNA, 597 bp, Salmonella enterica
atgattaccccccccgtttcacacaaaaaagtgcaggtcgttatgacgattgaaaacggccaggtaattaacgcccgcaatgttcgcgataacgaactaattgccagcatggatacctttttctggatggcaaagaaagcaggttatctggttattccgccagaaaatgaaaacttaacaggaacaaggatcatgaatgataaacgcattaccagtgccattgaccaagctttccggagataccctacgccagtaggtccggtttatttcgttgagcgtaacggctggaagcggagaacgcttagccgtgaagctgcgctcaatagtctggcgtattacatggttgtggatgtttttctcctgttcggatggccactgcgttacccggatattccactaagtccaggacatgtgcaacggggcgatatgaccgtggaatatcgcgaagctcataaacgttgcgttcgccgcctgcgccgcatcctcgccagaaaacgcgagatacagaagtggtacgcgaaatggagatcaatgcacgaccgctacgtgaaagagcgggaagaacttcaggccagcaaaccggagggcattcgctga

SEQ ID NO: 385229 - DNA, 288 bp, Salmonella enterica
atgaaacataagaatacctgcaagaaaaataaatacacagtaccgcaattgagttacgactgccgccgtaaaattaatcgtgcgaaaaaactggctcaatggatgcatattaacgggttgcattcttcagttagtaccgcaatcggtattacttatgcgctctcatatattgcagatgacattaaggatatcgataacgaattaaaggctcttggcttattcgatgaatctatgggtattgttcccggtaacgttattaaaaacaaaaataaaccggagggttcatga

SEQ ID NO: 385230 - DNA, 369 bp, Salmonella enterica
atgtacatagcgaaacctgacaccatcgcaatttatcgccgtcgtattgccgtagctgcattaaaccgaatgaaatacagcaccggaggctgtcgcctgaccatttcaatgccggatggcagtatagaatttgtcgacattgatgaagcctcaatgctgaaacttttacggcactttgaaaagcaggcacgtgatgagtatggcgctgaaacagatgagtttcttcggcaaacctacagaaacagtctggatataaacagccgtacggaatacctgaccgaaacaggtaaaatgattattgatgagatttttacggaattaataaagcacgcaaaagagaaatgcgtatgtgggggggggattaactga

SEQ ID NO: 385231 - DNA, 207 bp, Salmonella enterica
atgaaaccagaaattaaacgcgatatcagcgatatcttatgtgaagcgcgcggagtaattaatcaactcagggcagtagtcagcgtatgggacagaacttttgacgtaaaagatgttgatactgaagaacaggcgttgtgctggttgacgttaaatctcagtacggaagcgcttgaattaatcagggaagccgaaaacattacctga

SEQ ID NO: 385232 - DNA, 213 bp, Salmonella enterica
atgaacacagcagaacaagatacttatgatggattacctattgatgttgaagatgccataaataacattgaggctcttatagccgcagcaagagcatttgaaggtacagataatacaagggaattaagcattcgcattaatgaatttgttcatgaatatgtttctgtaattgctggttgcttgagggtaaaacataatgaaaccagaaattaa

SEQ ID NO: 385233 - DNA, 207 bp, Salmonella enterica
atgagcgatcaaatcaggcaacttaaaaatgcacagaaactaaatgcagtaattaacgcccttcgcttctcatgggtagaactgcacagtgaagatgttgaagcgctgatgcatgtggcgactgaatacagtgaatcaataaaatcctggctgacaaataaagcagaaggtgagaaaaccgataataaccagaagggaacgttatga

SEQ ID NO: 385234 - DNA, 360 bp, Salmonella enterica
atggctaaatacatcgttcgcgttgagctacatggtgctggtactaacccggaaccttatgatcgtctacatgaagctatgttcgatataggttttgatcagttcctgcgcccatatggtgatgcccatgaatcatatgttcttccgactgctgaatatttttctgatatcaacattctgtcagtcgatgaaattttcgaacaaattaaaaccattgctaaggaaattaatcctgacaaacaatttaagccttacgttcttctgtctgttctggctgatgttcggtggttgctttatgaacccagcgatccagaatttcaccagttgatcgccatgaaggggagccaaagcgccctttaa

SEQ ID NO: 385235 - DNA, 390 bp, Salmonella enterica
atgggtaaaaaagtcctgattgccactattgagtttgaaagtagtgaagcggataaaccgggaaaaatcggcacactggttaataaggccgttgaaaattacctggacagaatgagttacgagttttttcacaaatgctcaacgccaatggaagaacttgaagaagacggtattcatatcaccgtagtacacggagtgagacgtgacgcaagcaatcttccactcccggagcctgaatataaaatgccacttccgggaggggaaatgaaaatatttaaagggcgctttggctccccttcatggcgatcaactggtgaaattctggatcgctgggttcataaagcaaccaccgaacatcagccagaacagacagaagaacgtaaggcttaa

SEQ ID NO: 385236 - DNA, 360 bp, Salmonella enterica
atggataagtttgaatgtataacagtagccatccttgatgattcagatcacattggcgaggccttaagcccggcagttgaacgtgaaattgacgctgccgatatagtgattgatggtgataaggttgtcaaaaaccgtgttagccaggtggagtcccttgaggccaaaacagaattcccggcattcaaaggtctctctcttgaacctgagatcgcttttcatcagatcgcggcattaattgaagcgggattaattatttcggttatcgacgaagaagataaatcagaccttagtgactgcgtttttattctggctaagcgatacgctgaagcagcccacgctaacgagatggaaaagtag

SEQ ID NO: 385237 - DNA, 288 bp, Salmonella enterica
atgaatcgagacaaataccgcgtgcgtttaaatcattacctccagatagctatggctgattacaaactggagtgttatggccgtcacctggttgaaaaacactcttatcccgaaactgtcagtaaccttgaagctatttatattcaacttttcaaaactcatggctggagtattgataagtgccgctacatgagtaaagccgatctcaggttagctcttttacgagatttagaagactggttgctgccatctgatgcgcggtttgaatgtcctcaattgaaggactag

SEQ ID NO: 385238 - DNA, 231 bp, Salmonella enterica
atggataagtttgaatgcaaaccaccagtagtgaaccgggaaaatgcgcctgcacctgagtttaaaaagatgtcagcaagagatctggctgatttctgggaaaccctggaaatcatgggtgcatcaacccggttagcaatacaaacggctagtccttcaattgaggacattcaaaccgcgcatcagatggcagcaaccagtcttctaaatctcgtaaaagagctaacctga

SEQ ID NO: 385239 - DNA, 555 bp, Salmonella enterica
atgaacgcagcagaattatctaaggtgctggaacagcataaagtctggattacctcacttggtcaggagggatcgaaagccaacctgtacggtgccgacctgcgcgatgccgacctgcgcggtgccgacctgtacggtgccgacctgcgcgatgccgacctgcgcggtgccgacctgcgcggtgccgacctgtacggtgccgacctgcgcgatgccgacctgcgcggtgccaaccttcctgatctcactttcgtaataatgggagaaagatacgcaatcactattacgaatggagaatatgtacgcgccggatgccagaatcacaccgctgaggaatggcgcaagtacagcaaacataaaatagcagaaatggatggtagagcggcgctcaagttttacccccgtttgctggacattattgacttctatttaggtaaaggttcgcggcctgaatggttaaccagcaaggaatatacggaagatattttgcttaccggggaaagttctaatagtcagatttcagccgatagcggaaagcgaggacatcatggataa

SEQ ID NO: 385240 - DNA, 444 bp, Salmonella enterica
atgaaaactccagtcagggtgattgaagatatcacggctcagattatcgaagggaaaacccttctcgaaagtatttaccgtgaaagtgatgaaaacgaaaaaactgattgctatacagcctgcttattgcgttcgctggaaaaaaccgttgataacgcacgcgagtatgtaatccagttttctaaaaattgtaaacacccccaacccgcagcccccaccggctacaccccatacaacataggcaatcgcatccagatagcccgcgagggtctcggcatgagcctggacgatctggctgccgccgttatacctgatggcgttgaggtggtttcagaatgggagaacggcaaatccgaaccctgcgccagtgaaattatcaggctgagtcaggcactcaaatgcgatccgatgtggctgttaaccgggaaggagtgcgcaaaatga

SEQ ID NO: 385241 - DNA, 690 bp, Salmonella enterica
atggacttttcagaacgactggcattagccatgagtgagcaaggagttacacaaggcgggctggctaaggctgtaggcatggctcagtcaagcgtgaacaaactgcttaatggagcttcgggctccaagaaggttgttgaaatagcatcaatactgaatgtaagtcctgaatggttatccagtggtattggcaatatgcgccagtcagacacaaccgtagtgcctgtaagcaaacaaacagattcggacgatcccgtatacagggttgaagtgtttgatgttgcagtcagcgccggtccaggaacttttctggtatctgattttgtagagtcggtgcgggcaatcgagttttctgacgaactggcacgcagcctgtttggtaatcgcccggcggaaatcgtcaagatgataaccgtagatggagacagcatggctccgacaatctcggcaggcgatcaaatttttgtagatatctccgttcgccactttgagacagacggtatttatacttttgtgtttggtcgtacttttcacgtaaaacggcttcaaatgcaggggcttaaactggcagtgatttccgataactcgatatacaaagactggcatatcagcgaaaacgaagaagatcagtttttcgttatgggtaaggtgttaatccatcaaagcatcaaatacaaccgggttggttaa

SEQ ID NO: 385242 - DNA, 243 bp, Salmonella enterica
atgaagaatgacgccgtggctaaagcgattgccttgactggaagtcagagctccctggccaaaaaatgcaaaaagtcacaatcaaccataagtgactggctgcatggaaagaaaaaaatatcgccggaacacgtaccggcactggttaatgctgtcaatggcgatattcctgcctgtgagtttagaccagatttgccggagatttttagacctagcacatcaccaacaggagaaaaccagtga

SEQ ID NO: 385243 - DNA, 216 bp, Salmonella enterica
gtgataactgactttgacatcgacgtggtgtcgagactggcggtagccaataacgaactcgttaatgcctcgttctggattgatgagcgcgttctctcacttcgcagtgaggatgccagttccagcgaaatcgactggctgattaagcaaaaggaagaaatcacttgtttacgcgatgccgtctacgggtatctgaaaaaaataggaaaactatga

SEQ ID NO: 385244 - DNA, 348 bp, Salmonella enterica
atgaacaattttaacagcagcaaagagcaggagaggtactacgcccggaagaaccgggagatggatcgccacgaagctgacgacgaatcgaccatatacgcgcataaggtcgccaatgagcttatagaaagggaaggcgtcagtctgggcgctgatattagcgaagaggttatcaatgaatccagttcatcgaaagcatgggacatgtttatgagtgatgcccttgtgtcaatgaaaataccctttgtcgatctgagagaaattattcagatcgcttacttgaaaggcctggataaaggccgcgaacagggcgggctggaaccgttattcaggggagaggaagcatga

SEQ ID NO: 385245 - DNA, 462 bp, Salmonella enterica
atgagcaagggtttttcaatgtttacggggctttttgaagaaaacggcagtgtgccctggcatgatcgtagtaatccgcagtttgccgccagtcgtccgttatgtggtcaggagattgccgttgttcatgactccgtagaagccgatccggtcgcggtgtactgcttgttactgcctgagctatggaagcgaaacatcaagattgaagcaagttttagttgcgtcaccaatagcgacgattcgaagtctgggcattcgtttattaataaccatggtcatgttcctcgcgctgtcgggaaaaaagtccctcatttcggcaggactttcactaatgaggagcatcggctttttgacgaaatggttgccggtgctcccgatcaggctatcagtgcaggtatgcgggcattacaggaaaaaggcctgattatttccgcctggtatctggcggcagatgaaaattaa

SEQ ID NO: 385246 - DNA, 285 bp, Salmonella enterica
atgtttttaactcaagctaagtgccctgtttgtaaaaaagatgccaaatatcttccgattaacggcgacgatgaccgtttttactactgccatcagtgcggcgattactacattcccggcaactgcgcccagtatcttgaaggagtcgttgaataccccgatatggtcgaatcgatgcgcaccaggtctaaagatcagatcccgtgtttttcgccaaattttcatggaacaacccttgtaaaaggcgttaattttcatctgccgccagataccaggcggaaataa

SEQ ID NO: 385247 - DNA, 276 bp, Salmonella enterica
atgagtacaggtaataaattacccgtcgtagttggcgttgaaattccgctcgatgagtccgggcggtacaacctcaatacgatacataaggcgagtggtgagggtgatgacaaatcacctggtcagtggttgcgccgcaaaaccacaaaagaactgattaaagagcttgacgctaacttattgaaaaatagccaagatgtaaatttacattctgctcaaaaatccatcaatgttgtcaatggtggtacaaaccccggcactttcgctcatgagtaa

SEQ ID NO: 385248 - DNA, 210 bp, Salmonella enterica
atgaaagcttattttgatgatgccgggaacctggttattgagacagaaaaccatacagagaaatctgcgctgatgatgtggtgcgagataaacgaatcaagtgatcgatctatccatgaatttttctgtggagaaaagttttcgctgaaggtcgtcgacggtaacgcaaattgtaacgctgtgagcgttacaaaaagcgaatcggagtaa

SEQ ID NO: 385249 - DNA, 1080 bp, Salmonella enterica
atggctaactcatggctgcgattgtggcacgacatgccaaacgatccgaagtggcgaaccatttcgcgcatttcaggacagcctatttcgcttgtacaggccacttatattcatcttcttgtcagtgcgtcacgaaatgtcacgcgcggtcacgctcatgtcacaacggaagatttagccagcgctcttgatgtgacagaagagcaaatttcatccgttttaatggcaatgcagggacgcgttctggatggagattatttaacgggctgggagcgtcgtcaggtcaaaaaagaagacagcgggaatcctgaaagccgcgccatgtctgcatctgagcggaaaagaaagcaaagagaacgggaacgtcagcgtcaggagggagagcataaaaacccatctgccatgcgatgtcacgacgagtcacgcaatgtcacgacagataaagataaagatacagatacagaagaagaattaaaagatcaaaacaccttgtccgatttcggatcgaatcggactgctgacgaaaaaccggcttcgccagaaaaaccacctgcacccgaaaaccctgaaccggagcaaaccgcagatcggggtagcggagattcaccagacccagaccaggggattgagcctgcaggcgattctgacccgccggataaacccgatgaccgcgatggtccggaccctgttgaccaggctttcggggatattttctggaaggccggtttgtgcaaggtcggcaaggtcaaggcgtgttcagcgttccggtcgaaataccgggcatggaaaaaatcaacccacggatcaccgcctgagttcgcctcgatgctggcgggggatatccggcaacggctgagtgccggggtgtttggcatggataaattacatccggccacgtacctgaaccaggagcgctggaacgacgaaatgcccgaaaaaacgccggtacaacccggaactgtcccacaagctcgcgagaccagcggctcatggtgtactccggcgggcgatggttcatcggaggtgtttgtgaactttgcagcactggagcgaaccagacgtggctatggggatcggtaa

SEQ ID NO: 385250 - DNA, 1872 bp, Salmonella enterica
atgaaccctgccgaactatcagaaaaattatgggacaacgctgaacgcgttgcaaagttcctgttgccaaagggtcacctggaaggcaaagagtggtgtgctggtaataccaacggtgacgccggaaagagcctcaaaataaacatcggtggcaagaaaacatgggctgattttgccagcggtgacggtggcgatctgctggatttatgggtgctggttcgtaactgtcagctacatgatgcgatgcgcgaagcgaaagaatttctgggcctgagggatgacgatcgccactttgagtcgaagaaaaaaacgttctccagaccgacgaaaaaaggcgtcaaaaaggcgaatcactgttacgaataccttgcatcgcgtggcattactcgcgagaccatcgataagtttcgcgtttcggatgctgtggtctggtatcacgatggaaaccgcgaagttccggcaatagcatacccgtatatccggaatggtgagcttttgcaggtgaaacgcattggtatcgaacgtcctgatggcaagaagttgattatggctgaggcggattgtgaaccatgcctgttcggctggcaggccctggataaaaacacccgcctggtggtgttgtgcgagggtgaaattgactgcatgagctatgcccagatgggatttccggcgctgtctgttccgtttggcggtggcaaaggtgccaaacagcagtggattgagtacgaatatcacaacctggaccggttcgatgaaatctggctgagcatggacaacgacgacgtcggacgtgaagccgcgaaggaaatagcccgccgacttggggagcatcgttgccgtctggtcgagcttccgcacaaagatatcaacgagtgcatgatggccgggatggattctgaggctgtttttgaatgcattgagcgtgctaaatactttgaccctgacgaactgtgttctgctggtgatctgcttcaggaaaccattgaagcatttgaacatcgtgacaccggattatttaccagcccctggccgtctctcaatcgtaatttcaaattccgcgccagtgaactgacgctgattaacggggtgaacggtcacggcaaaaccgaggtggttggacatatcgccgttgacgcgatgagccagggggttcgcgtctgtatcgcctcactggaaatgaagcccggaaagatgctggcccgtcttacccgccagactatctgcaccgcctcaccgaagcgcgaagaaatcatcatgaccaatgagtggttttctgatcggttatgggtttttaagcttaccggaacagcaaaggccgggcgtttgctggagatatttgcctatgcccgacgtcgttatggtgtcgaattgtttgtcatcgacaacctggcaaaatgcgggctggacgaagataactacacggagcagaaaaatcttattgacgcactgtgcgatttcaaaaatgagcataactgccatgtgttgctggttactcacagccggaaaaccagcgaagcgacacctacgggaaaaatggacgtcaagggcactggcgcattaacggatatgcccgataacgttatggcagtctggcgcaatattcctcgcgaacgggcactacggaaagctgagcgcatggggcatgagagcctggataaagacgagcaggcatcggtcagcatgcccgcatccatgatccgcctgcttaaacagcgggagggtgagggctggctgggtgacataagtacaaactttgatgcacgttctcaccagtttcttgaaggagaaagcaaaccgtataactacctggccggacagttacaaagtgagctggatctggagtgggaagcaggcaacgttacgaggtactga

SEQ ID NO: 385251 - DNA, 333 bp, Salmonella enterica
atgaaaaataaattagccactatcgcaatggaaaaatatattcgcatccacgaagaaattaaaaaacaggagcgcgaaagtattgctgatgatccagacggaataggctgcggggctgacgcgtatctgtttgaggaattggctgaggcgcgtgatgaattctgccgatcagttacaccatttgattatgccgagatactcaagcaggtagccatgcatcgggataacacatgcgaactcatcctggagaatattgtgctcaaggctgagattaagcgcctgggcggtgatgcaaattttctcggtaatgtggattctgaggggaaagcatga

SEQ ID NO: 385252 - DNA, 252 bp, Salmonella enterica
atgcaaattttctcggtaatgtggattctgaggggaaagcatgaaactggaatcatcactcagacatttcagcacgacagcgggaggggtggcgcagtgaaagatatttttctgatagcgatggcgttcatgactccgcttctttgcgtcatctttgccggactgctggcgatgaagtacagaccgggctggggctggttcctgttcgtggccgcgctgattacgtgcagtctgaaaatatcggtctggtga

SEQ ID NO: 385253 - DNA, 594 bp, Salmonella enterica
atgcaactccagcttataaaacatgtttcggggatattacttccggcaacaccgcagacaaccgaactgctgagttcaaaagttcgttgcggttctgtacttgaagcagatttccggcaggtacgcaatccggcttttcaccggaaattttttgcgctgctgaatctgggctttgactactggacaccaacgggaggcgcaattaccgccagcgaacggcaactggtgaacgggtatgcgaaattccttgcgcgttacgggggtaatcagcagtcgctgatgaatgccgcagaaacgtatctgtcatgcgtggcggataaacgcaccgccagtatcagcgcgtgtaaatccttcgatgcctaccgtgcctgggtgacggttgaagcaggttactacgatgttgtggagttaccggacgggagtatccgcaaagtggcaaagagtatctcgtttgcgaaaatggacgaaacagaattcatggggctgtacagggctgtgtttgatgtgctgtggcgctggattttatcccgcacgttcaggactcacgaagaggccgaaaatgtggcagcgcaactgatggactttacggggtaa

SEQ ID NO: 385254 - DNA, 150 bp, Salmonella enterica
atgctggtgacggaataccggcgtcgcggcgtgaaagtggaaaagagcctgaacggtgattaccgctcctggtgcgtacgtgcatttttaccggaatctgcccgtgtgccgcgtacaaaccgccactggcaacaaaaattctgggggtag

SEQ ID NO: 385255 - DNA, 333 bp, Salmonella enterica
gtgtgccgcgtacaaaccgccactggcaacaaaaattctgggggtagagtgaagacgatttaccgcagtaaaaaatggctggccgccgttggacagattgaacagtgcgtcctttgcggaaggtggggaacgcaggttgcccatcgcaacgaatcaaaaggcatggggcttaaaaccgatgactgtgccactgccgcgctttgcccggaatgtcatcacgaaatcgataacgggagtcatctgagcagggaagaacgccgtcagttgatgaataaagccatcgttctgacggtcattgaaattgcccgccgtgggcgtgttgtagcggtttaa

SEQ ID NO: 385256 - DNA, 405 bp, Salmonella enterica
atgcgcgatattcagcaggttctggaaaggtggggatcgtgggtggcgaataaccgcgaggatgtcacatgggcgacggtcgcggcgggttttaagggattaattccgtcaaaaataacgtcccgccctcagtgctgcgatgatgatgcgatggtgatatgcggctgtatggccagactgaataagaataatactgatatgcacgaattgttgatggattactatgtttttggcatgacgtttatgtcactggcgcgaaaacattactgctcagatacccatatcgggaaaaagctacaaaacgccgagtgtgtcgttgaaggtatgttaatggcgctggacgtaaagctggagatggacagatacgtgcaacgggagccagtgagcgtgaaagccagcctgtag

SEQ ID NO: 385257 - DNA, 309 bp, Salmonella enterica
atgactggtaaacgtataccaccaactatgacgcatgacgaaatggttgaaaaatggatggctgatccgaaattcaaagccgaatacgacgccatcgctgaagaatttgacctgctggatgaaatgctggcagcacgcaaaagtgcaggtctgacacaggcgcaggtagcggaacgtatgggaacgaaggccaccgcgatcactcgcatggaaggcaatctcgcctccgggcaaagcgggccatctttcaccacgctgaaaaaattcgcgaaagctaccgggaaaaaattgcagattcgttttgtgtaa

SEQ ID NO: 385258 - DNA, 330 bp, Salmonella enterica
atgaactacactattgagtactacagcgaaactgttcgccttgagattgaccagcttccatctggtatgcgggttcgctataagcacctcactgagcgtatggcgatatacggcggcaatcttggtgaaccgcataccagtgcatttggtgatggacttttcgagctcagaattaaaggtgctgatggtatcgcgagggttttctactgcactctctctggcaagcgcattgttgtactgcacagctttattaagaaaacccagaaaactccgtccgcagaactgaaaaaagctattgccagaatgaaggaggtaaaacatgactggtaa

SEQ ID NO: 385259 - DNA, 444 bp, Salmonella enterica
atgaacataaatgatgaaagcgtaaaaatatcatttgtttacccttcacttgcggtcaaagacagtgaaacgctaggtccaccccagatatccattaagtctccaggtcttccttgtcggtttcaggttatcgctagcgtaggaattgtgggtttcagcgttgccaatcaggaaaaagagtattcaatatgtgctgatgtattttttaacgaggaacgtgtgaccgatcccgaagaagagttatcaatcatttcccatgttaacaacctttctgatgaaggtattaatattgcaacatttgggataccgctccatgtaaacgctcctgcaccgggagtctacacgttaaaactgtctctttatgaacagaatcagggcaataaatcagtctgtcttgatgaaatggaatgtgtttttgttgtctcgtccagatgggaggtttag

SEQ ID NO: 385260 - DNA, 408 bp, Salmonella enterica
atgtctgaagaacttgaaaaaagagttaaacacctggaagaggacgttgccaacattaataacaatgtaacaatccttaccactcgttctgaaaattttgccaccaaaaacgaaatggttgaaatgcgtgaaggggtgagacttgaaacggccaaaatccgtgagggattacgggctgagatggcggaaacgcgggagggattacgggctgagatggctgaaacgcgtgaggtcttaaagattcagatgtcggagctaggagccgggctgacactgaaaatggagggattacgctccgggatatgcattgatcttcaaaaatccatgaattcacaaataaaatggttgatcagtgtagttgtgggggtaatgactctacttatcgcggtgatggcgcttatcaaataa

SEQ ID NO: 385261 - DNA, 756 bp, Salmonella enterica
atgactacccaacttacccatttttacttccggcagtcttctgttcgcattcaggtaatcgacggcgagccgtggttttgcttgaaggatgtttgtgagatcctgagtgtagaccgcacctcacgcttgctgcgtgaccttgataaaaaggggttggcagattgccacacccttacgataggcggaaaacaacggctctctttcatcaacgaacccaacctctaccgcgttatcttccgcagcaataaacccgaagcccggcaattccaggattgggtatttaatgacgttcttcccgctatccgcaaaacaggcagctaccagcatccggtagcaacaccccgccgtacagccgaacccttaacccgttctgacatgaaaaaccttaaccatctggtagtgatgatgacacgacagttcagccgtaccggttcatggaggcttggggtctggcacgcattacgccgtgcagcaggtgtaccatcgccggaactgttcaccgttgacgatctgccagcgctcaccgaagagtgccgccgcatcattcagataaccagcgaggccggggaaatgattggacgcattgaacgggaagcggtacgtcgtatcgtcagacatcgtgaggactgcgagatggtactcgctgagttacagcgtgagtgcaacagccagcgcctcagtaatgccggtatgcggcaactggaacgctacgagcagatagcgctgaggaagttagagcagcgtgtgattgcctga

SEQ ID NO: 385262 - DNA, 561 bp, Salmonella enterica
atgttttgcgaagaaaaagtagctcaaatggctgcgtacctgctatcaaaaagcggcagggagatggctttcgtaaaattaatgaaacttctttatctgtcagacagaaaatcactggaaaattacggctattcgattagcggagacaggttttactctatgaatttaggtcctgtcttatctcaaacttattcccttgaacgtgatggcagtgaaacccataataatgggtgggattcatggattatggatctcgctaatcataatgtaggactaaaacgtaagttcaataaggtcgaagaacttgatgaactgagccgtgcagatattatgtctatggacactgtttttcagatgtacggagactgggaaccattcgctttgtgtcgggaaactcatcgtgtctgtaaagaatggcaaaatccacacggttcatcaataccaatccctgttaaggacatctttatagccttgggtaaagatgaagagacagcattagcgttagccagcaacattgcggaacatgaacaactggaaagggtaacggaagatttgcgatga

SEQ ID NO: 385263 - DNA, 339 bp, Salmonella enterica
ttgcacattatatgtaacgacccggtctacaatcatgagtttggttgcgatggtgtgttagtagttaatgtttccagtattaaacctggaattcaatatgatgttgcgtgcacccttgaaaaaggcgatcatccatttatccaacatccaagctatattgcttaccgtttttctgttgtgtggcgggttccacagataagcatgagagttgaacagggtgcttacagtacgcatgatgatttttctgagactcatttttctcgtattctttcaggttttgagcagtctatttttgtctcgcataaaattctgaggtattaccaaaaacattgtcattaa

SEQ ID NO: 385264 - DNA, 213 bp, Salmonella enterica
gtgcagacggcgggtacacaaccacaccccgtgtttatcccagcgcagaactttgatacgcgagcgggccttgttggtaaagacaaaggcggcgccctcatgccacgtcgatttgagttcatcctgtatgtactgcgtcagagtgtcgatcccacgccgcatatcgacgggtttaacggcgaggaagacattatcaggactgagcatatttga

SEQ ID NO: 385265 - DNA, 360 bp, Salmonella enterica
atgactggatcaaacgttttcaggctggttccgtcctgcctgttactgctggcgggaaatgtatttgcagatactaatagtgcatccgaagctgatattagtaattatgccaaagttcttagtattaccataaaaaatacaggtggacgtgtttttaacgcttataaaggtaaatcgtgtgttgtaaagatgcatcttgcccgtgatggttctttgtctggatttagtactgaaaatggtccttctgatttatgtaataaactttcagatgttatgcatagtattaaaaagcttcccgctcccccttctgatgaaatttatgaattgttcaaaaatgctcgtctgtcctttaaaccctga

SEQ ID NO: 385266 - DNA, 447 bp, Salmonella enterica
atgtttacatggacttacagcgaacaggtaactacccgggcgacaccggagcaaatctgggcgatgtggcaggacgccgcttcctggccctgctgggacagtgagctggaatgggttcgtctggaaggagagttcgtcgtcggaactgttggtcgcatgaaacccgccagcggccccggggtgaaattctgcctctgtgatgttgtccctctgcgatctttctcctgtttggcgcagttacccctgactcgtctggtattcagccatgaatatctttcccctcaggaggaggatggtgtcgcgcaaatccgccattcagtgaccatgagtggcatgcttgcaccattattcggtcgtttggctggtgggaaaataaaagcccatttgcgacaggcgatgatggaattgagtcttcgggcgttaaccggggataaaacattgaggtaa

SEQ ID NO: 385267 - DNA, 1266 bp, Salmonella enterica
atggacagacaagaacagggaggactaaaaaataatctgaccagaattatattattgtcatttgcagggtctattatttatgggcttccttatttcagactttattattatgatgcctatcagtcgatatacgggctgacaaatgtgcagatgggcttacttggtagcgcctacggtgtgttgggcgttgcgtcctatgtgctggggggaattctggctgacaagtttaaggctaagaagctgctcattttttctatgattaccacaggagccggaggctttctgcatctgttttttgagaattatgccgccctgattgttatttatggtttatggggctttacttctcttttaactttctggcctgcgttgatgaaaatagtgagaacccagggaagagatgaggaacaaagccgggcttatggcatatttgaaggggggcggggggtatttaatgccgtgcatttggctgtggctactgctatttttggtatttttcaggcgaatgccatgcctgtcctgggcattaaattgattattgtcttctattccctggctccagtagtggtgggtatattattcatttttatgttgaaagaacctgaagtttctgtggaaggagagaagccggaaaaattaactgtaaagcaggtgatgaatgtgctgaaaatgccgatgatttggctggtagtgcttctggttttctgcagctatacattcaatatgtccgtgtactatttcaccccctacgccagtaatgtcattggtaccagtgctgtcgttgcggcaatcatcactgcccttcagcagtatgtccggccttttgcggcaaccggtggcggatttctggctgataaggcaggaaaagggcaaattatgggtggtggttttgttatgatgggagtgggtaccgtcattatgatgctggcaggaaaagctgaggggcaatcccagatatttctgatagtggcagcatgtgtggttatatacacaggtatgttctcaaatttcgggctttatttctccttccttacagaaggcggcgttcctgttaaggtgtcaggtctggccattgggattgtgtccacttttgggtatttgccagaggtgattgttcccctggttgcaggaaagattctggatgttttcccgggagcgaaaggctattacatctattttggattcatgattgcgatggcaacagtggggttcgtcctgtccctgttgtggtgcaggttgtacggaaagaaggccgcaaggcagtaa

SEQ ID NO: 385268 - DNA, 2049 bp, Salmonella enterica
atgggaaacgttgaagtgaagccgaaaaggattctgacaaaatctgacttcgaatatgactgggatgttgttggcaatgagtggattttacttaaagacggcacacgtttgtctggtcgtatctggataccaaagacagatatgccggttcccgcgattctggaatatatcccctatagaaagcaggacggaaccagaacccgtgatgagcctatgcatggttattttgccggcaatggatatgtggtggttcgggtggatatgagagggacgggagaatctgacggactctgtatggatgagtatctcttacaggaacaagacgatgcgcttgaagttattgactggattagcaaacagccctggtgtgacgggaatgttggcatgatggggaaatcctgggggggctttaattcccttcaggttgctgcccgtcgccctcctgctctgcgtgcaattatctgtgtgggatttacagatgatcggtttaatcaggatattcattacaaaggcggctgtcttctgaatgataatttctggtggggaaatattatgcttgcctaccagtcaagaggtgtcgactctgacataaagccggatagctggaaaaaagagactgtaacgcgtctggagtccatgccactgtggatgcaaaactggatggagcatcaaacaagggacgcgtactggaagcatggatccgtgtgtgaggattacagcgcaattcagattcctgtatttgccattgacgggtggagcgattcctatacaaatactgtccttacgttactaaatggacttgacgttcccaggaaggggattatcggcccctgggctcatgtgtacgcacatgacggctatcctgctccagccatggattttcttggcgaagctatcaaatggtgggacaaatggcttaaggggattgacaacgatacactggactgtcctttggttcagctgtggctggaggacagtatgaagccaggcacaattcatccggtaagtaatggtcgctgggttggtctggatacctggcccagtacagatgtaacggaaagggaatattacctcaccagtggtagccttctggacatggtaaacagccgtaaagagacgctggaactgtgtactcctctaaatcatggaatattagcaaatgagtggatgggagccggagtggaaggggaaaacccggcagatcagcgcattgatgatggcatggctgccgtgtttgacagcgggatactggaaagagaaacagagattgtgggatatcccgtatttgaagttgagctgataagtgataaacctgtatccatgctctttgctcaactgtcggacattcatccagacggttcttcgacaagagtatcctggggggtgatgaacctgactcatttgcagggacatgacaaagttgtacctcttactccaggggaaccggtaatggtaacggtgactttggatgtatgcggacataatttcccctgcggacatcgaattcgcctgtccattgcaaattccttctggcctatgttctggccctctccagagctggctacgttaacacttgatctgtccacagcaaggctcaggttgcctgtatttgtgggaaaagactgcaaaggtccctctatggatgccaaatgtgcgccccttacccctgtgacaatattgtcagaaggaaacgtagatcgttacgttacctacgatctcgttacagatacatggaccactgtgacaaactgtgtgggtggtgtgtttggggaaggtatttacaggtttgatgacattgggacggtagtggaacataacctgaaaagggaactggtgctttccaacagggatccccttacagcaaaatacactattacccagaaaatgaaaaatggacgtgacggctggcttacagacacagatattgtgatgacccagacagcggacaaagactatttttatctgacaggtcgtatggaaacgaaaatcaatggagagccggtattccatcgtgactatgatgaaaaaataaaacgtaacggaatataa

SEQ ID NO: 385269 - DNA, 1158 bp, Salmonella enterica
atgattattacgacggcgctggctaatgaaattgtcgcccgggcaatggcgataattcatcataacgtgaacgtgattgaccatcatggacagatcattgcctcaggtgaacggcatcgtatcggcgagcagcatgagatcgcccgtgaggtgatacgcaccggtaaacgcatttgtattaacaacaccgcggaagccgcgcgtttccagaatgtacatcccggtattaatcatcccattatctatgacgatcgcgtggtgatggtggtgggcatcagcggcgatcccgcagcgatcagccgctatgctgaactggcggtactcaccgccgagctgctggtccgccaggccatagagatgcgggaaaccaactggcgacagcgtctgcgcgataccctgtttggtcaatatcttgatcaaggcgcttcgcccgccggacaggaagcgcttcatcgcctggtggagcttggcttcgcttttgatgcgccgctggtgccggtcgtggtgaccgtgcaggtcgaacagcatcagctaagcgaaatactgagtacgctgctgcgggaattctcgcagctggccggggtaagagacgtcattttgctgggcagcaatgagatcctgatcctcaatacgctgagcgaatcccaggaaacgctgctgcggggcatcgagtttgtcctcagcaatcagatcagccattaccatatcggcattggcgtgcaggcggacagcgctccggatattcgcgaggccatccgattcgcccgttcggtgattgaggtagggagcaaagtgcagccgcagcggcagatctactactttcgcgaaatggcgatgctctgcctgttccgggtgctggaagacagctatatggtcaatttttttatcaataacgtacgccagctgcttgagcatgattccggcgaagtgctgctggataccctcagcagctttattgccaataacgccgagccgggcaaaacgtcgctgctgttggggattcatcgcaatacgctcacctaccggctgcagcagattaaaaagcatattcagctcgatccgatggtcttcaccgacctgacgcaactggcggtgtcagtacactgctatcgtcggcagaatccgcgtcagagtgagtggattgatagtttaacctga

SEQ ID NO: 385270 - DNA, 1176 bp, Salmonella enterica
atgaagattgttatcgcgctggattcgtttaagggtagctgtagcgcgcaggccgcttgcgcagcggtagcacaggggttgcgccgggttgacgaggggctggagctggtcgaaatgcccgtgtcggacggcggagaggggctgctctcggcccttgcggaaagtccgcagctgaagggcgcaaggtggcaacagcagcgttgcgcctcgccttacggtctctccgtaaaggccgcgtttctgatcctgcccggcgaacgggccattatcgagatggcgcaaagctgtgggctggagctcacgccgaaagcgcagcgggatgtgcgtctggccagcagctttgggctgggcgagcaggtaaaagcggcgctggatgccggatgtcggcatttgattatcgggctgggcggcagcgcgaccaacgatggcggtatcggttttgcccaggcgcttggcgcccgcttctggcgcgaggacggcacgctgctgccggttcccgcggcgggtcaggatcttgcgcatattcagcgcatcgatttaagcgccatggatccgcgcttacgacaggccgaaatacaggcctcctgcgacgtcacgaatcctctgcttggggaagatggcgccacctgggtgtatggcgcgcagaaaggcgcggacgaggccgcgctcagggaactggaggcgggtatggcgcagtacagtcggctgcttacgcaaacgctcggctacgacgtcagcgaacggcccggcgccggggccgcgggcggtatgggggccgcgctgatcgcctatgcgggcgccacgctgcgcccgggcattgacctggtgctggaactgcttaacgccgaccgccatcttagcgatgcctcgctgaccatcgtcggggaaggctggttcgatcgtcagagcgcctttggtaaagccccggtgggcgtggcgggcaaagcggcgcgccacggcgtaccggttgtggccctttgcggcggacgcgatgagagcagtcggcaattgtatcaacaccatattgacgcgatgtggtctatttgccagcgccctatgccgctggcggagtcgatgaacacatgcgaacagctcctcgccgacgcagcggagaatgttctacgaacctttctgagcgggcggcgcggagaggcacataagcggataactgtatga

SEQ ID NO: 385271 - DNA, 1371 bp, Salmonella enterica
atgctgtcgcgacgccgcggagtaaacacgactatgacaacaatcaatcacacacctgccggcgaacaaggtggaaaaaagcggctgatacatcgtttctcctgggtttcgctgctggtttgctggctaatctgggtgcttaacgcctacgatcgcgagatgatcctgcgccttggcccggtcatctctaaagagttttcgctctcgccggaacagtggggcaacgtcgtagccctgattatggttgccctcgcggtgctggatatccccggctccatctggagcgatcgctacggttcaggctggaagcgagcgcgctttcaggtaccactggtgctgggctataccgccctctcttttctttccggtattaaagcgatcatccacgggctgacggcctttgtgctactgcgcgttggcgtcaacctcggggcaggctggggcgagcccgtcggcgtcagcaacaccgcagagtggtggccgaaagagaaacgcggcttcgcgctgggggtgcatcataccggctatccgattggcgcgctgctgagcggcgtggtggcaagtctggtgctttccgcatttggcgaaggcagctggcgctactgcttcctgctggcgctgatcgtcgccatcccgctaatgattttctgggcgaaatattccaccgccgatcgcatcaacacgctttatctgcatatcgatagccaggggatgacgcgcccggcgacccaggaaagcagccatgttgccaaaggcgaagggatgaagacctttttacgcctcctgcgcaaccgcaatatttcgctaacggcgggcaataccctgctgacgcaaattgtctatatgggcattaacgttgtgctgccgccgtatctttatcacgtctccggcctgtcgctggcagcatccgccgggctaagtattatcttcacgcttacgggtaccctgggccagataatttggccctggctgtccgatagctttggccgtaaacgtactctgatcgtctgcggtctgtggatgagtatcggcattgcgctgttctatttcgccaccaatatgccgcgtcttatcgccattcagctattttttggcctggtggccaacgccgtgtggcctatctactacgcaatggcttcagactccgccgaagaacgcgccacctctaccgccaacggcattatcaccacggcgatgtttatcggcggcggcatttcgccattgcttatgggctggctcatccagttcggtgggggatgggaaaatccggcgggttatatctacgccttctttaccatggcgggatgcgcgctgctggggatgttattgcagctcatgaccaccgataaaacgccgcgcaaagcgcattaa

SEQ ID NO: 385272 - DNA, 636 bp, Salmonella enterica
atgcgcatcgaagtcttactggatttaaaaactcgactcggcgaaagcccggtctgggatgtcgaacagcagcgtctttggtgggtggacagcctcgacgggcgcctgttcgcctgtaacgcgcagggcggcgcgctatatcgcctggacgccgatctatcactacacgtgctgaagaaaaatatcatcgtctctaacgccccctgctggagcccctccggcgagacgttctattttgccgatacctggacgggcgaaatctgcgcctgggactacaacaccgcgaccggcgatctctccggagaacgagtcttttgccgtgtcgatagcagcgaaggcggcgcggcggatggcgccaccgtggacagcgaaggctatctgtggaacgcgctggtctacgcgggcaagctggtgcgctacacgccggagggcaaggtcgatcgcatcattgagatgccggtgaaaaaagtgaccagcgtcatgttcggcggcgaaaacctcgacgtgctgtacgtcacctcaatggcgcagccgcccctcccgcgcttcccggaagataatcagttgcgcggcagcctgttcgccctgtacgacctgggcgtgaccggcgtagcggaacggcgttttgccggctaa

SEQ ID NO: 385273 - DNA, 1338 bp, Salmonella enterica
atgtccgcaataaatgaaaaggcggtaaacgggacgcaactgcaacgcacccataaaaagatctaccgccatttgatgccgctgcttatcgtggcgtacatcatcagctttattgatcgtaccaatattggcatggcgaaagcgaccatgtcggtggatatcggcctttccgcaaccgcattcggcctcggggccgggttgttttttctcacttacgcggtgctggagatccccagcaacctgtttttaacccggattggcgcgcggcgctggatcgcccgcatcatgatcacctgggggatcatctcctgcggtatggcgtttgtcaccgggcctacgtccttttacgtgatgcgccttttgctcggcgccgccgaagcggggctctatccgggcattatttactacctgaccctctggtttggccgcgaagagcgcgctaaagccaccggactattcctgctgggagtctgcctggccaatattatcggcgcgccgctggggggattattattaagccttgatggtatgtccggctggcacggctggcagtggatgttctttatcgaaggactgcctgcgatactcctgtcttttatcatctggtacaggctgccggataagcctgccaacgcccgctggctggacagcaacgacgtgcaggcaatcaatgcggtgctcgagacagaagccggggagacgcgccatacgccaagccgtttttccctgaaaaccgcgctcaccacccgggtgtttttgttactggtgctgatttactttacccatcagttttcggtttacggcctgagttatttcctgccggggatcatcggtagctggggccagcttactccgctgcagatcggtctgctgaccgccatcccgtggatcgcggccgccgctggcgggatcctgctgccgcgtttcgcccggacggaacagcgttcgcgcagcatgctgatggccggatatctggtcatggtgaccggcatggcgattggggcgattgccggccacggcgtggcgctgcttggcttctcgctggccgccttcatgttcttcgccatgcaatccatcatttttaactggctcccctcgatcatgagcgggcatatgctggcgggcagcttcggcctgcttaactgcctcgggctgtgcgggggctttctcgggccgtttattctcggcgcgtttgaggatcgcaccggcgcggcaacgtccggcttatggttcgccgtcgcgctactgatcatcggcgcgctggtgtctctgttcatcaaaagttcgtcatcccctggcagagcatcagcaaaacaagccggcggcgaaaaagcgtaa

SEQ ID NO: 385274 - DNA, 1191 bp, Salmonella enterica
atgacacaggctaatgatattgtggttgtcagcggcgtccgtaccgctattggcacgtttaacggcagtcttaagcatacccaccagcatgacctcggagcagcggtcattcgcgaagcgatcgcccgcgccgggcttgcgccgcaggatatcgacgaaacgatcgtcggcaacgtcgggcaaatcgccgaaagcggttttatcgcccgcatctgccagttgcgggcggggatcccgcaggagagcaccgcgtattcggttaaccgccagtgcggctccggacttcaggccctggcggacggcatgatgcaactgcaaagcggccaggccggggtggtcgtcgcctgcggaactgaaaatatgacccagttgccctactacctgcgcaaagcgcgcgatggctatcgcatgggccacggcgaactggaagatggactgatctccatcctcacctggccggaagggccttatcacaacggcatcacggcggaaaacgtcgcgcaacgcttcggtatcacccgcgaagcgatggacgatttcgcctggtcgagccagcagaaggcgctgaaggctatctctgaggatcgcttccgcgaacagattctggctcttgaggtgccggacggcaaaaaagcgacccgcctgttcgcgaccgatgaacacccgcgtgacaccccgcgcgaaaagctcgccgcgctgcgtccggcatttaaagccgacggcgtggtgacggcagccaactcctccggcattaacgacggcgcggccgcgctggtgatgatgacccgccagcaggcggaacagcgcggcttaaccccgcgcatgcgcattcgcggctgggcggtcgccggctgcggcgcggagattatgggatttggtccctctcccgctacccgacgcctgatggaccgtctcaatatggatgttcacgctatcgatttaattgaactcaatgaggccttcgccgcccaggcgctggcggtgatgaacgatctgtgtctcgatccggcccgcgttaacgtcaacggcggcgcaatcgccctcggccacccggtgggtgccagcggtgcgatcctgccggtcaaactgatgtatgaaatggcgcgcagcggcgcgcgcactggtctggtcaccatgtgcatcggcggcggccaggggatttctatgctgttcgagcgcgaaggcgcttag

SEQ ID NO: 385275 - DNA, 735 bp, Salmonella enterica
atgaaacttgccagtaaaaccgccattgttaccggcgccgcgcgcggtatcggctttggcattgctcaggtgcttgcgcgggaaggcgcgcgagtgatcatcgccgatcgcgacgcgcacggcgaagccgccgccgcgtccctgcgcgaatcgggcgcacaggcgctgtttatcagctgcaatatcggtgaaaaagcgcaggtcgaagcgcttttttcccgggccgaagaagcgtttggcccggtggatattgtggtgaataacgccggaatcaaccgcgacgccatgctgcacaaactctccgaagcggactgggacacggtgatcgatgtcaatctgaagggcacttttctctgtatgcagcaggccgccatccgcatgcgcgagcgcggcacgggccgcattatcaatatcgcttccgccagttggcttggcaacgtcggacaaaccaactattcggcgtcaaaagccggcgtggtgggaatgaccaaaaccgcctgccgcgaactggcgaaaaaaggcgtcacggttaacgccatctgcccgggctttatcgatactgatatgacgcgcggcgtcccggaaaacgtctggcaaatcatgatcaacaaaatccctgcgggctacgccggggaggcgaaagacgttggcgagtgcgtggcgtttctggcgtctgacggcgcgcgctatatcaacggtgaagtgattaacgtcggcggcggcatggtgctgtaa

SEQ ID NO: 385276 - DNA, 1602 bp, Salmonella enterica
gtgagcagcaaatttatcgacgcccatcaggcggcgcagtgggtcaccagcggcgacaccgtctgcaccgtcgggatgacgcttatcggcgcggcggagtccattttaagcgctatcgaagcgcgctttctgaccgcgggcgaaccgcgcgacctgacgctgctgcatgccgccgggcaaagcgatcgccagcgcggcatccagcacttcgcccatccgggtatggtgacgcggcttatcggctcgcactggggcctggcgccgcgctggatggcgatgatcaacaacaacgaagtggaagcctggtgcctgccgcaggggcagatcgtccatctctatagcgcgatggccgccgggcttgcggggcggctttcccccgtcgggctcggtacctttgtcgatccgcgcatggaaggcgggcggatgaacgtccgcacccgcgaacggcccgatctgatcgagcacgtgacgtttcgcggcgacgaatatctgttctacccggccattcctctggacgtggtcattgtgcgcggcacccatgctgatgaagagggcaacctcacgaccgatgaagaggtgatgaagctggaagttctgcacgcggttctcgccgccagacgctatggggcgaaggtgctggcgcaggtgaaatatcgcgtggcgaaaggctcgctgcatccgaaaagcatcaccgttcccggcaacctgatcgacgccattgtggtgtgcgaagagccgcaagcggatcatcgccagacctccagctgggacttcgatccggcgctgtgcggcgatatccagctacccgccgcgcagaacgcgccgctgccgctcgacctgcgcaagcttatcgggcgaattgcctgccgctacctgacgccaggctgcgtcatcaatctcggcaccggcattcccaacgatgttattggcgccatcattcacgaagaacggctcggcgagcaggtcaccatcaccgtggaatcagggatctacggcgggcagcaggcgggcggcgttgatttcggcattggtcgtaacctgagcgcgatgataagccaccaggatcaaatgctttattacaacggcgcaggggtcgatatcacctttatgggcgccggcgagatggacccgcacggccacgtcaacgccacgcggctcggtgcatcctgccccggcgcgggcggttttatcgacatcacccagaatgcccgccacgtcgtgttctgctcctcttttaccgccaaagggctggagatcgcctgtgaacaaggggccctgcatatccggcgcgaaggcgaggtacgtaaattcgtcgccggggttaatcagatttcttacaacggcgagctggcccgcgccaaaggacaaaccatgcattacgtcactgagcgggcggttttcgaactacgcccggaggggccggtgctgacggaaatcgcccccggtatcgatcttgagcgcgacatcctggcgcatatggattttcgtccggcgatcgccgcggatcttcaggttatggacagccgcttgttcaccccgcagcactgcggcctcgcggaacatctgtcccggaattcatcctctgactcacaaggaaattag

SEQ ID NO: 385277 - DNA, 1557 bp, Salmonella enterica
atgagcagcacctccgccgacttccagaatctgtaccaggccctgagccacagcgctgcccgtagcccggatgccctggcgctggcgtttgaggatcgacgctatctgtaccgcgattttcacctgcgggtacagcgagcgatggcgcagcttgaccgcatctggtcgctgcgcaaaggcgaccgaatcctgctggcctgggggaatcatcccgctttttgcgaagtcctttttgccgcgcttggtctgggcatcgaagtggtgcctttcagcactaagcttaagcaggccgagagcgaggagctggtgggccatatcgccccgcgggtcgtgctgttcgatgcgaccgtacaggactggctgaaacacacccccgacgcgcgcgcggtttcactcagcgaatggcaggcgctctcacttcccgaaccgctgacccgccagccggtcccggttaaccgcgacgatacggcggtgatgatattcacctccggtaccaccggagagccgaaaggggcgattatcacgcacaataacctgctctgtgcgattgacgcctatacgcaaaaactgaatctcaccgccgcggatagcaccattctggcggtacctgtctatcacatcaccggcctgtcggcgctgctggcgctgtttattagcctcggagcgagcatctggcttcagcaccggttcaacgccccgcaggtgatcaacaccctgcgcgagaagaacattacctttctgcacggctcgccaaccatttttatcctcctgtgccaggccgcgcgcgagcagagcgccagccatccaggcgattttcccgcgctacgcacgattgcctgcggcgcgggccacctgagcgacggactgatcaacgagttaaaaaccctgtttccgcatacggcgattcagccgatctacggtctcaccgaaacgacctcacccgcgacgatttttccgggcgacgtccggggcagcgataaatgcggcagttcgggccaggcgatccccggacttgccattacgatccgcaacgatcgccagcagcccctccccgccgggcaaatcgggcatatctggctaaaaggcgatgtggtgatccgcgagtactggcagcacagcgaacgacgcccgagctgcgatgcgcagggctggttttgtaccggcgatctgggctatctcgacgacgaaggctggctgtacatcaaagaccgcagcaaggacatgatcaatcgcggcggagagaagatctactcgctggagctggagaacatcctctctacctatcggggagtgcgggaagttgccgtgatcccgacccccagcccggtctatggcgaagagccggtggcgtttatcgtgccggacggccagcaccacctgaccagcgaagagatcctcggctggctgaaggtcaaaatcgcccgctttaagctgccggcgcgcattattttcacccgcgttttaccgcgtacccataacggaaaagtgagcaaacaacagctcaaaacgcgcctcgcggaatccatcatcacgctatcaacggaggataaaaagtga

SEQ ID NO: 385278 - DNA, 390 bp, Salmonella enterica
atgcgcgaacttatcaacacgattgctcatattggctatcaggtcagtgacttaacgcgttcgcttgccttctatgaaccgctgggctttcagcgccagcagcggtttagcaagccgtcgccgcagggcactattgaagtcgcgttcctggaaatggcgggcgccgtcctcgagctgtatcagcttcccgcaggaacgccctttgacgctcctcgctgcggtatcgatcatctggcgctggaagtccgcgacctggatgcggtgcagcagcggctggcggcgctcggttatccgctcgatgaagggccgacagaagaagacaacgtgcgcttcctgcttattcgcggccccgatggcgaacggctcgagttcgatgcctttaagcgctaa

SEQ ID NO: 385279 - DNA, 1335 bp, Salmonella enterica
atgagtacgctaatcacggataaggtcgataaagcggcggtccacaatgaaaaactggacaccagcgcgtatttaccgcataccccctggctgcaatttttactggtctgttgcctgtttgcgctatgggggatggcgggcaacctgaatgatattttgatcgcccagtttaaaaagggcttcgatttaacggatacccagacggcgctggtgcagtcgatttttttcctcggctacttttttgtcgccctgcctgcggcggcgctgataaagcgttattcctataaagcggcgatcattattgggctgtgcctgtacgccctcggctgcttcctgttcgttccggccgcgcagatcatgacctacggcgcgttcctcgcctgcctgggggtgatcgcctgcggactctcttttctggaaacgtcggcaaatacctattcaagcctgctgggcccgattcaatcctccacccagcgcattaacttttcgcagattttcaactcgctgggcgtgatttccggcgtgctgattggccaggtgatggtgtttggcgagaacgatccgagccatgaacagctgctggtgatgcccgccgccgccgcggacgctgcgcgccatcaaatggtcggccaggtggtcggaccctatctgattatcggctccgtgctggtggtgctggcgctggtgttcgtgtttattaaattcccgtcgtgcaagggcacgccctctcagcagcagcaactcccgacggaaagcatgggacctacgctgaaacgcctgtttgctatcccgcgctttcgcctcgggatcctgtcgcagtttttgtacgtcggcgcccaggttggcgtatggagcttcacgattcgctttgtgcagctcgtgcagcagggcaccagcgagcactccgcgacttactggctgctggcttctctggtgatttacgctgtgggtaaaaccgtggccacctggttgatgaaccgcctgaacccggcgctgctgctcggtagctttgccctggccgccactgtccttttattggttgccgtattcagcagttcaatgctggcggtctatgcgctcattctggtcagcttctgtatggcgccatgctggccgacgaactttggtctggtcatcaaagggatggggaaagatacccagaccgcaggctcgatcgtggtgatgtcgattatcggcggggccgttattccgctggtgatgggcattatctcggatatgaacggcggcaatatgcaaatcgcctttatcgctccgctcctgtgctttgtgtatgtcgctttctacggtttctggtgcgtgcgtaagggggtataa

SEQ ID NO: 385280 - DNA, 942 bp, Salmonella enterica
atgtcaggaaaagtctgtgtttttggttcattcaatttcgacatggttgccagggtggagcgctttccggtaccgggcgagtcgttagtggcctgcgggagtatgaccagcgccggggggaaaggggcgaaccaggccaccgccgcgttaaaagcgggggcgaatgtccactatatcggcaagattggcaatgataccttcggccattttgcccgccgtcatctgaaaggcgtgggcttcaatgccgtgacgctgctggtcgccgaagacgtccccactggcaacgcactgatttatgtggccggcaatgatgccgaaaacatgattgccgtcgaccccggcgcgaatatgacggtgaccgatgatgaaatcgccggctgcattcccgctatcggctgcgcggatgtggtgctggttcagctggagaacaatctttccgccattgagcaggtcgttgacgccggcaaagaggccggggccttcgtggtgctcaatcctgcgccctggcagcccgttgagcacgcctttctaagcaaagtggatctgctcacgccgaacgccacggaggccgggttaatgaccgggcgccgggttgactctctggcggccgcggccggggccgccgatgcgctgcatgctcagggcgcacgcaacgtcattatcaccctcggcgcaaagggcgccctgctgagcgagcagggcgtgaaatcccctattccgtgctttccttctcatccccgcgataccaccggcgcgggcgatgccttcaacggcgcgctggcggcgcgactggcctgcggcgagccgctacatgccgcagcccgatttgcggcggcctacgccgccgtcagcgtcgaaaagcagggcgcatcatctttacctgagtaccaggaggcacgagaacggcttttgcgtgccgcctctgattatgaaatggcataa

SEQ ID NO: 385281 - DNA, 690 bp, Salmonella enterica
atgcgttattacctttctccctcgctcatgtgtatggacatgatgaagctgacggaacagctgcactttttaaacggcaaagccgacaggctgcatgtcgacataatggacggtcactatgtcaaaaatctggcgctatcggccagctttgtggcgcagattcgtccctacacatcgcttcccatcgatgtccacctgatggtcgaagagcccgcctcgtttatcccgtcgctgacagaagccggcgctgacgctatttcactgcatccggaaaccatctgccgcgaagccttccggctcatcaatatgcttcgccaggcggggaaagaggtgggcatggtgctcaatcccgccacgccggttgagagcatccagcactatctgcatctgctcgataaggtgacggtgatgaccgtcgatccaggctatgccggtcagccttttattcccgaaatgctcgccaaaatcgcgcagcttcatcagctaaaagagaccggcaacctcagcttcttgctggaagtcgacggctcatgcaatcgcaacacctaccgcgagctgctgggagccggagcgcagatattggtcatgggcagcagcggtttattccgcccggatatgccgcttgagcaggcctgggaaaaaatgtcccgcgatctgtccgccgcgctgcactcccccgggctcgtataa

SEQ ID NO: 385282 - DNA, 801 bp, Salmonella enterica
atgttgccgctggaacgtcatcgtttgattgttgaactgctgggccaacgcggcgtgatgcgggtgaatgagattgcgcaagcgacccgggtctcaagggaaacgattcgccgcgatctgagcgagctggaacggaaagggatcttaaatcggagccacggcggagcgctggcggcggaaaacccgctgccgacgacccgagcggcagcgtccgccctgccggtcgaagacagccagggaagctttcagcaaagaacgctgctgcacagcgaaggcaaaatgcgcgttgcccgtaaagcgcttcagtttctccagccgggaaagaccatcgtcctggacggcagcagcaccagctggtttttggcccggcagatgccggagatggcgttaacggttattacgccctccatccgcatcttacaaaccctgatgagccgacgctcgttgcatctcgtggggctggggggcgacttctccccgaccgaagagtcgttcttcggtgaaattgcctcacgaacgctgcgcgagtatgccatcgatacgctctttttctcctgccagggtctggagctcgatagcggcttatatgcgggtacggaagcccacgctgccctgctgaaacagatgatgctggcggcccgtcagaccgtggcactggtcgacggcagcaagctggggcgaacaggcgtcgcgcgcatcggcggattgggcgagctggactgtctggtgaccgaaaagtttgtcgatccgctgctggaaaaagagatgacctggcataacgtcggcctacaaatcgcctga

SEQ ID NO: 385283 - DNA, 714 bp, Salmonella enterica
atgaatgaaacaacccgtcgttttgcacgtttagttgacctgagcgcagtccaggccaccagtaccgaagcggacgttcgcgcctgcgccgggctggctgcccgatacaacattatttccgtccacgttctgccctgctggacgcgttttatcagtacgttgctgccgcagcagggtacgggagaggtgatgattggcgggccggtcggctttcccggcggcgggcatgccaccgacaccaaggttcaggaggtgcgccagctgattgccgacggtgcccgcgaagtggatatggtggtgaatatcggcaaagtgttatccggcgattatgactatgtgcgcgaagatttgcgccgcgtggtggaagccgccgccccggtaccggccaaagtgatcctcgaaacgcactatctcaatgaggagcagattcgccgcgtgtgtgatattgccgtagaggtggggatgaagtgggtcaaaacctctaccggctgggcgcccaccggcgccacggtggaaaaagtcagcatcattgccgaccagcttaaaggccgaatcgatatcaaaggggccggaggtattcgcgatctggccacggtgcgcgcgctctaccagcttggcgtccgccgctttggcatgagccatggcgcagtaacaaaggtgctggctgaactggagcagcatccggaacgttttcccgagctgaacgccgattaa

SEQ ID NO: 385284 - DNA, 1506 bp, Salmonella enterica
atgaaagataaaatactcacgattgatgttggcactggcagtacccgcgccgctattttgcgcattgacggtgccatgatcggctttgcgcaaagagagtatgagcaaaccacgccgcgtgcgggttggtcagaacaggccccgtctttatggtggcaggccgcctgcgactgcatacgcgaggtgctttaccgctatcctgaaacggctgcgcagattgcggttattggcgcctgcgggcaaatgcacggcaccgttctgctggacgatcgcggcgagctggtggaggacagggcgctgctgtggaatgataagcgcagccagccgcaggtggatgcctttagcgcgcgcgaaggccgggagaagtggctggcgcatttaaataatccacccgcggcggcgtggcccgctttcaaattagcctggtggcgtgaacatcatccggagcgctggccgcagctcgccaaagtgttaatgccgaaggactatattaatttcatgctgaccggcgccctggcgaccgactatagtgaggcgtcctgctatttcctgatggacagcgaaacccgcacctggtcttcgcaagcctgcgaaacgtttggtctgcgggtcgatcagctaccggatcttaaactttccagcgacataatcggccaggtgaccccacgtgcagccggcctgacgggcctgccggtgggtatcccggtagttgccggtacgtcggatatggcggcctctttactgggttcgggagtgtatgaaccggggatggcgtccgactctaccggcacgtcgacgctgattacggtggtatcgtcgtggccgttgcgccatccgctggttaataaccttcatctggctaacgcggcctggggcggatttacgatcctcgacgccggcggcgatgccgtccgctgggcgcggctggcgctggccgataaccagattacgcatccgcagcttttgcaggaagcggcagcggtgccggcgggcgcggaagggctgctctttcttccctatctgacgggagagcgcctggccgaacacacgaactcgcgggcgcagtttttcggcctgcagcgtaagcatcgccgcggtcatttattccgcgcggtcctggaaggggtggcctttgcgtcctggcgcaatcttcgccagttgcaggcgtgcgggcaatatccgcaacaaatgatcgcttccggcggcggcgcgcgcagcccgctgtggcttgaaatcaaagctgcggcgtacaatcttccgatattatctacgcgcaatcaggagaatggcgtcaccggatgcggtattatcgccggggttggcgcggggctgtacgccgattttgccagcggcgtgcgccagacggtgcagttcgacaaactgatttcgccagctccccgtctgcgggattattaccacgcctgcagcgagctttttgatacgctgtaccggcaatccgccgccttatacgacaggctggatgcgctcagcgtgggacccgactga

SEQ ID NO: 385285 - DNA, 774 bp, Salmonella enterica
atgtttgcagaagaaagacaggagaagttgctcagtattctcagggaaaaacgcaaagtggctgtttctgagatgtgtgacgtctttaatgtatctggcgccaccattcgtgccgatctccgccaactggaagaggagggactgctgacccgtacccacggcggcgccgttcttcgcacgcgggcgagttttgaacaggcgtcggacgcgcgtgaaattgtcaacttcagcgcaaaagagcggatcggccagcgcgcggcggcgctggttgaggatggcgacattatcgtgctggataccggcacgacgaccctgcatatcgcgcgcaatattcgcgaccgacaaaacgtcactgtggtcaccaacgattaccaaatcgcccgcgagctggaagccagcccctcaattcaaaccattctgctgggcgggatcgtgaagaaggggtaccactgcgtggtggcgatcaacggacgctccattcttgataccctgaacgtagataaagcgtttatgggtgccaattcgctgtcgctgaaacacggcgcctgcgtggccgatatcatgctggcagaaacgaaacgcggcatggttgaacatgccagtcaggtgattatcgtctgcgactacagcaagctgaataatacctcgcttgcccagtttaccgccgcagatcgtattgataccgtggtggtggatcgtctgcctgatgacgttcaggcgtatcgcaatgccggaattcagattatcgccctggatgaagaagagcgtctttag

SEQ ID NO: 385286 - DNA, 531 bp, Salmonella enterica
atgaaatacacaatattgtcgctggtagcaggtgcgctcatcagttgttcagcaatggcagagaataacctgactgtaaagatgaacgacgccctgtccagcggaaccggagaaaacatcggtgaaatcacagtttcagaaacaccttacggtctgcttttcacccctcacctcaaggggcttacgccgggagttcacggcttccatgtgcatacaaacccaagttgtatgcctggaatgaaagatggcaaaagcgtacctgcgttaatggcaggagggcatcttgacccggagaaaacaggtaaacatcttggtccgtataatgacaaaggtcatctgggagatcttcccggactggttgtcaatgcagatggtacagccacatatccattactggcaccacgctttaaatcactgtcagaactgaaaggtcactcactgatgatccacaaaggcggagataattactccgacaatccagcccctttggggggtggaggcgcacgttttgcgtgcggcgtagttgagtaa

SEQ ID NO: 385287 - DNA, 213 bp, Salmonella enterica
atggcttttcgttttccacaaataatactatttttactggcagctattttattttgccccagcagttatgctgagcaaaagccgaccgctgcgcaggaagcgcgtaaaaccgctgttgaggtcgctgttgaaggcatgagtcgcgccgccgttgcgggtccgacaaagattagtttatacccatcgtcattgaagatgcttgatttttcatga

SEQ ID NO: 385288 - DNA, 333 bp, Salmonella enterica
atgactgacagactgaatgattttaaccagcccgtcggcgcagaattgcccgactggaaaggcgctaaccagccctgtggaaaaacgttgacacgcacagtgaatatcgagctgcactggctgccgccatacagccccaaccttaacccgatagagcggttatggaaggtgatgaatgacatggtgagaaacaatcgttacttcgccacggctaaggagttcagggagaaaatacgctacttcttcagcgatactttaccggaacttgccgggaacctgtcatgtcgtattaatgatcacttccagacgttgcgtcctgcaacttcaagttaa

SEQ ID NO: 385289 - DNA, 1698 bp, Salmonella enterica
atgattattaatcctgttttgcgcattgcattcttccaatttacaataatcagcacgctgctattatcggggcataatacttttgcagatgaatatatagcaggtgattttatccccgatagtctatatattcttccatcaccaccagataaaaactcttcagcgtttatgaatgataaaaatctgtatattcctccaaaaaaaggaatgaagactccgcaatggcgtgacgcacagcaaacggtggacttgaatgatatcaacgctctgttcgccaatgctacggggcttgatttggataaaaagcacatgccgaaaacctacaacctcctggagtcgctggtgccattggtggctgataaaggtactcgaaaagccaaagagttctatcaccgtgagcgtccattcgtttatttccaccaacaaacttgttcgcctgagcaagaaaatgacctgcgtaataatggctcttatccttctggacatgccgctacagggtgggcgttagctctggtactggcggatatcatgccggaaagaagaaacgaaatattgaaacgcgggtacgaaatcggccagttgcgggttgtttgtggtgttcactggcaaagcgatgtagatgcagggcggttagtaggggcggcaatttattctgctttaaaccagtcagaatcatttaaacgagatctgaataaagcgcgtgatgaaatacaccaactgatcgctggcagaaagtggtacagcaacgtttatgcgccaacatttattgactatatcgatggaaaatgggtgttggttgattgctggaatagtcgcattctctggaacaatgagctaacaccagatttatcgaactggcaggtgctcgaagatcgattttcctcccattcggttgcctatgatggccataaatattgggccacggaagataccgaacacggaagaatagtgttttacactttctataatggcaaatttcatcaagcttctgatttaaacaaccttggaacaagaacgcaccgtcttcgctacgattcgcatagtaattcttttatgctaatttccgcaacgtcaggcgacttctggcgtatacagattgtcgacaacaaaccgaaaattatccaacatattaatctgaaaaaatatcttacaccacaaagtaaggattttgaaatccgttcattcacccaacataatggtatgttatatttcgtatcgtctttagcaacgccggaaatactgatagttaaagatgattcagatcttacgatggttaaaaaaatacccgtgccatccgacttatcgaacatgcaggaaatttatttttttcctgatgggaaggtttttatctccagcgattataaaaaagttgtactattaaattctattgaagacattagccacgccaagaatcaatatgataagtttagttttttaggatcgccatattggatctctaaatgggcgaatcattattttattactgagttaggatacaaaaatggtgatatcaacaatcttgggcttaacggtgtatctgagtggagctatagcaatgggaaattaaaaaaactaaaagaagtagttcgtttcacttcacctactgatagcaatgtgcagaaaaaatcggaaatcaggttccagatatgcccgattaacttgaagttgcaggacgcaacgtctggaagtgatcattaa

SEQ ID NO: 385290 - DNA, 243 bp, Salmonella enterica
ttgaaagcaaagttgtcaaatcaggacagtgaacaccttatcttttatgaagatgaagtggatatcgacttcaatcctaaaatcggtgctgactggcaactaaaaggtgaacagaaacaggttgttactcccggcatcaatcagaataattattttgctggcgtacttaatgcaaagagcggagaagtccattatgtcagcggcccaaagaaaaatacgagtctgtttatcagtatgttatag

SEQ ID NO: 385291 - DNA, 969 bp, Salmonella enterica
atgagtaacgtggattgttgtggtattgacatcgccaaaagcaagtttgactgtgcaattagacttgagaatgggaaatataaaaataaagtattcaaaaatgatgtaagcgggtttgtcatttttattagttggattactgagcagaatataaaaaaccttcatgtttgtatggaggctacgggaatttactgggaagcattagctgaatatttaattcaccgtggatttaccgtcagtgtagtaaaccctgcacaaataaaagcattcagcatgtccctgttgatcagaagcaaaacagatcgtggagatgcccgtgttataagtgacttctgcttcgaacgtcagcctgcagtgtggcaggcaccatcagtggaagaacaagaacttagggctctggtgcttagacttgagtcattacagaagatgcgaacccaggagagtaatcgaattcaggtagccagaactaatgtgatcaaaaatattaaagatcatatagtgtggctggataatgaaattgctaccttactgaaggagatacagctttatattaacagaaatacagagatgaaaaatatgaaaaaacttctggaaagtattccaggattaggagcgaagacagccgctgtattgttgtcctttggtattcatcttgggcgttttataaatgctcgtcaggcaactgcctatgctggggttgatcctcgccttaatgaatccggaagtagtgtcaggggacgcccccgattatccaaaacagggcacgcatttttgcgaaaatctctttatatgccagcgatgacaacgcttttcaggactgaatggggaaagcaattctatgcccgcctttctgctgcggggaagccaccaaagttaataattggggccataatgcgtaaactgattcatgttgcgtttggcgtactcaggatcagtgaaaaattcgataaaagcttacattgcgtttga

SEQ ID NO: 385292 - DNA, 969 bp, Salmonella enterica
atgagtcagccaaatccactttgtgtggggatcgatgtttcgaaagcatttttggacattgccgctaattgcgatattgcgcagttcactacaagtaatgacgctgatggctttgatgcgatcatcaccgaactgaaaaaatattctgttgtattggtcctcatggaggctacgggaggtcttgaatcctccgtagtcctctctcttcaggctgagggttttgatgttgctgttattaaccctcggcaggccaaagacttcgcaagggctatggagtatctggcgaaaactgatcgcattgatgctcgtgtgctggcccaaatggcagaggttatcaaccgctatcctgaccgtcagcgctttatacgtgacattccagatgccgagcgccagatccttacggcgatggttgtgcgtcgacgccaattgacagcaatgattgtggcggaacgttattgtttgtacccgtcccatccccaaaacagaaaaagcattaacatcgttctcaagacgttggtggatgagatggcccgcattgataatgagatggctgctcacgtaagaaggcacttccatgacctttcggagttgttcatatctattaaagacgtgggtgcgaatgctgttgcagtaatgttggctgaggttcccgagcttggaaagctctctcgcagggagattagtacccttgtgggggttgcccctgtaaacagggactccggtgcaatgagagggcgacgaactatttttggcggacgagccgacgtacgttctgctctgtacatggccgctcttgtgaccgctaggcataaccctgttataagcgcgttttaccaacgacttgtccatgcagggaaggcaaaaaaggtggcgctggttgcctgtatgcgcaaactgctgaccatcatgaatgcgatgctcagaaaggacgagggatgggatgaatcgtatcatctgattgcctcctaa

SEQ ID NO: 385293 - DNA, 1119 bp, Salmonella enterica
atgttgagagttttacacgtctataagacctattatcctgatacctatggtggtattgagcaggtcatttaccagttgtctcagggccttgcccaacagggaatatctaccgatgtatttacttttagtccggataaaaatactggccctgttgtttatgaggatcatcgggtcatttataataagcaattaactgaagtcgcttccacgccgttttccctacaggcaataaagcggtttaaaaaaattaaagataactacgacattattaattaccatttcccatttccatttatggatattttgcatctgagcacacgtccggatgccaaaacggtagtcacttatcattctgatatcgtgaaacaaaagcggttaatgaagttgtatcaaccattacagcatcgctttctttcaagcgttgattgtattgtggcgtcatctcctaactatgtggcttccagccagacgttacaacaatacctggacaaaacggtggtcataccttttggtctgcaacagtatcatattcagcacgacccgctacgcctggcacactggcgcaaaacggttggcgagaattttttcctctttgtcggcacttttcgctattacaagggattgcacattttgctggatgccgctgaacaaagccaactggcggttgtcatcgttggcggcgggccgctggaaaccgaggtgctacgtgaagcgaaacttcgcgggctgcgtaacgtcatttttaccggcaggctcaatgatgaggataaatatattctctttcaactttgccgtggcgtcgtgtttccatcgcatctgcgatctgaagcctttggcatcactctgctggaaggtgcgcgatttgcaaggccgcttatctcctgcgagattggtaccggaacatcatttatcaaccttgataaggttaacggctgtgtaatcccaccgcacgacagcgctgcgttggtggaggcgatgaatgaattgtggcataacgatgagatcgccctgcgctatggcgaaaactcacgtcatcgctttgagaagatgtttacggcaaggcatatgattgacgcttacgttaatctctacctcactttactggaacaaaaaacctga

SEQ ID NO: 385294 - DNA, 1146 bp, Salmonella enterica
atgaaaataatatttgcaactgaacctattaaatatccattaacgggtattggccgctattcttttgaacttgttaagcaacttgctgtcgctagtgagattgaagagttaaagctatttcacggcactacatttattgatcaaataccattatctggaaataaaggggataataaaaaaaacaatcatcatcgcttgtcagcttttttgcgtcgtcaaccattactgattgacgcctattttatgatgcacccacggcatcaggcatgggcattgcgtaattataaagattacatttttcacggtcctaatttttacctaccatatcggcttgagcgcgcagtggcaacattccatgatatttcgatatttacctgcccggagtatcatccgcaagatcgtgttcgttatatggagaaatcgctgcgcgaaagtttatcctcggcaaaactgattttgaccgtttctgacttttcccgtcaggaaatgatacgcatgttcaattatccatcagagagaattattacaaccactttagcctgcagtagtgattatattccacgttgtcagatggaatgtcaggctgtactacaaaaatatcaattggagtggcaatgttatggtctatatattggcactctggagccgcgaaaaaatattcgcggcctgttgcaggcataccagatgctgccgatggaaacgcgtatgcgatatcctttaatcctgtgtggctatcacggctgggaagacgatactctttggcagattgtcgaaaagagtaagcgtgaaggctggcttcgctatttaggctatgttcctgataatgaccttccttatttatacgcagcagccaggtcttttatttacccctcattttatgagggattcggattacctgttcttgaagcaatgtcctgcggtattccggtcgtgagttccaatgttagttctctgcctgaagtagccggagacgcggggttattatctgaacccaatgatatagatgcgataagtgctcatattttacaaagtctacaggatgaacagtggcggaaaacggctatagcacgcggttttgttcaggcccggcagttttcctgggaaaactgcgcagcccagaccatcaatgcctataaattgatttaa

SEQ ID NO: 385295 - DNA, 2523 bp, Salmonella enterica
ttgcacattttgattgatgtccagggataccagtcggaaagtagattccgcgggatcggacgtagtactctggctatgagccgtgccattattcaaaattcagaaggacaccgcgttagtattttgataaatggcatgtaccccattgacaatattaataatgtcaaaaaagcctaccacgatatcctggctgatgaggagatgttcatcttttccgcggctggcccaaccgcctattgtaataccgataatcatggtcgcagcaaagctgcgctggcggcgagagacatagcgatcgctaatattaatcctgatatcgtgtacatcattaatttatttgaaggacatagtgataactacactgtctccatacctgttgataacgtgccgtggaaaacagtttgtgtatgccatgacttgattccgttgctcaattcggagcactatcttcgcgatcctaatttccgcgagttttatatgaataaactcgcagagtttgaacaggctgatgccttctttgccatttcacaatccgcagcgcaggagcttattgaatatacaaatgttcccgcatctcgcgtgcaccatatctcttctgcggttggcgaagagtttagcccccaggagtactcggccgatgagattttagtcctgaaaaaaaagtataaacttcctgatgaatacattttaaccctggcgatgatcgagccgcgaaaaaatgtcgaagcgttaattaaggcttatagtcaattgtcaaaatccctgcagcaacgttatccaatggtgttggcatacaaggtggatccggacgacctggaacgcatcttaaccctggcggagaactatggattagctcgtaatcagcttatttttaccggttttctggctaatgacgatttgattgctctctatacgttatgcaagctgtttgtgtttccatcgctgcatgaggggttcggcctgccgccgctggaagcaatgcgctgcggggctgcgacgctgggctctaacgtaaccagcctgccggaagttatcggctgggatgaagcgatgttcgatccgcgggacgtgaacgatattcgtcagttgatggaaaaagcccttaccgatgacgcctttttcattgctctgaaagtacacgcgttaacgcagtcggcaaagttttcctgggctaatacggcgaaactggctatcgacggttttagccgattactgatggagaaaaaggaccacgttccgctttctgttgccgatatttgcgcttcccgatttgcagcaatacaggaaattgatgtattgagcgaggttgatcgccttggcctggcgtgggcggtagcgcgtaatagctttaaaaaacatcagcgcaagctgttggtggatatttccgtattagtgaaacacgatgcaaagaccggcattcaacgcgtatcgcgtagtattcttagcgagctgttgaaatctggtgtagaagggtatgaggtcagcgctgtttactacacgcctggtgaatgctaccgctacgctaacgcctatctttccaggcatttcaactgtgaattcgcttctgatgagcccgtgttattcagtaaggatgatattctcattgttaccgatcggactgagcatttgttttcgaaaggggctacaccaattgattatatccgctcggctggcgcattcgtctgtttcctggtgcacgatattttacctctaagacggcccgaatggagtgttgaaggtattcaacgcgaattcccaatttggctatcctgccttgcggagcatgccgaccgactgatttgcgtctcagcgagcgtggcggaagacgtaaagctctggattgccgaaaacaaccactgggtaaatgctaaccccttattgaagataagtaatttccatctcggtgccgacattgataatagtttaccctcaacgggtatgccggaaaacgccgatgagttgctggcaaaagtagcggctgagccgtcttttatcatggttggcactatagagccgaggaagggacatgcgcaaacgctggccgcttttgagcaactgtggcagcagggtaaaaacgataatctttttattattggtaagcagggatggaaagttgacgcgctgtgcgaacgcctacgccatcacccgcaactaaataaaaaactgttctggttacagaacattagcgatgagtttttatcaaaactatatacacaatcgcgcgcgctgattttcgcctcgttaggagaaggattcggcttaccgttgattgaggcggcacagaaaaaactaccggtgattattcgtgatatcccagtatttagagagattgctcaacagcacgcattttatttttccggtgaggcgccggaaaatattgctaaagctattgaagaatggttaattctttatgaacaaaatattcatcctcgttcagaaaatataaactggttaacctggaagcagagcgctcaatttctgttggaaaatctaccaattatatcacctgccgtgaataaataa

SEQ ID NO: 385296 - DNA, 2151 bp, Salmonella enterica
atgactactaacttagataaattagttagcgagctacctgaaatttatcagacaatttttggtcatcctgaatgggatggcgaagctgtgcgtgactgccatgaaagactggcgctgattactaagcagtacgaccatttatctcgtgaactgggtcgaccattgcgagtgctcgatcttggctgtgctcagggcttcttcagccttagtctcgccagcaggggggcaagcgttgttggtatagattttcaacaggaaaatattactgtttgtcaggccttagcggatgagtacccggtgttagatgttactttccgggttggacgtattgaagataccatcgcggcgttaaacgcgaaccagttcgatcttgctattggtttgagtgttttccaccatattgtacatctccacggtgtggaagaagttaaacggttactgtcgcgcctggccgactgcacacaagcgatgatccttgagttagcggtaaaagaagagccattgttctggtatatttctcagccgcatgatccccgtgaattgattgaacaatgcgcgttttatcgcgtgattgggcagtttaatacccatctttctcccgtgccgcgacctatgttcctgataagcaatactcgtgtaatactggaggatttcaaccagccatttgagcgctggcaggatcacccgtatgcgggagctggttttgcgcataaaaagagccgacgctattatttcggcgaaaattatatctgtaagcttttctattataatactcctgacgatttattaaccgtcgaagagagacagcgcaatcgggaagagttaaacaacgaagcgaaaatacttacccatccgccgcgaggttttaaagcacctaagttgctggcgtatggcaataatgatcactttggctggctggtaatggagaaattatcaggtcgcctgttaagcgatatgctaagagctggtgaaacccccgatcgtgaaaaaattctgcagtcattgctcatggaactggttaagctggagaaacaaggactatggcacgatgatatccgtctctggaatgtaatggttgacagtcagcaaaaggcctttctgattgactttggatctatcgttaaaatcccgcgcgactgtagttggccgccaaatatcgttcagtcctttttcatttttgtaaatgaactgtttgatgaacagcgaagctggaagggattatggcgttccgcgccgttgcacccctttaatttaccgcaaccctggtcaaattggttatacgccgtatggcaaaagccagttgatacgtggagttttaccctgttggcacagttgtttaaaaccaaagatcggcttccggcgccggaaagtaatatcagcgccattgagcaatggattaccgcccaggagacggtgctgctggaaagccaaacccgcctgcgtaacgaggtggctcattgtgaacaactgagtcagcagatgtatcaacttaatacgcagatgacccagcttgagcacgatatggctgcgctgacggaaacaaagacagaatctgatatcgctgtcatggccggggctggttccaggaggggggaaagcgagctgaaatggcttattgaacacgttgaacagcttgataatttactacaacaggcccggtgccagccagcggaagctgtgtcgttgccgcctgagacagcgatattacaggagaagctggcggcagcccatcaagatattcatcatttaaaaaatgtaaaacatcagttgcgccatgaaatagacaaaattcatcgcagccgttcatggcgaatgacccgttgttaccgttatgccggcctacagattcatttgctacggcagtatggttttagccagcgctgtaaacatctggtaaaacgaatcctacagtttgcattttcgttcctgcgtaaacatcccaaagtgaagtataacgcggtaaacactttacataagttaggactttatcaacccgcataccagctctaccgccggatgaatccgttgccggatagccagtaccaggccagcacgcagcaggttgcgcagaccgagttacaggtattgcatcctgaaatgttgccgccagcagtccatgaaatttatctcaaactaactaaaaataattaa

SEQ ID NO: 385297 - DNA, 1296 bp, Salmonella enterica
atgagtattaaagttcgaaacgtcggtaaggcgtataaatactattcatcaaaatggaatcgggtgattgagaagctactgcctggagataaaccgcagcacagtaaaaaatgggtactgaaagatattagtttcaccattaagccgggagaatctgtgggtattgtcggcgtaaatggtgcagggaaaagtactctgttgaaattactcactggtactacgcaaccgacgaaaggttctattgaaattcggggaagagttgcagcgctacttgagttagggatggggtttcatcctgattttaccggtactcagaacgtttatatgtccgggctaatgatggggctaagccgagaagatatcgagcgtttgctgccggaaatcgaagcttttgccgatattggtgattatatcaatgagcctgcgcgcatctattcaagcggtatgcttatgcgcctcgctttcgccgtcgctacggcggcacgtccggatattttgattgttgatgaagcgctttcggttggcgattcgcgtttccaggcaaaatgttacgcgcgtatcgctgatttcaaaaaacgaggcactacgctgctgctggtttcgcacagtgctggcgatatcgttaagcactgcgaacgcgccattttcctgaaagatggtgatatttgtatggatggtgcggcgcgcgatgtaactaaccgctacctggacgaactattcggtaagcctggtaaggctacgtccaaccggacaaagaataaaggctggatcaataactcggccataaaaatgtctccggaagagatttctgatgtttatcacactcgtccgggctacaggccggaagagtatcgttgggggcagggtggagcgaaaatcattgattatcttattcagagtaatggcgaagattttccaccttcgcttatcggcaatcagcaagtcgattttataatgaaggtcatttttgaacacgattttgactgtgtagtgccgggactattgattaaaacgcttgatgggttatttctgtatggcacaaattcttttctcgcatctgaagggcgcgaaaatatttccgtatcccgcggtgatatccgcgtatttaaattcagcattcctgtcgacttgaacagcagtgattatttgctctcattcggtatctccgaagggaatccgcaaaccgatatgaccccactcgacaggcgctatgactccatcatattacatgtcaccaggagtatggatttctggggcattatcgatcttaaggcaacgtttaatagttaccagtga

SEQ ID NO: 385298 - DNA, 795 bp, Salmonella enterica
gtgaggcctatgttttcagcgatttatcgctatcgtggttttattattgacagtgtaaagcgagactttcaggcccgttatcaaaccagttttctgggcgtggcgtggctgattttacagcctgtcgctatgatttccgtgtatacgcttattttttcggaactaatgcgtacacggttggcaggtatggatggtccctttgcctatagcatctatttatgttcaggggtactgacctggggcttttttaccgaaatgctgaataatcttgtcaatatatttctgactcatgcaaatatccttaaaaaaatgagttttccacgtatttgtttacctgttattattacctcttcagcttttattaatttcttaattatattcttattatttattgggtttctccttattaccgggaattttcctggctggatttttttcgaagttattccggtattaataattcaggtgctatttactcttggactggggattatcctgggagtgttgaatgtttttgtccgcgatgttgggcagttcgtgaatgttctgctgcaattctggttctggttcacacctattgtttatgtctccaaaaccctgccggaatgggtatcgggatttttagtatataaccctatggtatcgattattggctcttatcaggatgtaatactctaccaacaacatcctgactggatggcgctttttccagtagccattatctctcttatactgtttttattcgcctggcgtctgtttaaaaaacattcggctgatattgtggacgagatttaa

SEQ ID NO: 385299 - DNA, 1383 bp, Salmonella enterica
atgactcagcttaactgttttaaatcctacgatattcgtggcgaactgggcgaagaactgaatgacgatgttgcctaccgtatcggccgcgcctatggcgagttactgaaaccacgtcaggtggtagttgggggggacgtgcgactgactagtgagtccctgaagcaggcgctagccaacggattgatggatgcgggtaccgacgtgctggatattggtctgagcggtaccgaagagatttattttgctactttctatttgggtttggatggcggaattgaagtaacggccagccacaacccgataaattataacggtatgaagctggttagggagaatgcaaagcccatcagtggtgataccgggctgcgtgatatccagcgtctggcggaggataaccgctttacgtcgatagactcctcccgccgtggcactttgcgccagatttccatcctgcaggaatatgtggaccacttgatgggctacgtaaatctggcgaactttactcgtccgctgaaactggtggtgaactccggtaacggaacagcagggcatgtcattgacgagatagaaaaacgctttaccgcggcgggcgtaccgatgaccttcgttaagattcatcatcagccggatggtaacttcccgaacgggattcccaacccgttgctgcctgaatgccgacaggacacatcggatgcggtgcaagaacacagggcagatatgggtatcgcctttgatggcgacttcgatcgttgctttatgtttgataacaatggggaatttatcgaaggttattatattgtcggcctgttagcagaagcgttcctgcaaaaacaaccaggggcgaaaatcattcatgatccgcgcctgacgtggaacacggtggatattgtgactcgctgcggggggacgtcggtgatgtcgaaaacaggtcacgcgttcattaaggagcggatgcgccgggaagatgcgatatacggcggggagatgagcgcgcaccactactttcgggattttgcttactgtgacagtgggatgatcccatggttgttggtgacggaactgctatgtctgaaggggaatacattaaagacgctggtggcggatcgccaggctgcgtatccggcgtcgggtgagattaaccgcagactgggcgatgcggcggcagtgatagcgcgcattcgcgagcgttatgagtcggaggcggtgaaggtagacacaacggatggcatcagcatcgaatatacggactggcgttttaacctgcgctgctcgaatactgagcagatggtacgtcttaatgtggaatcgaaagcagcccctgcgctgatgaatgagaagaccgccgagttgctcaacatgctaaaagaggaaacgctgtga

SEQ ID NO: 385300 - DNA, 1368 bp, Salmonella enterica
atgttgcttcctgtgattttggctggcggcgccggtagccgcctgtggccgatgtcccgtgagctttatccaaaacagttcctgaggctgtacggacagaataccctgctgcaggaaactatcttgcgcctctccggtctggatatccatgagcccatgattatctgtaatgcagaacacgggtttctggtggctgaacagctcagacaacttaataagctgtcgaaaaatatcatacttgaaccggtggggcgtaataccgctccagctatcgccctggcggctttacaggccatacataacggcgacgacccgctgatgttagtgctcgcggccgatcatatcatcaacagccaacagctcttccacgatgccattcgtgtcgcggaacgctatgccgtggctgaccatctggtcactttcggcattgtgccgaacgctccggaaaccgggtatggctatatccatcgtggtaacgcgctagtcgaaagtgaacgctcgctttaccgggtcgctcgctttgtggagaaacctgacctggcacatgccaaagcctatctgaactccggagaatactactggaacagcggtatgtttatgttccgggcgaaaaagtatctttctgagctagcaaaattccgccccgatattctcaaaacttgtaccgctgcggtgcgcgcagcggatagaggcaataattttatcagcattccgcttgaggtgttcagtacttgcccggcggagtccgttgactatgcagtgatggaaaaaactgccgatgcggtggtggtaggactgaatacggactggagcgatgtcggctcctggtccgctttgtgggatgttagtcctaaggatgagcagaataacgtgttaacaggtgattcctgggtgcacaacactcagaacagctacatcaacagtgatggaaagttggtggcggcgataggtgtccaggatcttgtgattgtcaacaccagggatgccgtattggtgatgaacaaaaattgctctcaggacgtgaaaaaggtggttgagcatctgaagctgaaccagcgtagcgaatataagtgccatctggaaacctactttccgtggggctgctgcgacgtggtgatgcagaccccgcgcttcaacgtcaggcgcattactctcaagcctggcgggtcgctctcgatgcagatgcaccatcactacgccgaacactgggttattctcgcaggaaccggaaaaatcactctcagcggcaaacaatttctgctcaacgaaaatcagtcgacttttattcccatcggtgttgagcactgcctggaaaatccgggctgcattcctctcgaaatattggaaatccagtcagtgcttgggtga

SEQ ID NO: 385301 - DNA, 333 bp, Salmonella enterica
atgaagaacgtgttgagcgtgccggagctggtgatggaaataaacagccgcacgctggtccggttactgtcagagcgtctgccaaaacaggggcggcgggtgctgggattactgttatcaggctgtagcccggaaatgacggctcgtatgctggggaccggcatgaggcaggtctggctcgcggagcaaacgctgaaacaacgctgggatataccggcagaaataccgctacctgatgcggtaaggataaggatgccggacgtaaattcagacataaatcaacagattgctttggtaaacactacggcggataacgcatcgaatttacgctga

SEQ ID NO: 385302 - DNA, 1149 bp, Salmonella enterica
atggtgtatgcattatttaactttccggggggatggatagccgacaggctgggattaagatggggagtttttgttgcatttggctggtggtcaattttcaccatagcatctccgtttgccggtaccctgacgggctggttcattatccggggtctgatgggggccggtgaagcacccatatggccttttaacgcgaaagcggccaacagttgggcatcatcttctggacgttcaactgcgtatacctttgctggttcaggtcaatatttaggacctgctgtcggaagtattctggttggatggataatcgttacacttggctgggaatggtcattcattatttttggtgctgccggtctgctcctgctgccagtctggatatggctggtacgtgataccccggtcagcgacagacgtgtcagtcgtgaagagttattgctgattggtaatcaggtcaggagtgatgaggagaaaattgactgggcaggaataaaaaatgtctttttttcccgtacgggatttgggatgttgcttatttatttgacgtttggatatattctttttacgtttcttaactgggtgctaagctatcttttttatactttccatatggatattcttaaaagtgctgtctggtcaagtctgggcgcttttctgggctttatcggttttttactgtccggtccgtttaatgatcgtctggttctgcgttatgacagactgacggcccgccgtatagggacggcggcaccgatgtttatggcggcattatgtgttgtggggtcactcctcacagcaaaatcagggtttggagaagtgactgcagtattgattggtttggttcagttatttatgaatatgactgtcggggcatgggctgtgaatattatcgatatttcgccgaatcaggcctccactggctttgtgtatggcatttttaatggcgtgctaaatgtcatgggtgcctgtaattctttgatactgacagcaattgcttcttcttatggcttcccggtggcttttggcagcgctattatctttatggttgttttcctgatcagtatattatttgtggttgacaggataagttatgaaagcttgatcaaccatgccatgcagtccagaatcacaggggggcaggattactga

SEQ ID NO: 385303 - DNA, 294 bp, Salmonella enterica
atgccccgactaatttatgacgacagtcacagaagtgtggcgggggataatgtatcaagagtacaggaaagggataataaaccggtggtgatggataaacatgatgcgtggttattcactttcagagtaccggcagacgatatctgcattccgtatagcatcttagtgatgttactgaatgacatgcagatacagctctcttttaatatgacaaccggtacgatcagtcaatatcagcagaccgctaaaaatgttgatgccactgctgtttgtgttatgcccatggtgtcttga

SEQ ID NO: 385304 - DNA, 558 bp, Salmonella enterica
atgaaagaatggtacacagttgatgaactgctagagttgcgttcggccgagcttccccaagaaagaagtgggtacagccgcagggcgagcaaggataactggaaaagaagaaagagagatactgggaaaagaggtatcacttatgagtatcacatctcttcacttcctaaagaggtgcagaggttattaggttgccctgaatcgacaatcgaagcccttgctcaaagcgaatccgcagggaaaggttttttgaatgccaatagaaatgattcgattgataggattgttgcaatcgttagttcattaaaacctaatgagtgtgaagacttatctatgatgctaggtcgcaaaggggcggactttctaactaagttgctagatgaagatacggtgtgcttgatgcagctaaccggagagaagaaagaagcggcattactgctgacgcaactagatctaattcgcgtcagagagattttatccgaattacgagcaagtcgtgatatgggtcgaacagcttctcagcaagctgtaggcgaccacaagaaggatttagtttaa

SEQ ID NO: 385305 - DNA, 216 bp, Salmonella enterica
atgaaagttagtaaaaggcagaatatgcatcgtgcggacattgttgctgcattaaaaaagcgcaaaacatcgctgtcagaaattggtcgtatgcatgggaagtcaattcatactgtaaaaaatgcgctagacaaaccatacccaaacggagagcagtggattgcggatgctttaggaatgcaaccatctgatatatggcctgaaagatatgaataa

SEQ ID NO: 385306 - DNA, 4296 bp, Salmonella enterica
atgagtcagcaggaaaatcaacgtaaaaatatagttgatgtattttctccttcagaaatgcaaaaggcattaatgaattcagtaattactggtaataactcagagctgtatgtcgagcagtctcatttaagggttaaaggtaacttccagataactatatttgaaaaagcctggaaaatactcatcgaacgccatgatagcctgcgctctgcattcttatgggagaaattaaaagatatccatcaggtggtgttaaaagagacccactttaaagttgatatcatagagatggcagccggggctgagcgcgaaagaactcagttcattacggcatttatggaggaagacgcgaagaaagggtttgattttaaaataccgccgctaatgcgcctgaccgtatttccttccaccgacgacatctatgatattgtaatgaccattcatcacgttattatcgatgggtgggccattcagattctaactaaagagtttattgaaatttatacggctctggcaaatgaccagccgcttaatttgaataaaccagttagctataaaaactatcttaactggcataatagccaggacttatctgacgttaaccgcttctggcaggataagctggccaaccttgagcagatatcgcgattcccgctatcaatgaagccgcatgaaatgcagagcggttcccggctccggcaaaccaccatgttacttggtgatgagctgtcggcgaaaataacgaaattctgctctggcaatggtatcactgagaactcatttgtttcagcgacctgggcaatcctgctgcatgtattgtgttcaacagagaaggtcacgtttggcagtgtggtatcccagcgctctcatgatctggaaagaagtaacgaaattgttggtccattaattaatattgttccgattgttgtcgccattgatcggcagctaacgctgattgattaccttcgctccgtgcagaaggagttaatgcaatgctaccagcactccggcctgccaattacgaaaattttacgcaacgtgccgacgcgggacgcgaagaacgctatcgatcaaaaattctttgataccattgtcagtgttgaaaaatacttccatgaaaataatcaggatgaagggaacctgatgggccttgagtttaaatttttcgagcatcccacccgggttgatttccccgtcgtctttaaatgcaatctgaataaaatcgagcttatctgctttagtgattatattgccgaaggttatgcaaacatgatagtgagcctgtttgcatgtctgatcgacgtcatcgcgacagattcaggccgcacgctcaatgacgtgctgggcacactctcggggcattacccggttttaaaaggcgagaatgcagccgctgagctgaatttgtgtcagcaaattgatgaaaatgctcgccagtaccctttgcaaccggcctttgccgatgagtcaatcacctatacctatcaacagctgtcgcaaaaaattaagcaaatcgccgctaacctggatatacgcaaaggggagatcgttggtgtttatctggaccgaagcattgattccttcctcgcgatgcttgccattatggcgcgtggaggctgctatttgccgctggacttgtcatatccggttgagcgcctgaaatttatcgctagggatgcgggactcgccagggttattaccaccaacgtaactgaacgtattttcgataacgtacagtacctcctgatggaagatattgcggaaacacactcgcaaggtaattggcaactgccggagtccgacgatgagagcccagcgtatattatttatacatcgggctccaccggtaacccgaaaggggcgatgaacaccaacaggggcgttaaaacgctcctcgcctcatgccatcaggtcatgggagacaaggttaggttcaggcgggggatacagtattcatccattagctttgatgcttccatcctggaactggcgctatccgtggtaagctgcagctgcctgtatctcattccgaatagcaagcggcaggatctgaatcaaatcacctgctacctgaacgtgaacgaaatagcgtttgcatttttaccgccgatcgtgatttcgcacctcaatatcagcgaactggtacatgtggatacgctgttgaccggcggtgacatatgcccggctaattctgcgatggaatgggtaaaagataagtcgaaattattttataacctctacggaccaaccgaaacggccgttatggcgacgtataacccggttcatgaaacccgtaatgccacctcattaggctaccctttaccggcaacggaaattaaaattattgatccgcatggcaacccgcttcctcccggcgtggtcggggaaatgttgataataggtcccggggtgggggcgggttatctgcataatgcggaacttacgcggaaatcctttaaatacggtggctactgcactggtgacctcgcctattatgactgtgatggtatgctgtactttatgggcaggaatgatggtcaggttcagattcgaggattcagggttgagtcaggcgagattgaaaatatcatctgcaaagagtttaaatgtcaggaagtggttgttgttgcccactcggttttaaataacacaaccctgcacttatttatgctagcttcggatgctctgcatatcaaattcagcgatataaaagagaccctccggcgggttttgccgatctacatgatcccgaacgaatgtcatattgttgatgagtgggccgttactccaaatcaaaaaatagaccgtaacgcgttaaaggataagtatatattaaatacgaacatagcccatcaaatggatctcggcgaactatcggaacatgcagaaagcctgattgcagaaatcgccggagcgctttcccttgatccggcatcaatcgcgttaacagatgacttctttgaaattggcggcaactcgttaagccttaccactctggttttgcgcctcaataaacgctttaatattgatttgcctttccagaccatatatgacaacagccggataaatgatttagcaaaagtaatagaacacgttattcatgatcacagcattgagaagcatacagcaggcagtgttaaaaacgactatacattagacgaagcgataaccatcaaagggcttaaacccgtagctgcaggtcgcgagccggtaaaaattttactgaccggggcaaccggctttgtcggcacctattttatccgggagcttatcgatagcacctccgccgatattgtttgcttagtacgcggggaggaccccttgcttgccagagatcgcattgtcgctatgctcacccattatcagatgtaccgggccagcgattgtgaacgtctggtggtagtgttgggggatttttcaaaaaataacttaggtatggacgcagagttatataaagagctggctcaggagatagacaccatcatccactgcggggccaacgtcaatctggcgaatgtgtactccagaatgtctgcggataacgttagcggtacgctgaatatcatcaagtttgcgacctgtgaaaagctgaaaccgatacaccatatttctacggtgtcggtgctggcgggaattattggcaaagaagatgtggcgtatgaagatacgatgacatccgaggaggttctgccggaaaatggctatatccgcagtaagtgggtggcggagaaaatcatggataacgccagacgaaaaggggtgccggtaaatatttatcgtctgcccagagtctggggggacacggtgaccggcaatctcaatcccaatgattccttactgctgatgctggctgcgtccattgaaataaaaaaatttcccttactgcctgacgcgtttttatcctatatcatccccgtcgattattgcgtaaaagtcgttagcgatattgccaggaatataaaagataaggggcgcaattatcatatattatatccgcaacatatttctatgaatgaaattgtcaaccagctccggggcaagggtatggtagttgaaaccgtgccgatgcaagagtggcttgatacgctgaaagttgcggcggcgaaagtgaacagcagcaaagaggttaaatctgctgcctcattctcgttagggtttatgcatgacattttaaaaatgaaggtaacccgcctggataattcccacgccagcgaagagataacgaccgatgctgccagcctgcagaccagcgtatttagtaattatattaactttcttgttaactattcccgttga

SEQ ID NO: 385307 - DNA, 777 bp, Salmonella enterica
atgatagataatgtagttttcccttacgatgcccggagtaagaccggcgcggacattgaactttactgcctgccttccgccggcggtaacgcggcaatgtacaatacgtggaacgaactgacacccgactggctgaacgtttgtccggtggaatatccggggcacgggagtcggttaaaagaaccgttaacaaataatccgcatatgctgatccacgaaattaccgaggcaataattaataagggaaaaagcaaaattgcgctttttggtcacagtgttggcagtattctggcattgcaggtggttaagcaactgcagctaagagaccgcgacgcggcgatacaattaattattcttagcggcagacctgaaacatcaatgctgtcgaaccggccaaggaattatcatttattgcccagggaggaatttcttaaggtggttgccgtttatgaaggcattcccgaggagctggtcgagaaccaggaagtactggacttcttcttgcccattctgcgcaacgatttccagcttaacgaccggctgattgacgtcgcgccggtttctacgaccagcccgctgatggcgatgtttggcgaggacgatacggagatcgtttccccggaggcagttgaaaaatggtccagctatacgacgcgctggctgggtagccatatattcccggggggccatttttacttaaatgacaacgccgcgcgtcgcgctttgcttgcgaagatcgtcgacgcaagccaaacggtgatgactggtagccggtaa

SEQ ID NO: 385308 - DNA, 1767 bp, Salmonella enterica
atgaatcacactgatatatttcttcctgtaaagaaaaagatatctcattctatattttgggcatccattgcccaggtgctaaaaatcagtatatggcttatgctgatctgggttttacaccaactgatagctgactccagcgtgtttccctggctgccggttatttctctgctcatcatcagcattcttttttatactctccgaatttatgcccatgataagtcacactatgcggcatttgaattagaagaaatattgcgtacccgactggtaaaaaaaattaaccagctgcctattgaaacgatcagaaatatgggaggggggaatcttgtcaaaaccctgattgatgatattaaagaattgcatgcttttgttgctgatgcccccccgttaaaagcggaggccttcgtaacgccgatttttaccctggtagttttatttatttttaactggttttttgccagcatcgtttttgccattaccctggtgacctttctgctgttgagttacattatgaaaaggggcaggcttttaaaagaaacatacaataacgctacggttcaaattaacagtaaaattattgagtacattcagggcatgagtgcggtcagaacctttgacgccggggaaggggcgtttggtcaatatcagaaagccctggaaaactactgtgccgtggtttttcattggctacagtctatgcgcctgtcttcaaaaattgcccgtagccttttctccgcaatgccaatgagcattattctgattgtggggttaagcttcgcccagctgcacgatcacatttcatttattaccaccttctgttttttactgctggcgataggtatcgcggagagcattcacccggttatgggcttgtttcagattctacaaaagtcaaaagcggccatagaaagaatttttgacgttgaaaacctgcccgttcttaaagccccggaaaacccgcggcaccctgacaacaacgaaattgttttcgacaatgttggtttttcttaccagaacgcggacgttgttttatccaatattacgatccgtattccggagaacgcgtttaccgtgcttatcggcacgtcaggctccgggaagacgacgctggcgaacctgatcccacgcttccttgacgccaccgcaggcgtcattacgctaggcggagtcaatatcaaagatattgagtatgcggagctgatggcgaaaatttcatttgtttttcaggacaactttttattctcatgttctatcgcggataacatccgctatgggctaaatgatatctccgatgaggaggtcatcgaagcggctaaaaaagcggagatacatgacttcatcatgcgactgcctgaacagtacaacactctggccggtgaacgtgggcagctattgtccggtgggcaaaaacagcgaattaccatcgccagaacttttctgcaaaaccgcccgatcgttattttagacgaaccgacggctttctccgatgcgcgaaacgaagcgctattactaaaagcattcaaccgcttaatggataaaaataaaacggtgattatggtgacccaccgtctggcaagcgtaatcaatgccgaccaaattatattattagacaaaggcaggattaccgcgcatggcaggcacgaagagctaatcgcaaattcagacgattataaaacgttatggcaagagtataaaaaagcaaaaagctggtcgattccaactaatgatattgatggtgaggaaggcaatgaaagagtatattaa

SEQ ID NO: 385309 - DNA, 1758 bp, Salmonella enterica
atgaaagagtatattaacacgcagacccgcacaaccaagtcgctgctgacgacctatgccgggttgatgaatgcggcaggcaaacaaaagaatatatttattcgcagtctggtatataccgtaatctcatcctctttgtttggcgtatcgctggttttgctttatcccttatttgctgcgctggaaacaaaaaatgttgccgcggtgaccccttgtttaattattgtcgtcgtcctaatggctgccagctttatctttaaagtgctatctgaacgctatgatgccgatggttattcgacccttgccgttacggagcttcgggaaaagttaggtaataagttgcggcatatttccttagattatctcagtcagttcaggtccggggaaatcaattacgtcttaatgcagagtgtgaatgaagcggcggtgtttacgtttatgctgcttaacatcattattaccggggtggttattccgctgtcagcggccactgcgctgttattctatagctggcaactctccctgatgatgtttttagtcttcccgatggctattccactctacctgtggcgcagaaaggcctaccgccgtgggttcagcattctggcggaagctaacgcaaagctaaaaggcgaagctgttgaatttgtccaggggctggatgtcctgaaatcgaccggccagaccgaagagaaaatgacgcagtttattaaggttgccagggatgtggcgaacatattgcgcattggcactaaaaaaggtgaaaagccaaatctgattatcacggttgtgatccagattggcctgatactgattatttcgctaggcgcatacctggttaatgcggcgattatctcatatttcctgctagccagcgtgctgcttatcgttgcgcgttccaccgacgtgctgaacttttttgtacagatgtcgtcgatgcttgagtccctggttatcggctatgaaaaactgcaggagttgctcaatgcgccttccttgccggaaaaaaaagcggaggtgatgcccgggcattatgatattgcctttacgggggtaaatttcgcctatcgggggcaggataagcaggtactgaatgatgtttcccttactatccctgagaaagcgcttaccgccctggttggcgccagcggctgtggtaaaaccaccatcacaaaacttattctccgctttgccgacgtgacctctggcagcattaaaattggtggcgtggatatccggaacatgtcgcagcagcagctaatgagcctgatctcggtggtgtttcaggatgtctatctgttccaggacactattatgaataacatccgtatggctaagttgtccgccaccgacgaagacgttattaacgtgtgcaagcaggctaattgccatgaatttatccaaaatttcagggatggctatcaaacccggctcaatgatattggtaaaagtctttccggtggagaaaggcagcgtatctctattgctcgggctattttaaagaacgcgccgattcttattctcgacgagcccacggccgcgcttgatacgcagaatgaacttgcggtgcaaaaggtgattaataatcttgttcggggaaaaacggtattggttatcgcccaccggctttccacgataattggcgccaggcaaattctggttattgataaaggcagcgttgctgaaagtggtacgcaccagcagttattagagcagggcggtatctataaagagttttgggatattcagaaaagctag

SEQ ID NO: 385310 - DNA, 1218 bp, Salmonella enterica
atgaagaaaaagacattgtctttatcatttgtttgtttactggtaactgtttttttagaccagatagggttatttcttatttatccgattatcccgtcgctgctggaatctgtcacccacgatacggttgttgataatgcgcttatcggcggctggctgctggcgacgtttggtgtaatgcagttcctcttcgcgccgattatgggggctatctccgacaagtttggccgcaagcctgttttaatcgtctgctttgtggcgtttactctcgattacctgctttacgcagtaagccagaatctgtatttgctgtttttagcgcggattattgcgggtatcgccggatcgtcggtcattgtctcgctggcaagcgtggcggatatgagcgatgaaaaaagcaaaatgcagaactatggatttcttttcgggataatgagcctgggcctggtcatcggtccggcgatctctgcggtagccgttcagtatggcgttcgggtacctttctatgtcgccgcggtctttagcctgatgggactgctgtgcgttattttcttgtttaaagaaacgcttcataaagacaaaagaagggcgtttaaacttgataatccgttttcctcggttgcctattttcttaaatataagggcctgtttcacctttttattgtgcaaattttgtttatgtttgcgacccagtttccgattacgctatggccattctttacgaaatatcgctttgcgtggagcgacagccaaatcgccacgtcgtttgttattcttgggcttggcggcttattcgctcagacggtattactcaaattagttcgctatgtactaagcgataataaaataccgctgcttggatttcttttgttcgcgctgggtttgatatgtattgcgctttcaaatagcagcgtaacgatatatatggcgatgatgatttatagcttttcaaatatcagcaattcatcgattgtgagtattttttcatcacaggtttctgcgtccgagcaggggcagttaatgggcgcattgtcgtcaattaccagcttttgggcggtggtggggccagtttgcgcaaccagtatgtattactacacggtaaatctctcattacccgatggcgacggctatccatttattttttctgccatcgtagtcctgatttgcctgatacctttgtccattgggttaaaaatagcaacttctgaaagctattaa

SEQ ID NO: 385311 - DNA, 1230 bp, Salmonella enterica
atgattggcaaaaaaatcaagaacctacctaaacgtatctggctattgttttttagcctgtattccacacaatatattggcatcagttttttgtccgtggcgttagttttgattctccgtaagaatggcacctcgctggataagctcagcctcatcccgctgatgtctctgcctattgcgtttaaggtactgtgggcgccgtttattgataagtatttaaaaaccgttaccggccactatcgtaactggctgctggctgcgcaattcatgatgatggtatgcctgctggccatcgcttttatcgatccggtacagcaatttcctttggtcctgtcgattattttgttcttttcatttaccaccgcgacacaggatctggcgctttctggtttaatatgtaatatttttgaagaacacgaacgatatcttatatccagcgtaaaaagtagtggctcaatgttcggtaacattatcggcggtggtgcagtgctgttgctatacccttatataaactggaaagggtgcatgcttttgcttgccctgattctggcatttacctggctgcaactatggttttttaatgagcatcagtttggcagaaataaaggtatttctgaggccacggacaagaattactggaagaacattatctccgtatggaaagaaaaaaagagctggtgtgcgttgttagccatcattccttttggcattctgccctcctataatctgatgtcaccggcgctgattgatagcggctggtcgttgcccgatatagccattttgctgaaattgtttgggtcgattattagcctgatagctatttttcttggcacgcggttacttaaaaaaatgagccggaaacagagcctgtcattctctatcatctttcatacttgctgtttgttgtcgtttattccgatatcgcttggttataatagtgctgtgcaagtctactcttcatttttcctctatttcattagtctaccgtttgtttttatctctatctctaccattgttatggataacgttgctaataccgttgcaccggctaccgcctacaatgcccaaactgcaatcgggtttgtcttcggttttattgttgtttcattgagcttttatctcgcacaaatggtgggctattttgttgtaacaactagttctatattgattgctttttttgcggcgtttctggcaaccagagcggttcaaaatcagtctgttcaacattaa

SEQ ID NO: 385312 - DNA, 1479 bp, Salmonella enterica
atgaacgaaaatttttctatcatgaagttatttacaccttcctcctcttattttcaggagagtgtcgatctgtgtattggggatttttcccggcaaaaagatgaagttaatgtgtttaataaagacgcattggggaatgtgttttctacgctgaccattcctgaaaagccggtaagtattgaggcctatctcaatgagatccgagagacaattattccagtttgctctcatctgaccagccctacctatttaggccatatgaccagtcctttgccgtcatttattcctgagattgggcgtttaatccagacgttaaatcaaaacatggtaaagatggaaaccagcagggggttaacgctgctggaacgccagttactaaaattattacatcaggaaattttcaattgtaacgaagatttttacgccgatgttaacaaagattttagtaaaacccctgggatttttaccagcggcggtacgatggccaatttaaccgcaatgtgggtcgctatccgccgggtccggcaaaagacggaaagccggttggcggttattggttctgagctaatgcattattcatttgacaaagctgcagcattgctgggggttgagttatatcgtttaccagttaatcagcaacagatggtatcagttgaccgtattgagcaacaaattaaagagtgcgcaaaggagggaatcgccgttgcggccattgttgcgattgctggaacaacggattttggttctattgacccgctgtctgagattggcgaattggggaaacggtacggtgtccatgtgcatatagacgcggcgtggggtggcgcttttatattaagttgtaaacacaaggcgctgctggaaggtcttgagatgggggacactgtaacggttgacggccataaacaaatgctgatgcctgttggtacaggcatgctgttctttaaaaaacctgagctttcacgcattctggtacatacagcgccgtatgcggtacgtaaaacgtcgctcgatcagggacgatttacccttgagggtacgcgtccggcgaatatgctctacctgcacgcgtgcctgaatctgattggtaaacaaggttatagcgagctttttggaacggcgttggataatgttaaagctatggcttgctatattaaggataatcctgcctttgaattgttggtcgaaccaacaataaatattttaagctaccgatttataccacaacatttcaggaaaaaaactttaacgatggaagataaccagcgtatcagccagttcaactgcaaattgcaaaagatccagcgcgacagggggaaaagctttgtttcacgtagcaggcggaaatttgcccaatatggtaataatgaattgatttttttacgtgttgtggtacttaacccgtgtgtggagaaagagcacattttgtttatgctacagaatcagctggatattgctaatgaaattgaagggaattaa

SEQ ID NO: 385313 - DNA, 714 bp, Salmonella enterica
atgtttatttttacagaggaattacccacggataaattcatacattcatataaaacaggccatttaattaaattaaaaaccataggcgtttgtgaaataaaattttcattagcaaactataatgatttattatttgaaaaacattcaatagactttccaaatacactatgttttgcagtagccaaaagacgagctgagtttcttagtgggcgtattgtagcgcaaacattattaagaaaagaacaaaaccatgaaaatataaaattatcaagaatgctgataccaatttggccaagagggtggattggttcaatatctcataccgatcagtatgcgatagcaactttagcccctcggaacgataaacacattataggtattgatattgtagagtataacccccggatactcgacgaaatagcaagtatgtttataaataaaaatgaacaagagttgcttataaacagcgaagtcgattacaatattgctttacatattgtattttcagcaaaagaaagtctctataaggcactttacccccaggtgaacgctttttttgggtttgaaaattctataattatcgatattaacgctcaaaataaaacgtttactctacagttaactaatacattaacccccaatcttccaactggatatcagcatactggatattatcaacttgacatagataaagttattacatttatttattaa

SEQ ID NO: 385314 - DNA, 1170 bp, Salmonella enterica
atgttactgaacggaggtatccagcaaaccatggatacaattgatcccgatagttttttctttatgtcaccgtatcatagtttaaaaacatcaggttgttacattcgatttgcagaacctgcaatcaacggtgattcagcggacagtttcttccagcaggaactaaagagactttttgctgatgccagagtgcagggtattgaaaatccaattatggttggttcaatcccttttgatacctgccagtcatcttcgctatttattccacaatgctggcattctttttctcgttcagagaggctgaaatcatcaaattatttaactggatatcgaaaactaaatgttattgaacgtcatgctattcctgaacaacaagtttttgaaaagatggtggcatatatctccgctcttactacgactccagaagttgacaaagttgttctttctcgcctgttagatattaccaccgatgctgacatcaatgccgggatttttatggagcgtttgatagcacaaaatccagctagttacaattttcatgtacctttgggtgatggtagtgtgttgcttggtgccagccctgagctgttgttgcgtaaagatgggaatcgatttacttctctgcctcttgcgggctcactacgtcgacagcctgatgctcaacttgacagagaagcaggtaaccgattattaacatcagagaaagatcgccatgaacactatttagttacacaggcaatgaaagatattttgggaaaacgtagtacagaactaaaactctcagcttcaccacagcttatagctacaccgacactttggcatcttggaacatcatttgaaggtgaagcaagaattgaagaaaattcgttgactcttgcttgtctattacatccaacacctgcattaagtggtttcccacatcaagtagccaaaaatttgataacaaagctcgaacctttcagtcgtgatttttttgggggtatcgttggctggtgcgatgccgaaggaaatggtgaatgggtggttgctattcgttgtgctagacttcataaaaatcaaatccgtttgtttgccggcgctggaattgttccggcatcttctccagccagagaatggcgtgaaactagcattaagtttaccacaatgttgaatgctttcggactgaagtaa

SEQ ID NO: 385315 - DNA, 858 bp, Salmonella enterica
atgacaatagctaaacttagttcttatgtgctaccggatgtacaggatgtacctataaataaagtagactggtgtttttgccctgaaaaagcggcgctgttgatacatgacatgcaggattattttgttcgtttttggggggacagttccttcatgatagaaacggttatagataatatcgcctcattgcgccgatactgtaatgaacacaacattccggtttattacactgcacagcctgaagagcagtctgaagaagagcgagctctgctaaatgatatgtggggaccaggcttgacgaaatatcccgatcagcaaaaaatagtggatcaactagcaccggatgtaaatgatacagtcttggtgaaatggcgttatagtgcgtttcaccgctctccactggaaaagatgctcaaggagacaggaagaaatcaactgattattacgggtgtatatgctcacattggttgcttaactactgcgactgatgcttttatgcgtgatattaaaccgtttatggtggcagatgctctcgctgatttcagtcgggaagaacatctgatggcattgaaatatgtagcagggcgttccggacgtgtggtaatgacagaagatttattatctgagatgtatcctggaagcaaagaggcccttaggacacttattctgcagttactggacggaaaggatgaacctcaggatgatgaaaatcttatggattatggtttggattcaatccaaatggtgacccttgctgcacgatggagatgtattaatgctgatatcgattttatcatgttagttaaaaatccaacgataggagcttggtggaaactgctctcccacctcagtagataa

SEQ ID NO: 385316 - DNA, 138 bp, Salmonella enterica
atgaaccagcataaattatccgcttctgcagacattttacttaagaacgagcgtattaattcaccgactaattataatttatctactgaggtgggagagcagtttccaccaagctcctatcgttggatttttaactaa

SEQ ID NO: 385317 - DNA, 135 bp, Salmonella enterica
atggcttgtaccggtaaactcatactagaattactattattttttggtataaattttgacaatatctttaagcaaattagtcttcttaacacgtgtaagatatctgtagacaaaaaaattacgtgggagctatga

SEQ ID NO: 385318 - DNA, 135 bp, Salmonella enterica
atgaaaggtattgaagttaacgcaccagtcacaaaagaaatcagtaccgctacggcatgggccatccgggcagtggcgttaacaattgtgctgtacggtattgcccgccttattgtcgcgattcgctggtggtga

SEQ ID NO: 385319 - DNA, 963 bp, Salmonella enterica
atgaacccaaagacactcacccaactccaccacggcgactgccttgacgtcatgccgacacttgaacccggcagcgttgaccttatcgtgtgcgatccgccctatggctcgatgaagggatcaggcattaaatgctgggatgaatcaaccgccgcgtgggatatcgccattgaaccccgtgcgctgtttgccgtgtgcgaacatgtactcagggttaacggcgcgctggtattgtttgcccaggagccctatacaagccgcctgataacgcaggcgcacaacaatctgccgttcagttaccgccttgtgtgggagaaagagcattttgccaactgcctgaacgtcaatcgtgcgccagtctcatattttgaagatgttctggtgttttcaaaggttgagcgatacgacccgaaatttgatcacccactgcgtgaatattcccgcagggtgcaggcatttaccagggtgacagcagaacaggtaaatcgcacgcttggacaccggggagccgttcactttttggggtgtgaagctatccagttctcgctacccacatgcagcacctacgaacaactgaccgccgcctacaacctgaccgctatgccgggctttctggcgcatgacgaaatgaaggcgatccacgacaactggagaaactcacgcaatcaccagccacgcgttttcaatctgccaccaggcaaacggcataaacccaacattctgaaatatgcccgcgaccgggaaaaatatcatcccacccagaagccggtagcgttactggaagatctgatccagacatacagcaaccccggcgatacagtgctggatttcacgatgggaagcggttcaacgggcgttgcctgcatgaataccggacggcgctttatcggtatcgaaaaagagcagcgttactttgatattgccaccgccagaatagaaaaatcagggcaggtagccgcatga

SEQ ID NO: 385320 - DNA, 195 bp, Salmonella enterica
atggtttccagatacacagcaatatgcaaaataaaatcaggatttgcttttatctatatgatttccgactccagggagtctgcattacacgaagcaaataaagtcatttcacgacagagtgaaaaagtcagttttgtcgttgtccttaatggctttaacgaaagttatttagaaaccgatcctgtctggtcataa

SEQ ID NO: 385321 - DNA, 456 bp, Salmonella enterica
atggggttcgcggataaaattcaccagttttccgttgacgtgcctgagcaactttccggtacatccaaaaaaatcgccatcgatttcttttctggtgtgatccgggatacgccggttgataccgggaggctacaggggaactggcagtgtacgtttggaagcccggctgaaggaactctggatattacaagtaaagtggaagaggaaaccatcaacaaaatggttcagacggtggattctgcgaagggtgactttgtggcgtatctcaccaataaccttgcgtatgcggcggtggcggagtttggcctgtggaaggataaagacggcaagcctgctaacggaccaaagaccacacacggctactcaatacaggccccttccggtatggtcgggctgaatgtgtcacgtattaacatttatataaaacaggctatagcgaagatgaaaaggccatga

SEQ ID NO: 385322 - DNA, 411 bp, Salmonella enterica
atgaaagacatctccactgcactgcgcacccgtatgcaggaggccgcagtatcgcttaatcttcctgtggcctggccgctggaggacttcaccccgccggatggcgactggctcgaatttatctttcgcccggcgtctgatacaccgctgtcgcaggggccggggggactgaacactatctcgggttttatcaggataaccgttcactgtaagcatcgtgagggcgtcagttcagacgcccttttttatggcgacagactgagaacctttttcacctccggcgtgacgctcgactgtaatgagacgcgtgtcaccctcaaaaaccgtgactacaacggtccgttacccgtcgcgggtcatgttgcctggatactgaccgtctactggtcatcttacgaattacggagttaa

SEQ ID NO: 385323 - DNA, 417 bp, Salmonella enterica
atgatcgttgccgacgcacttaaagcgaccaatgcccttatagctgccgttcctcttctgggagataaccctgacgagaaagattacgaagaggccctggaacttgtcgaacacctgttaatggagaatccgggtagccctttactggatatcgtctgtaatcgaatccgtacctatgaagacggtcagcctgaaatcgttgcgctccgtgaagaaatgaatgctatccctgcgggtcttgcgattctgcggacgctcatggatcagtacaaattaaccacttctgattttcaaaatgaaatcggttctaaatcaatggtatcccgcgtactgaacggaaagcgcaatctcagcgttaaccacatcaaaaagctgtcatcccggtttggtatctcacccgctttgtttattgattaa

SEQ ID NO: 385324 - DNA, 315 bp, Salmonella enterica
atgcaccttatctcaatgaaagcgatccatgaagcagttaacagataccctcagtataaaaaagagcttctacagtttggtcggaacatagagaaaggtaattgccctacacccgaagatctgaaaaaaatctatccatctctggataattttaaatatctggataaacattatgttattgatattgcaaacaataatataagaattatcgcaattgtttttttcgagagtcagaagttttatattcgccacgtattcaaccatagtgagtacgacaggtttacttctcaacaccgtacaaaggggaaaagataa

SEQ ID NO: 385325 - DNA, 399 bp, Salmonella enterica
atgccatcagctatcgccaactcactggtcagcaccgcgctaaaaatttgtcacagtgaaaacaaaaccggcgttgttgccgttgttgacaaaggaggaaatcttgtcgccctgcaacgtgacgacaacgtaggtcctcacaacacgctggctgcccagaaaaaagcctacactgcgctttccaccaaaagcgatacccgcgagcttgctaaaaaagcagcatctaatcctgaaacgcagaacctgaacactgtaccgcagctactgttactgggcggtggtgtacccgttaagtccggagacatggttattggcgcaattggcgtggccggaactggcggccctgccgacgaccagcactgcgcacaggaagcaattaaacaggttatgaataaataa

SEQ ID NO: 385326 - DNA, 531 bp, Salmonella enterica
atgaaatacacaatattgtcgctggtagctggtgcgctcatcagttgttcagcaatggcagaaaataacctgactgtaaagatgaacgacgccctgtccagcggaaccggagaaaacatcggtgaaatcacagtttcagaaacaccttacggtctgcttttcactcctcacctcaagggtcttacgccgggaattcacggattccatgtgcatacaaacccgagttgcatgcctggaatgaaagatggcaaaagcgtacctgcgttaatggcaggaggtcatcttgacccggagaaaacaggtaaacatcttggtccctataatgacaaaggtcacctgggagatctccccggactggttgtcaatgcagacgggactgcgacttaccaactccttgctccccgctttaaatcactgtcagaactgaaaggtcactcactgatgatccacaaaggcggggataattactccgacaatccagcgcctctgggtggcggtggtgctcgttttgcgtgcggtgtagtggagtaa

SEQ ID NO: 385327 - DNA, 1221 bp, Salmonella enterica
atggcagcagaaaacaagttgagtgataagcgtattaaagcgcttttgggtaaaccgcaggataagcaacaggtgatttctgatggcaggggcttatcaatccgggtaagcaaaaacggcgcggttagctttgttatgttctatcgtttgggtggcagggaaacaccgccagtttggttaacgctgggtaagtatcccgatatgaccctgaaaatggcaagggaaaagcgcgatcagtgccgtagctggttggcagatggaatagacccccgtcaccgcatcggatttgttaccgatgaatcacaaaggccggtaacagtgaaagacgctttagaatactggattgaacattacgccaggcagaaacggaaaatgccgtctgtatgcgaaacccgattcaataatcatatatataaaaacctcggggatgttcctttggttgattgtaccgccgcaatgtgggttaaatgttttgatgaaataaagaaaaaagcgcctgtaatgtcttctgagatttttcttgacgtcaggcaggcattaaaattttgcaggattcgccgttttgctgtttctcacgaactggatgatttttcagttaccgatatgggcaatagggcaaacaggaaagaccgggtattaactgaaaatgaaattcgtgatgtttggcgttgtttaaataccactgtgaataataaatatttagcacccggctacaggaattttttaacaattcttttagtttttgggtgcaggtgtaatgaggtaaaagaatcacggcctgaagagtgggatcttgataactggatttggacagtcccaaaagaacacagcaaaaacagtcgtgaaattatcaggccaattccgccacagatgagacaatggattttaaatttaaagactattgccagtatggataaaagcgaatatatggttaatgacatatcaagaaagacaccaacgattagcactacgggggcgcgtttgtggcgaaagttcgggcatagtaaaccctggacattgcacgatttcaggcgtgtggttgccacaaacctaaatgatatgggggttaatgctgatgcggttgagcagttgctggggcattccttatcaggcgtcaggggcatttataaccgtagcaaatacatggatgaaaaactaaaggcgttgactatgtggtgtgattatctgaattctctactagtggatgaggtggcggcatga

SEQ ID NO: 385328 - DNA, 246 bp, Salmonella enterica
atgaaagaatttaaattcatgactaaagacgaacttgaattaatgccagaaatagaaaggatgattagggatgcggaatgtaaatggttaacaggaacatctttaaattcaagatctcgcctggaaaaaatggggatgtttcctaaacgattacaccttgggggaaaatctgtaggttggcgtctttctgaggttcaggcatggataaagggagaatggaaaccagaagacagccaggcagaataa

SEQ ID NO: 385329 - DNA, 279 bp, Salmonella enterica
atgaaaaaatttatatacccgacacctgagcagcgtatgcagatcttgaaagacaatggcgaaaactacgatcggcgcatacgtgaaaaggaatgcgcagcccgcacagggttatcacgttcccggcgctggcaactggaacaggaggacgctttcccgaaacgctcaccaatggggcgcaattccgtatcgtggttgctttctgatgtgctgtattgggtaagcaacccgccagacgttgaaggcgtcaacaaccccagcagccgcaaatcagcttag

SEQ ID NO: 385330 - DNA, 180 bp, Salmonella enterica
atggcaactaaatcagtaaacgctaaatcaaaacggatagatgttcgtgtgccgcacgatatcgcaaacgctattgaaaatttaaagggttgtaatgagagtacggggcaatttgttgttgttgcactggaaagtgaaatcaaacgccgccagcgcaagaagtccaaagagcaggagtaa

SEQ ID NO: 385331 - DNA, 228 bp, Salmonella enterica
atgaaagagcataacacacaatctcaaatcgtcattttgccgtatgtatccgccgttgacccggaaagcatccagcttggccagtggctacaggagacagaaaaccggcttcttgaccgcgtaaaggccgcgcttgatgaagctggcgtagagtggattgatacgcgtaccaaagagcgcagcaaacccgccacaaccgatagcgtggagggttcagacaatgcgtaa

SEQ ID NO: 385332 - DNA, 279 bp, Salmonella enterica
atgcgtaaatttgccctacggatcagcctgtactatggcgacacgttaacccgctcgctttacgattcgcaagtgttcatctgccagaacgccgcgcagcaatacgcagatcggcagaccagcgaacgccagccggggaggcttacccggcatttcgaagtcacggtgttaacgccgcaaatcgtcaacgaaatacgccacgaatacggctggaatagtccgtcaacggtttaccgggttttgcctgataactgtaagggggcaaacaatgcgcaataa

SEQ ID NO: 385333 - DNA, 165 bp, Salmonella enterica
atgcgcaataatcgcccctgtttcgtctggcgcttttattccggccagaactcaacctgtttaaccacaaccgccaccagcgaacgggaggcacgcttacatcttcccgccgttcgcctggtattcgttgcccgtatccgtgtagaggaattgcaccatgtctaa

SEQ ID NO: 385334 - DNA, 255 bp, Salmonella enterica
atgtctaagaacacttaccccgatcgcgagaatgaggcaataaaaacacttatgtttgccttgattgaaatttcctgtatcgcagaaacggcacacgaacacgcctgtagagaatcagagtgcgccggatcagtaatcccgtattcactggcaattattcagcgcagtacggaacaggctttacaggatgtaagcaacattatgtcaaagggagtagcagatagcgaaatcactcagggggtgagccgtgactaa

SEQ ID NO: 385335 - DNA, 336 bp, Salmonella enterica
atgaataacagccagaacaaagcggatataaatttgcttaccgccgccgtaaaagatatagcgattgtttcatattctgcccttagtgagattaacgctatcgggaagttgcttcttttgtggctggaaacacaagaggcatacagagaccccgaaacgatatttcgtgcacttgataatattgtttataccgcacaaaacacaattgaaaccgttggacatgaagccgaatcggtggggtgtgatgattatatcgacctgaataccaaaagacgccagcgagcagcagaagaatatcgcaacgctataaagagcgaaaaacagaacaaggaataa

SEQ ID NO: 385336 - DNA, 666 bp, Salmonella enterica
atgaatatattaaattctggcttaactgccagcggcattactcaacctgaaatcagcaaagcagaagccacgccggaagggatcaggattgtttacagtgctcacgctgtttgcgctaatagtgaaaagctggtggcctacaaaaaggccgttacgtggctggacaaggggcgctatgactacgatcccctttcagggtacaggatagcggcggcttttcttgtcggtgtggatagtggctatttaccgttttctgatgctggcgctatggcggcttatcgctggattgtttctgttatttatttcggtgaacaggcgtataaaaacggcgttatcgatgtgccagaccgcacaggaggaacctgcaaggcggcaatatataagggcagacacgcatcaataactgtttacccgttacagttgcgcacgctcttaaatgacgcattcgaagcgacagcgtttaaacagtacggcagaaaaggcggcacgaaagtagtaattatggcgcttgttaatatgtttaatccagacggggatagttttgttatgtcgcctttcggtaatgaattttttagccggatgctggaacaattaatattacaccttaaaaactctcgtgacggcaacggcggcaacaatgagccagtaaagcccgttattcactaa

SEQ ID NO: 385337 - DNA, 306 bp, Salmonella enterica
atgatgacgaataaaactggcttcattgccagagggtacgctcaccccgaaatcaaaccgggcgatatttaccgcgacaacaaagggcgattagtcacggtggataaatgcgaacacggacgagtttattttatccgtgacggcttcccgttcgccacagagttattagcccgcgtattcctggacaggttcaggttacaccgcaggaagaaagcgccagcaatgagcactaacgccgctacgaaaatagcggcggtgcagaaattacgcgcaatgattaacgccagccgggagaccagaaaatga

SEQ ID NO: 385338 - DNA, 1359 bp, Salmonella enterica
atgagcgccgctaaaaaattacccgacgccgttttaagttgcctgtatcgctggatgcagcataacggggaactggacaaggtaacgcttgaggctgcaatcaagcagacagtacaggacaccccggaaggaaacgcagtgcgccagctaagggcaatgtacggccagtatgatgacatgcaggcagtcggttactttaacgcgcttaaaccagaacagggacgaaagcggcgttgtgatctggtggctgagtttatgggggatgatgccgttaaggaaatactgaccgatgagaggatagccctgttatttccggccaccccgccagaggtcagaaaaaccaggctaccgctttccgttggttctgacgggttcgatcgccagatggattacaccatcaaggcgtatttacctgctaacagcttgtgcagcatttacggaccatcgggatcatataagtcatttcttgccgtgtcgtgggcgtgtcatatcgccgcagggctgcaatggtcagcgcggagtgtggcgagcggttcagcgttgtatgtagtcggtgagggtgggttaggtgttccccgccgtgtaagagcgtgggagcgtgcttataacgatgacaggcgacttactaatctgtatctggtcaatcggcctgtatttcccgttcgttctgatgaagtggcagaggtgatccttgcggctaaacaggttgaggccaccacagggcaaccggtacggctgattgtgatagatacccttgcccgttgttttggcggcaacgacgagaacgacgcgcgggatatgggggcatttatcgagggatgcgacaccatcaagcgggagactggcgcaaccctgcttgtggttcaccattccggcaaggacgaggggaaaggtgcaaggggttccagtgcattcagggcggcgcttgatgctgagtttaacgtaaggcgtgagggtgcaggcggtgcgcttattctgaggtgtacgaagatgaaagacgccgaggagccgggagaatgcgcctacgacctgaaagcgatcaggttgtttactgacggggatggcgatgatgtttattcgctggcggttatagatatcccccgcgaggccagaggaaccgatccagacctggaaggagtcaagaatctgacagataaccacgccgcgctatggcagtgcatacgcagccgcaaggcgcagggtgagccgtgtaaccgcgctgtagtacgcgacgacattatagcgatgtttggcgagagtgggcgcaaggggtttaaccgatggcttgaaaagctggtacgcgatgaactgatagaggtgtcagatgatggcgatatcacgatgacaggaaaagaataa

SEQ ID NO: 385339 - DNA, 423 bp, Salmonella enterica
atgacagcacaaatagcagcttatgggcggctggtggccgacccacagacaaagaccaccagcaaggggactaacatgacgatggcacgcatggcggtatctctaccatgcagcgccgcacaggacggacaggcgacactatggcttggtgtactggcgtttggtagacaggccgacgcgctggcgaaacaccagaagggcgacgttgtgagcgtagggggtgctatgcagggcaatcagtggacagggcaggacggcagcacccaaagtgggtacaccgttgtagccgacagtgtgatcagcgccagaacgtcaagaccgggaggaggcaggacaaaacagcaaccgacaggtaacaatccaccagcacagacaggcgcaccacagggtgatgatccattccctgatgatattccgttttaa

SEQ ID NO: 385340 - DNA, 354 bp, Salmonella enterica
atgaaaagattatatgaaatagaacgcatggttgatgatattgagaaagatttagacagaatgtatccacggtacaaaacagataaagatattagtgataaggttacagcgttaaaagaatatgcgcaggcggcaaataaagaggttcaggaacaacttagacggggggagttgaatgactttgaaaaggcattcattgaacctgcaatatttgaaacctacatgaaagcgattgataaaatcaggaaaggagcgaaaccaagtcaacaattagctaatcacatatttgaaactaaaagcacgatatcttactggatgcactcaattaaagaccataacgagaaatatttgtaa

SEQ ID NO: 385341 - DNA, 1212 bp, Salmonella enterica
atgaaaaaacttcttgaactccgccagcagaaggccgcacttgcaggacagatgcgcgctatgctggataaagccgacagcgaaaaacgcagccttaacgatgaagaaggccagcagtttgacgaactccgcacacaggccgccgcgcttgatgtggacatttcccgatatgaagcgctggcagacgaagaacgcagcaagccgggaacgcaggcacaaggccagaccgtcagcaatgacgaattacgcagctacattcttaccggggaaacccgcaatctttccactgccattcccgaagatggcggctataccgttatccctgaactcaataagcagatcatggcgcaacttacggacgagtccgttatgcgtaaaatctgcacggtcaaaaaaatcggcagcaacgagtttaagcagcttgtttccgctggtggcgtaaccgtcaaccgtggcgaggaagggcagggcagaacggaaacatcaacgccaaaactgaatgaagtgagtatccgcctgtatccggtttacacctacccgaagaccacgcaggaaattatcgacttttccggcgttgatattatgggctggttgtcgtctgaaattggtgatgcattcgtggatacagaagaaaccgatcttgtttcaggtgacggcaccaaaaaagcaaaaggctttacgagttatccccgcgatgccgcagacgataaaacccgcgcctttggcactttgcaggaactgaagggaacaggaccattaacaggcgatatcctgatcaaccttaaatttaaactgcgtgcgaaataccgccgtaatgctacgtggctgatgaactcaaacagcgccgccgaggtgcagaagctgaaaaacagtaacggggattacatctggcgcgaccgtttgcaggctggtgatcctgataccctgttagggcttccggtggagtatgccgaaaccatgccggacggtcagatagctatcggcgactttaagcgcgggtatttcatcatcgaccacgagaccgggacgcgcaccagaccggacaacataaccgagccgggctttataaaaatccatactgataaatatctgggcggcggcgtggttgattcaaacgccatcaagatactgaccattgtgaaacccgtaaccagcagtaaggcagcaaaaagcacgcctgaacctgatgtaacagcacaggcaggggcataa

SEQ ID NO: 385342 - DNA, 567 bp, Salmonella enterica
atgaaaaacaataacggcaattttgagattcgcacgtctgaactgacagcgaaagaaaaaaagctggtgggctatgcggtacggtggaacaccctttctgaggtgatttttgacgaattccgggagcagttcgcgccgggggctttttctgactatctggcggcggggaatgatgtaagagcgctgtttgagcatgattattgtcagttgctggggcgtacacagtcaggaacgctacagatagcagaagacgccacagggctacgttttgaactcacacccccggacacacagacaggccgcgacgtgctggcgctggttgagcgtggcgacatttccggcatgagctttggctttcgggcgctaaaggagtcatgggacgtcaccccgtcgccttatattcgtaccgtcaccgccgccgaactacgggaaataaccgtcacatcattacccgcctacaccgacagcaatatagagattgctcaccgttcgctgtatgcgcagcaccctgaattacggcagacgggcgacaaccgccgccgatgggctgagttagcggggttgtga

SEQ ID NO: 385343 - DNA, 1218 bp, Salmonella enterica
atgtggctacctttccgcaggaaaaaagaagagcgcagcctggctattgatgattttttacagatggccggggttcccaataccaaatcgggcgaatatgtatccgcaggcacggcagaatcattgccggcagtcatgaacgcgatagcggttatcagtgaagcggtggcaacgatgccgtgttacctgtacagggtaaaaaacgacaacggcaacgaggcgcgggaatggctggacagtcacccggtggatctcctcctgaatgaagcgccgaacagctaccagacggcttaccagtttaaacgcacgatgatgcgtcattgtctgcttaacggtaacgcctacgcggtgattgagtggggcagaaacggtcagccgcaggcgctgcacccgtaccctcccggatgcgtaaccgtcgaacgcacagccgaccgccgcagccgctacaccatcacggatcaaactacgggaaaaacccgtgtttatcttcaggaagaagtgttgcatttgcgctacgccactgatgacgggtttatgggacgttcaccgataaccgtatgccgtgaggcgctggggctgggactggcgcagcagcgccacggcgccagcgtgatgaaagatggcatgatggcgtcggggatcattaagtcgaaaaactggcttgatgacgcgaaagggacaaaggcactagcagcgctggaacgctacaaaggggcaaggaacgccgggaaaacgccgctacttgaaggcgatatggattacatgaaacttggcatgagtaatcaggatgctgagtggctggcctcccggcgtttcactatcgaggatatcgccaggatgttcaatgtttccccgatcttccttcaggagtacagcaacagcacctacagcaatttcagcgaagcaagccgcgcctttctcactatgacaatgcgtccgtggttgtcgaactttgagcagcagataaaagcggccttactggttgccactcccgcgccgggtattcgttatcaaatggaatttgacagcgccgacctgttacgcgccacgcctacggatcgtttctcaacgtatgaaaaagggatcaggtccggcgttatgtgcccgaacgaagcccgcgaacgtgaaggaatgccgccgcgtgaaggtggcgaagagttcagccaggcatggaaacagcatatagaaattaacgacaggaaggagcgcgacgaatga

SEQ ID NO: 385344 - DNA, 351 bp, Salmonella enterica
atgagagcgggaaaaatgcgccacagggtacaaataaaaaaattggttgtggatcatcgtaatccattaggtgaggttatttatcgccttgacgatgttgcggaggtatgggcggaagtaagagcggtaagcgcaaaggaatacatacaaatgggcgttgaaaatgtcgagattgatatacgggtttatatccgttatcgcccggatgtggagagaggagatcgcattatttacaaatcggcgaataaccccggtgatgtgtttgtggttaaagccgtattacctaacgcgcgtatgaatatgcttgagcttctttgtgctggtggaggataccgtgatcaatccgagtga

SEQ ID NO: 385345 - DNA, 315 bp, Salmonella enterica
gtgctggtggaggataccgtgatcaatccgagtgatttacttgatgatgtgaaattacattgccgcgttgataacgattccgaagatagtttgctcactgtctatattgatgccgcgcttgaggtttgtcagaagcatatcggaaaacgctttgataacgggctggagtttacaccagctatcaaggccggatgcctgatgtatatcggcatgttgtacgagaaccgcgaggcggtaagcgacctcaatttaaaagaggttccctttgccatctcgtcattgtggtctgtctatcgtgatgcgggggtttactga

SEQ ID NO: 385346 - DNA, 444 bp, Salmonella enterica
atgccgtggcaaccgttaaggcgctgcactgagccgggatgcaataagcgcgtgaaatccggtaaatgtgacgaacaccgcatacaggcacagaggaaggagacagcacgccggggaacgcgaacgcagcgcggttactccagccgatgggaacaataccgcctgcaatttctaaggcatcacccgctatgcgtgaagtgtgaggctaaggggcggtatgtagccgcaacggttgttgatcacatcattcccgtcaatggcggcggtgatgttcttttctggccggagtggaaccaccaggcgctatgcgcttcctgtcatggtcacaagaccaccacacaggaccccgcgaccaaacagcaccgcaaggccggattataccgcgagcaggaagaacgggcggcacatcgtaacgactggatatatgaggctggtcatgactga

SEQ ID NO: 385347 - DNA, 147 bp, Salmonella enterica
atgactgagcaggaagtaagccgccttattcatgggctacagaagcacagcaaggaatggcgcagcagcacagcgaacaggaagcccacagagcaacgcaaccccgaacgtgatcgggagctaatggaatgcttccgcaaccgctga

SEQ ID NO: 385348 - DNA, 357 bp, Salmonella enterica
atggtacgaccaccaaaagcccccgattattttgatgatattgcggttaagcagtggagggcaaaatctaagcaactggccgaacgcggtgatctgactcccgccgactggaacagcctggaattgtattgcgccaattattcaatttacagaaaagccgttgaagaccttgcgcggcgcgggtttacggttgaaggttcacgcggcgcggcaaccagtaacccggctttaaaagccaaatcagacgccgaaaaagtcatgataaaaatttcgtcgttgctgggttttgacccggtaagccgtcgccggaatccgccagaaaccgaggaagaggacgagcttgaccgcctggaatga

SEQ ID NO: 385349 - DNA, 1662 bp, Salmonella enterica
ttgaccgcctggaatgattacgcgaatgatgtaaaaacgggtaaaattgtggcctgtaaacgcgtaaaacaggccgtaaatcggtacttttccgaccttgaaagccccctttacgtgttcgattcggaggctgtagagaagtttttggcgttttcccgcgtctgtccacacgtaaaaggacccttgcggggggagcgtatcgcgctggagccgtggcaacaattcgcctttgccaacattatcgggatgaaggttaaggctaccggccgcaggaaatacagcagcgcatttattggcgtaccccgcaagaatgccaaatcaacaaaggccgcaatactggctaactggttcctgattatggagccgggacagcaggacatttacacggcagccgtcagccgggatcaggcgcgtatcgtgtttgatgatgcccgtcaaatgtgtctgctttcgaagccgcttaaaaagcgcgttagcattcagcagcataaaattatcgccccgaagactaacagcctgttaaagccgctggcggcgagagcggccaccatcgagggaacaaaccccggacttgccattatcgacgagtaccacctgcaccaggataacagcgtgtattccgcgcttgatttggggatgggcgcgaggccggaggcgttgttgtttgccataacgaccgcaggaagcaacatcatttcagcctgtaaacagcactatgattattgttgccggatactggacggcgaggaagaaaacgacgcgctgtttgtgctgatctacgagctggacgacgaaagcgagattgatgatcctgcattgtggatcaaggctaaccccaatcttaatgtttcggtggatgttgataaactgaaaaagaccatcaaagaggcgcggggtattccgtcgcagtgggtggagatgctcacgaagcgctttaatatctggtgtcagggggctacgccgtggatgggtggaggcgcatgggatgcctgtaagctggagtatacagaaaatgacctggccgggatggagtgttacgcggggcttgatttgtcttctacgggagacattgccagcgtgtgctatgcctttccgttcgatcgggaaattcgcctgcttacccggcactatctgccagaagagcagctacgcaaccccgccaataaaaaccgtgctgtttatcgccagtgggcggcggctggctggattcgtaccactcccggcaactgtatcgattatgaccgcatacgcgatgacattttaagggatgccgagatatttgatattaagctggtgggctatgatacctggaacgccacacacttacgcacacaactacagggaatggggctggatgttgagccattcccgcagacgttcgccagatacagccctgtagcgaaatcctttgaggtgttcgtaatccgtaaggtggtacgtcacaacggcgatccggtgctggcgtggtcaatgggtaatgtcgtgatggagtcggacgcaaacgccaacataaagccgaacaaaaagaaatccgccaacaagatagacccgacaatagcggcgttgatgtcgtttggtacatggcaggcagagcacgaggattttgctttcgatctgagtgacagccagaaggagaaactggagcagtttaacggcatatga

SEQ ID NO: 385350 - DNA, 1464 bp, Salmonella enterica
atggaaggtggtgtgtgggggctgaaactgccgacgcttcgtcgccgcctgttccgctgcatggcgatacaggagaaagaggacggcacgtttgccgtttccgcgcttcagcatgtaccggaaaaagaagcgatcgtggacaagggcgcgacgtttgaaccggagtccggcacgcttaatggtgtgaccccgccagcggttcaacaccttgccgtggatacctccgcagacagcagcctttaccaggcaaaagccacatgggatacgccgcgcgttatcaaaggcgtgcggtttgttctgcgtctgacggtgggcgccggaactgatgacgatccggtacgcctggtgacgacagtgacaaccagcgagaccgaatttacgttccatgagttaccgtacggacactacaccctgacggtgagcgcaataaacggttatggccagcagggtgatccggcgtcggtggaatttgatatcgacttacctgaaccgcctgattttatcgagattacaccggcctactttagcctcacggttgccccgcgccagaaggtctaccatccggacgtttcttttgaattctggttctcggaaaaacaattgctgagtgcagatcaggtactggccgaagggcaatatctgggacgtggcagcatgtggataaaggacggtctgatgttgctggggacggattactggttttatgtccgcagcgtgaaccttgtcggtaaatcggcgtttgccgaggccagcgggcaggttaagagtgatgctcagggagttctggaactgctcaaaggaaaaatcaccgctaatctgcttaaccgtgagtttctgggcactattgataatgaggtagtgaaatctgagtttgagaaggcgttacagttatcagaggaaagcgtacagcaacaacttacagagctgaaaaaagagtttggtgacgatgttgcggcgcgtatccagaaactggaacaggttatttccggacccgatggttcaatcggccagaaaattgaacagattaatgcggtattgggtgagcagtccgtcacggtagaggaaatatcaaaagcccaggcaatgctgaacgaagcagtagccgcaataaagtcgcttaaggttcagtaccaggcgaacggcaaggcagtcattgcgggtattcagctttccgctaccgccgcacaaagcgaaatcctgatgatggccgacaggttcgcgttgcttaacccgtataacggttcggtcatgctgccgttcgtcgtacagaacgggcaggtgattctggcggatacatttgtgaagtcgctgaacattaacgatcgcttcgtcgttgacaccgcgggcaatgtgcagatcagggacagtgcgagaaacacaggcttatccctgaataacagagcgataaaggtctttgatgactacagcaaaaagcgggtacagatgggcgacctgtgggcgtga

SEQ ID NO: 385351 - DNA, 351 bp, Salmonella enterica
atgcaaagatacggcattcagacatgggatgagagtggtaaatcaaacaatacgggcattgtgcccgtattgatactcgactggttcaaagtaagcccggggcaggtatccggaacccgcttttatgcggagctgccagcaggtgcgagaattaattttttcgcgtttccgtctgatggcggatctgactggtctgaactcagcaagtcagggagaaagcgggggttaaggattaacgggaacagcataattattgaagaactcccgcatgatgccaggtacgcgctcgcgtgggatgcaggtattgattgtgagcttgatgtggtggtttatgtggagagggtttactga

SEQ ID NO: 385352 - DNA, 726 bp, Salmonella enterica
atgccgtttggaatttatcttgaagacgaatacggcaacccctggtactgggacggaacccgtaattttcagcttatagagactcacagttataacggggtttacgccgacagaaaatatgatacgggtattagtgtctcaaaaccctgcatgattttttggcaggtgacgtgggctcccgatgagaatctattaccactgatgacttacagtagccgggatggtgttagctggaaatatgagtttgatatctttgatgcgaaaagcatcggcgctttcagcccggttaacgtcagaatattcatattcagtaattacgcgacttttttgccccattacggtattgcgataatggatgaacgtgaagatctggtgttaaccaatgaatcaaaactactgcgtatagcgggaaccctcgaccccagatcgctttccaataaaagagtaatagcgggcaattacgccattatgcccatgcttaccaacgccatatattttgattctacagaggatcatgaaggaaactcattccttgtcaaagtaggaacgtcagcgctattacagggttccagtacggtaataaataacgatccggcgcgtggtggaggggagtacggatggagtggaagtacaaacctgatatgggatgatctctttttctctcctggcggtatgaacatagtaaatagccccataccttacataaatgttgctgaatatatttag

SEQ ID NO: 385353 - DNA, 144 bp, Salmonella enterica
atggtgcgagtacttgttactgtcacaggcattttagctgtagtgatggtgattgccctgctggcaggtaaatcagactgcgatttgtcagttggtatgggtaatgcaggactcgcggtctcactgcactacgaaggcagttaa

SEQ ID NO: 385354 - DNA, 381 bp, Salmonella enterica
atgaaccagccactacagaataaaagcttgcctgtgccatctttacgcaatatccaggcattcattgaagtggctgataccaacagcctgaatctggcagctgaaaatctcaatgttacggcctccgcggtaagccatcagatagccagtctggaacagtatctgggaaagaaacttttttcgcgcagcagtaaaggcgtcgtattgaccgcgattggtgaaaaatatttaaaagaggtttcgggggcgttaaacattattggacaggctaccaaccaggtcataaatgatattcaccaggattatttacgcatacattcagcaccgagttttggattactatggttgatgccccgtctgaataaatttcgccaggcctag

SEQ ID NO: 385355 - DNA, 543 bp, Salmonella enterica
atgatgacacattgtcatacaacgcccactgacaaacaccttaccgaggtggaaacccttcgcagagtacttcagcagtccaccgaccagtatccacgtctggtggcgtttcttttgacattacccggtataactccggaagccgtaccgcattttcacgaagttgtttatcagcaggtaagcgaactggctgccacccgtcagctaagcggcaggccggtgccaccaacgatactgcgctggatttgggcgttcccgccaggtcagacgggcaggatgttactgctgctgaaccaggacaccttctgtcatccccgttacgacagaccaccggaccgctgttttgaaacgatggagacgctgctgcgggatgtgattagtaagataaatgacgtccggcaccaccaaccgccagagataaccgtgttcagggtggaccgaaccatcccggtgcaggctgacgcgcagtacagccgacttcgggaatgtgccctgtcgctggctcccgcagccactgcccgtagtgaacgcatcagcccctga

SEQ ID NO: 385356 - DNA, 399 bp, Salmonella enterica
atgcgcatgctgaaatgttacctggcaaataaccgtgacggtcattttgtgacggctgaggaagccatgaacgcacccggacaggtctggatctgcgcctcctgtggctgtcgtctggtgttacatgccggccctgctggtgaccctgcgtggtttgaacatgaccagcacaccgtttcgacaagtgttctgatgcagtgtgcctggctcgacccggaagtgaaagccgaagcccggcacagaaaactgcgcagtatcatcggcgggctggatacgcctgtgacggttctgtcctggtactgcgtgtggtgcgaaaaccattacagtgggaaaaagcattgcacttcatgcgggacaggtatctacagcatcgaagacactgacgctggaaccccgtga

SEQ ID NO: 385357 - DNA, 408 bp, Salmonella enterica
atgtacgccaaatcctttatcgcgctcgatggtaatggtcgtcttaccggagcccgtactgcacagaccgccccttacgaccgctatacctgccacctctgcggtagcgtgctgcaataccatccggaatacgacacggaacggccatggtttgaacacgctaccagtggtctgacgggggatggtcagcattgcccttacgtgaaccctgacacctgcgaagtccggctggcgaaacgtctgcagcggtgggtaccacaagcgttgccggtggtacgtaaagccgactggcgctgtacaaactgcaattctgattattatggggaacgctactgtctgagctgccataccggtgagtacagcactgaggttaacaccctggcggaggtgacgtcatgcgcatgctga

SEQ ID NO: 385358 - DNA, 579 bp, Salmonella enterica
atgcacacaccttacccttttaattccagatacacgatgaactggtttctgctgtctctactcaatgaccacctgaatcagctactgaaccgatactcccgaatacaggcactcagactcgacctgttctatcagaaaggtacagagcgctataaacgtcattcatggaacgaaaccgaacgagaagtacgcatgctggttgaacgcaccctgcagcacacaaatctggcagggtatttctgggtactcgagaacgctgtagaccacggatgccatgcccatatcgtgttctatctcgacaggcaccttaaccaggctacctacccaatagctgagagagttggaacaatatggcgggaaataacgcaacgagaaggctattacaaccgctgcgaatacaaacccacttatgacgtcagtattgataggccggtgaactacgatgataccgaagccatcgataacctgcgctacattatcagctacctcgccaaagaagaacaaaagcacggtcactatcactacgcagccagtgaggtaccgccgcccagcggactggggcgtcctcgcacggtgtaa

SEQ ID NO: 385359 - DNA, 594 bp, Salmonella enterica
atgtcagaacgaatcactttcaatgcaaccaattctgagactctgcgtgttgtggatgaatacagcaaaacacagaagatctcacgatcgcaggttatttccacattgctggatgccaccgttcctgtactgaaagatattaatcgctattatcagcttgcggacgaacttaaggcccgactactttctggtgtctaccagcaggatttacctcgccgaagaagtgttgtagccgctgaaaagtattgtatggagatttgggaaagtaagctccaggctggaaaagggtatgattttgacagcgtcaatggcagggtgcatgttcgcgaacataagcgacaccaccgtcgggataatgcagttggcagggtggagaaccgatatatcaaagagctctgtcagtcgctccaggaaaggtcagaacaggatgcccgctatgcttgttttatctataccgaaaggattatttttgctgatgtagaaacctctgaacactcttcatcgccagtaaaactggcggcaggtgacgctgtgattttgctggcaaaagatgtggtttttaacgagtttttctttgacatagggcagctttga

SEQ ID NO: 385360 - DNA, 909 bp, Salmonella enterica
atggcacagacttttactcataatttacttcatcctcgtcactggcttacctggtctggtttgggtctgctgtggcttctcgttcaacttccttaccccattttacatattctgggttctggccttggaaaaatatccagaccctttctgaaacgccgggaaggaattgcgattagaaatatcgaactgtgctttcccgagatgacaccgtttgcccggagccagatggtcaataaaaactttgtttctctcgggctgggactgatggaaacaggaatagcctggttctggagcgatgcgagagtcaaaaaatggtttgatgtcgaagggcttgaaaatctgaccggtgcgacaaggggagtaatggttgtcgggattcattttatgtcccttgagttgtgtggaagagtaatggggttatgccatcctatgatggcaacgtatcgcccacacaatgatccattaatggaatgggtacagacaaaagggcgtatgcgttcaaataaagctatgattaatcgaggtaatttatctggttttgttcatgcgctaaaagctggtgaagccgtttggtttgcaccagaccaggattatgggtctaagggaagcgtttttgcaccttttttctcggtaaaaaaagcagccacgacgaacggaacgtatgctctgtcaaaactcgctggtgcacccttgatcacacttagcatgattcgacgtagcgataaaaaaggttatcacatgtatatcagcaatccgttgtcaggctatccaggggaagacaaggtcgccgcagcggcttatatgaacaagatcatcgagcgtgaaattctccgtgcccctgagcaatacctgtggatgcatcgcaggttcaaaacgcgtcctgaaggcgaagtctctttatacaaatga

SEQ ID NO: 385361 - DNA, 273 bp, Salmonella enterica
atgaaatctaaaaaatctgtttttattgaagggcatatcatgtcgaacagctgtcacggacaggctggccaacctttctgtattcacagggtcaggtttagtaatggtaaatatgcgattattcgggtggcatccgggatatgtttcaaaccagacgaaattattcaacgaaacgattgtgagtggttttataaacttaccaaaattcggcttctttcttttgagtaccttgatgatgatgaatcaagaaggcaattccttgagtatcaatga

SEQ ID NO: 385362 - DNA, 288 bp, Salmonella enterica
ttgaaaattgaacgtcttatttatgatacactacccttccgtgagaaatttaagatgaaatcagaagacacccttgactggtatccggcacaattaccgcctgtgaaaattattcttggagaagccgtgctggctgtgggtaaacagggccgaccgattaatacccgcaccttgctggaataccttcaggtcatgcaggacaaacaaaaaaggcgggatgataaaatcgccatgcagactgcgattgatgttctcagggataatcagcgcattaacggcagacgttaa

SEQ ID NO: 385363 - DNA, 8583 bp, Salmonella enterica
atgaaaatgaacccaagagcgtggtttaaccgctcccgtattccgatgaatgctgccgaaaacgtaacgttttcggcgaacgatcctgcgagtgaaagcactccgcggtcagaactcttttcgaccgtccagatggagcgctacggtcagaagctggcgcagactcacaaactatcgccggataaacatccttattatcttctgaaacggcttggcgacaatgaggacgtcatcacccaaaactgctatgagcttaacgcgggtaaaaagaccactatcatgcccgccggtgaatggttgcttgacaattattatcttattgaggaacaaatccgcacagtccgccagcacttgccgaaaagttttggcaaaggtctcccgtcgctggtatcgccgctgaattgcccacgaatttatcatatcgcatcagaggcagttgctcacggtgatggccgctgggatgccgagagcctgaccagctatctcactgcctatcaacaggtgacaccgctgacgctgggtgaagtctgggcgctaccgggaatgctgcgcctggcactgattgaaaatcttcgtcgtatcagcatggaagtggtaaatgcgcagcagaacagaaaccttgccgatacctggataaccaggattgtcgaatgtgcaaagagttcacctggtgatttaatcatggtggttgctgatatggcgcgctcccgccccccgttaacctgcgcgtttgtcgcagagctgatgcggcgcctgcaggggcatggcaacgcgctgtcgttacctctgacatgggttgaacagtgccttcgggaacaggggatcaccaccgacgttctcatacatagtttcaatcaacagcttgccgccagccagttgtccgtcagtaacagcatcgcgggtctccgattagtaagtgaaacggactgggctgatttcgccgaaacgataagcgttgtcgaacaggcattacgcaatgatcctgccggcatctatccccggatgcacttcaatacccgggatcattaccggcacgtagttgaggttctggccagagacagcggtctcagcgagcctgaggttgctgagaaggtgctggcgctttcagaggaaaaagcgtccgatacaccggaacatcatgttggttattatcttgcgggcgaaggtcgacaggcgctggatattcatctcctggcagacacctcaggactcatacgcttgcggcacagtttcaacagaataaccctgctgtcatggcttggcagcctggcgttgctgacaaccgcagcgaccgtggcaatattgcacgaaactgcaatgcagggcgcagactggctgttaatcgcggtgatattgcctctggttatcgctttaactcagttaatgagtgatttactcagtgacgcaaccacccgtttccgcgttcctcgccccttgccggggatggatttttcaaccggcattcccgatgacagtgccaccatgttagtcattccctgcatgctgaccagccacgaaagtttcagccagctcctctccagtcttgaagtctgctggcttgggaatgaaaacgaaaatctcaggttcgcgctgctcactgattttgctgattctgaaaatgaaccctcgccggaaagtcacgcgctgctcagaaaggctatcgccgatacgcaggcgctgaatcgccgctacccctccggccgaccacgtttttatctgttacatcgtcagcctgaatggaacccctcggaaggagcgtggatgggctatgaacgcaagcggggaaaactggcgttactgaacagctggttgcgccatcccggaacgcaattcgtcagcgttgcagacatgcctgcccgccttttaccgggtcacattaaatacgtcattaccctggacagtgatacggtgctgccgcgcgatacggcacataaactggtcgcggcgatggcccatccgttgaatacgccagagtatgatccggtacgccagagggtggtcaaaggatttggtattttacaacccggtcttgcggaggagataccacgcaacggtcaggggcgttacgcaggcctgcgaagcagcatacccggcaataacccttattcgatgatgtcttcggatatctatcaggatctctttggggaaggatcgttcgtgggcaaagggatttacgatgttgacatttttatgcaggccactgccaacacctgcccggaaaatcttgttctcagccacgatcttctggaaggttgctatgcacgctcaggtctgctgagtgaggtgttactctacgaacagtaccctaataattatctgtcggatgttgcacgtcgctcacgctggatccggggtgactggcaactgcttaactggctgaaaccacgcgtcagaaaagccgatggaacccgtgcccggaatccgctggccgcgctttcttactggaaattactcgataatctgcgtcgcagtctggtcgccccctctttactggtattgctgttcttcaccctgcttggggtacccaatccggtttactggctgggcatcctgttactgatttggctgttgccagccatcctgtgcatcacccatgaccttctccataaacctctgcgtcgccgcctgaagccgcatctgttactggtgggggcgggcgcgctgaagcgtctgtctggaatcggtctcaatgttgcgatactgccgcacgaagccggatattcattgaaagcgatcgccgtgacgctatggcgactggggataagcaggcgtcacttaagccagtgggtcagccatagccaggacagcaatcaggccagaccctctattgcacgtttttatcaggcgatgtggctgaatgttgtcggtggcgtggcgctgataatactgaccggacaatttgccccccagctactgttgattgcgttgccgatcggtttgttatggtgtgtggcaccgctgctgatgagctggttgagtcgccagcccgtgcgtaaggtgttttcgccaaatcaggaacaaaaacagctgttacgccagaccagccgtgaaatctgggctttttttgaaacctttgccacagcaaaagagaactggcttccgcctgataattatcaggaaataccacaaccgacggtggcacatcgaacttcccctaccaatattggtctttcacttatggctaacctgacggcatgggactttggctacctgtctggcggagaggtgctccggcgcgtgtcgctcacgctcgacacgctggataaaatggagcactacaggggccatctctacaactggtatgacacccgtacgctggtccccctcagtccacgctatatctccagcgtcgacagcggcaatatggccgggcatttgttgacgctgcgtgcagggctgtcctccatgcgtcatcagcctgttttaaacagccaacagatactggcaggactgaacgatacgctggatattctggaaaaacagtggggtcagaacccacctgacagcctgcgactgctgcgcaaacactgcctgagcgcggtgtcactctctccacaggcatttttcagtgaactgaaaaatatgagcatccagtgcaaccatctgtccacgttatgtcatcaggggccaccccttcagattcgctgggcaggacatctggagaatcaactggttcagttctgccatgagtggtcgttattgcttggctggttacctgtatcgtggaacgaacagacgctgccgacgctgagcgagcttgcccgttcgacatttaccggtacaggaacatcaccggcgtcagcgacggagcaggcccgaatgcgactcaatattatcaccgaacttgaacagcggctggatgagcatgcccggatggatttcgcctttttgtacagcgaagcaaccagtctgctcagtatcggttataactgtgacacgaatacgcctgacaagagccactacgatctcctgccgtctgaaatccgcctgaccagttttcttgccattgcgactaatcagctacctcttaaaagctggtacgcgctgggtcgactgtttaccacgattgataatgaaactgccctgatgtcatggagcgggtccatgtttgaatacctgatgccgaatctggtgatgcccacctggcccggcagcctgctcgatgaaatgagtcagtcggcggttgtgcgccagattcactgggggaaagaacgcggggtaccatggggtgtttcagaatctggctatcatgcttttgatgttcagcataattatcagtatcaggcatttggcgtaccgggtcttggtctgcgcagggggcttgccgatgacatggttgtcgcaccttacgccacaatgctggcgctgatagtttctccacagagagcctgtgagaacctgttcaggctgcaaaaaaatggcgcacacggcgaatacggcttttatgaagcgctggactataccccttcacgcctcgcaaccggccagctctatgcggtggtacagtcctggatggcgcatcaccagggaatggcatttcaggcactggctcatgtgctgcttgacgcccccatgactgaacgattcatgtccagtacggtattccggtcagcgagcctgctgttacaggagcgcgtgccggatgcggtcgatctgtacagtccgcgccgtcattttgaatctcatgaaggcagggtcaaacccgtacgctatgaaccccgtattttctatagcgtggatacaccagctcctgatattcaactcctgtccaacggccattatcatctgatgttgaccgcgggcggcggtggttatagtcactggaacgatattgcaatcacacgctggcgcagtgataccacccgtgataactggggagcattctgctacatccgtgatacacagacgggggatgtatggagtaatacctggcaaccgacaggcaacttcagcggacaagacgaggaagttttcttcaccgatgcgggggctgaattccgacgcaccttcggaggactcagcgtcaaaactcaggtggtgatctccccggaggatgatgttgagttgcgacggctcacactgatccatcgtggtcgccagccccgctctctggaactgacaacctatgctgaagtggtaatggcacctgatgccagcgatctggcacaccctgcattcagcaatctgtttattcagactgagctggatcctgagcgtggcgccattctttgccaccggcgcccgcgctctccggatgaagcgagcccctgcctgtttcacatgatggtggtgcatggcgataaccgacataacgtctcgtttgaaacggacagggcaaaatttcttggtcgtggcagaaaccctgctgatgccctggcaacagagacgggagggacgctcagcaacacgtcggggtcagtgctggatccgatactggcaatacgtcactccatcactctacaaccggggcaaccggtcacgattgatatcacttatggtatcagcgagacccgtcagcagagcctggcgctgctggaaaaatatcgcgattaccctattgccgatcgcgtctttgaactggcctggtctcacagtctggtggtattacgccagatgaatgccagtgaagatgatgcaactttgtttaatcgtctcgccagcgctgtactttaccctacccaggaactgcgcgccgaaggccaggtgatcggccgcaaccggcgtggtcagtccggtctgtggggctgggcaatttcaggcgatctgccgatagtgctgctcagtataaccagcgaagaaagtattgcctcagtaaccacactgattcaggcacaccgttactggcgacagaaagggctggatgttgatttggttatcctgaataacagccccggcggctaccagcagggattacaaaatcagattatggagttaatttatgccgggtctgaagccagtctgctggataaaaagggcgggctttttgtccgtaatggcgagcatctctccgcagaagataagttgcttctgatgagcgtggcctgtatttaccttgatgactgcgcagggagtattaatgagcagcttaatcagcgtattcataccctgaaatcgcgggccagagcattcattccgcgtgctgtgcgcgagcgtaatcaacatacggactggagccccgatatcagtcagttatgctatttcaatggggtcggtggattttcacaggacgggcgggaatatcaaattgttctgcgggaaaatgcgcttacaccggctccctggtcgaacatactggcaaattcccgttttggcagtgtgatctcagaggcagggcaggcctatacctggtatgagaatgcccatgaataccggttgacgccgtgggagaacgatccggtgagcgatcgcagcggcgaggcattttacctgcgcgatgaagagagcggggaatgctggtcgccgacggctttacctgttcgcggacacggtgattacctgacccgccatggttttggctacagcgtttttgcccatcgtgagagtggtatagacagcgagttgacggtcctggttgctgaagaagatccggttaaactggtgctcctgacgctcagtaactcttcgggacggacacgtcaactttccgtcacaggctatgtagagtggacgctcggagaaacacgaacgcgctcagcccctcacattgtgacacatgtggccagaacgcccggcggctgcggggtgcttgcgaataacttttatggtgataatggtggcggccgaactgcattttttgccgtcagcggtaatgactgttctctgacaggggatcgccgggagtttattggccgtaatggttcccttcacgccccttcggccatgaaactgcaaaagctttctggtaagacgggggccggtctggatccctgcggagcggtgcaatcggcggttacattaattgacggggaccagaggacgtttatttttatcctcggcgcagaggagaatgatgtttgtgctcaggagacgctggcccgctacatgaacgaggatacggtccgccaggagctgaaccggattcataatcactggcacaatgttctcgataaaatcgtagttaacacccccgacacgtccgtaaatttactggttaatggctggctgttgtatcagacggtcgcctgccgtcttatggcccggagtggctactatcagtctggcggtgcatttggttttcgcgatcagctgcaggatacgctggctctgagccacgctgctccggaccggatgcgtgaacagataatactctgtgcatcacggcagtttatcgagggggatgtgcagcactggtggcacccgccacacggcaacggtgtgcgtacccgctgttccgatgactatctttggctgccgcttgctgtttgccactatgttgaaacgacgggggatatggatgcactggaaatacgcattccttatctggaaggacgctcgcttcagcctggtgaagagtctgtctatgacacgccggtcatcagcggcaccgaagagacactctggttacactgcgtcaaagctattcactatggacttcgcttcggggagcatggcctgccgctgatgggggctggtgactggaatgacgggatgaaccgggtgggtatcgaaggcaaaggtgaaagcgtctggctgggcttcttcctgtacgacattttgcagcggtttgcagcgctggcggagcgcaggctggatgaaagcgtcgccgcgatgtgccgttcacaggctctgcgcctgcaaagtaatctcgaagcccacgcctgggatggggaatggtaccggcgcgggtattttgacgatggtactcccctgggatcgaaaacctcacaggactgccggattgatgcgattgcgcagagctggtctgtattgtccggcgccgcgagcccgggacggtgcgcaaaggccatgcaggcgctggataagcaccttgtggataacgaaggagggctgatcaaactgttaacgcctcctttcgacggacacggtccaaatccgggctacatacaggggtacctgcccggcgtgcgggaaaacggagggcagtatacgcatggcgccatctgggcagtgatggcctttgcccgaatggggaatgccgaacgagcctggcaactctggtcaatgctcagccctataaatcataccctgaatgcggacactgtcgggatttataaagctgagccttatgtcatgagtgctgatgtctacagcgtcgctccccataccggacgtgcagggtggagctggtataccggttccgcagcctgggcctggcgtttacttaccgagggattactggggataaaacgtaccggcactgactttagtgttcatgccaggttaccggatgagtggtcgtctttttctatggcgtatcaatatggtgaaagccattatcagattagtgtttcacgcggcgatgcagaatattgcgtgacgctggatggtgttctcctccctgatgacagaataccgctgaaggatgatggacaaaaccatacggttgagatcattcagaactga

SEQ ID NO: 385364 - DNA, 219 bp, Salmonella enterica
atgacctctagaattacaggcctggtaaaatggtttaacgaagataaaggttttggcttcatctctcctcttgatggcagcaaagatatctttgtccatttgtctgcacttaatggcgacaactttaaaaccttatttgaaggacagaaagttgaattcgccattcaccgcggagacaagggtcctgctgctgcaaacgtaacactttgcgataaataa

SEQ ID NO: 385365 - DNA, 228 bp, Salmonella enterica
atgattaaagtccttgttttctttaatgctgaatcctgtaaagtcatgaccgttctggaaggtatatcctctatcaggcaggaatatccaaacggtgaagaaacacatcttcggattatgtctgcaggttttccttccttaactggcgatcatggcattgtttacgtggctactgacagggagttaacgtcacaggagatacttgatgtggccaggaaatatttatag

SEQ ID NO: 385366 - DNA, 414 bp, Salmonella enterica
atgtcagatgctcttacacagttaaacaatatccgtaccttacgttcccagactcgtgaaatgtcattagatgtactggaagatgttctggaaaagtttaaaattattcttatagaacgacgagaagaagagacattacgtcttgcaaatgaaagtcagcgccgcgataaactggaaacacttcgtcagatgatgcttgatgagggtatcgacccatccgaacttatggctgctattggctctccgggtaaggttaaaaagacgcactccccccgccccgcgaagtatcgatatactgacgaaactggagagtcaaaaacatggtcaggtcaggggcgaatgccgaagcggatctcaaagctgattgctgaaggtggggaattaaaagattttgaaatcagtccaaccgcttaa

SEQ ID NO: 385367 - DNA, 1434 bp, Salmonella enterica
atgactcaccacattaaaggtcaaggcagacatcaggtgacgttgctccctgaagtgctggatgattttgtcaccgaagacaaccctgtcagggttattgatgtctttgttgatgaattacaatttgatgtacttggcttcgagcgcgttaatgcaaaacaaaccgggcgaccaggatatcatcccgcaaccatgctgaagctgtacatttatggatacctgaaccgcattcagtcatcccgcaggttagaaaaagaagcccatcgtaacgttgaattgatgtggttacttgagcgattatcacctgattttaaaaccattgcagacttcagaaaaaacaatggtaaaggcatcaaaaatgcttgccgggctttcattgatctgtgtcggcagttgctgatgttcaccgatgtggtggttgccattgacggtagtaagttcaaggctgtaaacagcaaatcgaataacttcacaccccagaaaacaaaaggccacatcgaaagggttgagcaaagtattgctctttacctgaataagctcgatgaaactgacaaggctgcggagcccgaaaaaaatgcaggtttaaccgctgcaaaactggcatggctgcaaaagcgtttgaaagaactcaagcaaatccagcaggccgttgtgcagcagcctgataagcaactgtcactgacagatcctgattcccggttaatgaagataaacaatgttaaccgccaggttagctataacgttcagactgccgttgatgctaaatatcacctgattgttgcgcatgacgtaacgaatacaccagaccgtgggcagctaacagcggtgacaaaattagcgcaagaagctgttggcaaagtggatattaccgtactggctgataaaggttattacagccggggtgatattaaagcaacgcaggacttaggtgccgtagccttagtaccaaaaggcgatacctctggctctgaccgcaaaggtcttttcaatcgttcattgttcaaatatgaccaggaaaaagatatttatatttgcccgatgggtagcgagcttcagaaccgatttacggtggttgaggatggtttagaacagcaaatgtactttaacaatattgcctgtcgtgattgcagtcagcggtcaaggtgcaccacatcaaaacgcgatccgagacgtataaggcgctgggtttatgaagctgaaatggaagacatgcaagccaggcttaacgcatcgccacaaacaactgtcgtgcgaaagcaaacggtagaacatccgttcgggacaattaaaatgtggatgggagcgactcacttcctgacgaaacggtttaaaaatgtcagtacagaaatcagtctgcatgtactgacttatatactcaataaacttcaagttgcatgttcgggcaatagtatagcccgtgccttatgcgcatga

SEQ ID NO: 385368 - DNA, 876 bp, Salmonella enterica
atgaataaacctcacggccttcaggcccttgaacaaccgctggcgtcgcttcccgatacgcttcgccggcttattctcgaacgcattcagaacctcacccactacgagccggtgattggcatcatgggaaaaagcggtgccggtaaatcgtcgctctgtaacgaactcttccgtggagaagtctcccccgtcagtgacgtgaacgcctgtacacgtgacgtactgcgattccggttacgcagcggtcgtcacagcctggtgattgtcgatttaccgggtgtgggggaaaacgggcaacgggaccatgaataccgtgccctgtaccggcgtatgctgccggagatggacctggtgctgtgggtcatcaaggctgatgaccgggcgctgtcggtggacgagcagttctggcgcggcgtgatgcagacgtaccagcagcaggtgctgtttgtgctgaaccaggccgacaaaatcgaaccctgccatgaatgggatacccgtaccagtaccccctcagcacagcaacgggcaaatcttaaggaaaagcaggccgccatcaccgcgatgtttaagccacatcacccggtctgcctggtatccgcctgtagcggatgggggattgaagacatggtggccaccatgatgcgctgtctgcctgaccgcgccaccagcccggtggcaacacaactgcacgggaggctctgcactgaaccggtcaggacgcaggcccgtgacggctttggtgaggcggtgggccgtgtgttcgatacggcagaatcatcatccctcctgcccgcaccactgaaaacggtgcttcgtaccgtacgggatgcggtggtgtccgtcgcacaggccgtctgggactggattttcttctga

SEQ ID NO: 385369 - DNA, 441 bp, Salmonella enterica
atgaaaatcagtaatatcacacgacgtcatctccggacgggtaaattgctgttaattatttcagcttttttattgagcgcgtcagtcaatgctgcaaccgtccgattaccccaaaaagtgactgacgtgaaagacggcagtgagcagatgtgcggaagtgacgatgtgaaaaacggaacgtgcagcctcgtcagtgtctctgatgatggccactatgcgctgttaagcagcccgggtggcatggcctgttatgacccttatctcatcgtggtgaaccttaccaccgcaaagggaaaaatgatggactataaccgtcatgcgacatgcagcggtgaggccaccgcgaagtttgtccgttcaccggaaaatggtcgtcttaccgttgttatctacgatcccaccatcaaaaagaacgtcgggcttaatactattgatttttaa

SEQ ID NO: 385370 - DNA, 942 bp, Salmonella enterica
atgtctcttaatttacgtaaattaaaacaggtaatactgatatcctcgctttgttttatttccgccggagtttatgccgccggtgttgcaaaaacggcagcagatgcaatgagttgcgatcctgacgccggtgataatgacaacggatacggttcctgcccctttctgggcagcatttacgatgctgacccggtattcaggaaagaccttgatgacgcgctgaagtcagcaggacttaccgggttaacgggaaaacagggggcaatgaacggcccggacagtggtttaattccggtcgatgctggtggcgagaagtggctgctgggctctgtctgtgaacagggtaactgtggtgaccattatctgaaaattctgtatatcccttcagaacatgttgttgcgggtttttactacaacggtggtgaggaaaagatgtttggtgacgccggggatgcagaagcaaaagtcttgcgcagtgatgtacccgatactgctccggcacaacaggccccggtgctcgcagcagcaacacctgcagacggcgcaccagcaaacactatctggtcctttaaggacaacggtggcaaatcgttatggcaggtctgtggcggtcagaacagcagttgcaccattatcgccagtactaagtattacgttgccgttcttaatcgcaaatcagcaaccagctgtgccttcggtgatttttatgtcgccgcccgtgataccgcatcatggcgacagtatgacacgggtacctgcagcccggatgcgtatatccgtaagggcagtatcagcaatggtcagtatctgtcggtcgatattggtatcaacggggtgctcgtgaaacagttcccgattggctactggtcaatgcagaaggaattctcaggaaaaagacgcccttcatggtcaaaggttaaagagaaaaaccagcagcattaa

SEQ ID NO: 385371 - DNA, 234 bp, Salmonella enterica
atgcctgaactcactgaactacctgagggaccgtttactcgccagcaggctgaggcggttgcgtctcaatataccaacgttgctatcgaagacgaccagggctctcatttccgtctggtcattcgtaatactgacggaagccttatctggcgggactggaacttcgccgccagagccggtcaggggctgaaccgctttattgccgactacggcattcttaaggagccggtgtga

SEQ ID NO: 385372 - DNA, 231 bp, Salmonella enterica
gtgaataacgaacgccgcaaacacctggccgtactgtcacagcaactcgctgaactgaaggatgacgtgcaatctgtgcccgatgaggaagaggacgcctttaataacctgccggaaggcatacagaacggcgagcgcggcgatgctatgcagacggccattgctgcactggaggcagcagtcagcgcactggaggaggccagtgaccagttgacagaagcacagacgtag

SEQ ID NO: 385373 - DNA, 204 bp, Salmonella enterica; identical to SEQ ID NO: 249949

SEQ ID NO: 385374 - DNA, 378 bp, Salmonella enterica
atgaaaaaatttattacggcagtattcattattcttcctttggcgagttgtactgtttatggaaacaaatccattaaagacgaaacgcagcaaaatatagcctcaaaaattatcaaaggtaaaactactcaacaagatatccttcatctttatggggaacctcagactaaagaaactaacgatggtaaagaaatgtggggatattccgttatgtccggtgaatctcagatttcaaattacataccgggattagcgttattgaagaatagcagcacagcgcacatgaaagaacttgagatctggtttaaaggtgatgtggttgaacgctatacctttagacaaacagcaagcaaagcttctcgcgggttgttagattaa

SEQ ID NO: 385375 - DNA, 495 bp, Salmonella enterica
atgaaaacagaaaacattatttttcttttttgggcagtgatttttatcctgatcttctgccaagttttttactttggccctaaaaaaagaagatacctcaatacttacacagaggtattagatggggatgtcctctcatatgaatgtcaaaataccggtgtagtcattgatactaaaaaacacacagtacgtattttcaatacagataaggacagcactttcaaatacgacagcatcagggaaataaattatacgctatccgaagccggaaaaatttataacacaggtaataatctaaactctatgataaagtccgctggagctaacagcaatgagcaaatgttagctaatcagcgttccggtatttttatactgacagatgatataaaaaatccttcatggaaaatcaatctaccaatgaaaaacaaaacatcatcgaccaatcagcagatctgcgatcgctggctcctcatttttaataaatatgttttataa

SEQ ID NO: 385376 - DNA, 522 bp, Salmonella enterica
atggctatttacagcggctttaacccgatacccccggtaaagggcctgcatgttaagggaatgatcacgctgggatctgacgtggttattcctgattcgctccttctgaaactgaaaccgcagaacagtaccgggctgggttccccgactgttctgggcaatatgaccaatacccagcttccggggcgtcgtatccttaatgtggtcaacacgtatctgaaaacgccgctgaccgatgaagagctgaaactgatactggcaaaccgctataagtttgagttcacgattggcgcaggcgacaggcgggaggtacttaaagggcgattcaggctgacaaccaactggcacggtgaagatgtgactaatttattgttaagtcccgaaccgtgggacggctggccgccttacctgttcagtttcagtttttccggcaggacgggagaaatgagtctgacagacagtcattcaagcggaaacacctacggcgctatacgctaccttactatcagggttaagccatga

SEQ ID NO: 385377 - DNA, 801 bp, Salmonella enterica
atgagtcgtttcacaacgcccgccatttcgaaagctgaagagcaggcattgcctatagtgccatggattggtggcaagcgtcttcttgcaaaacatatattgccgctattccccaagcatgcctgctacgtggagccgttctgcggcgcggcggcgctgtttttcctcaagaaacccagcaaggttgaggtaataaacgatatcaacggcgaccttatgaacctgtatcgggttgtaaaacatcaccctgaagagtttatgcgccagtttgagtgggggctggtaagccgggaggagtacgaccgttacaaatccacgccagcggaaatactgactgatattcagcgtgccgcccggttctattatctgcaaaaacagggattcggcggcagggttgcggattatacctttggcgtaagcacggctcacaaaccgagtcttaacccgtcacgtatcagggaagatttatcactggcaagtaaaagactgactcgcaccagtattgaacatctgggctgggagcaatgtatagaacgctatgaccgcccgtacacactgttctactgcgacccgccgtactggaaaacaaaaggatatggcgcggattttccgtttgaggaatacagccgtctggccgaacgggcaaaaagcattaagggtaaaatggtgatatcggtaaatgatacccctgaaatgcgcgaggtctttgccgggctggaaattcagtcactggatcatcaatacggcgtcagcgggggcaagagagtaccagcgcgggaactgataatcaggaatttctga

SEQ ID NO: 385378 - DNA, 360 bp, Salmonella enterica
atgagccgcttcacaactcccgccattcttgaaatgctggggcattataactggcgcgtacacgagccgttcgccttttacctcagcgacgacaacagcgacgtgatagaagtgcccgcaggattcatcaccgaccttgcgaccgtccctcgtattttctggatcctgctgccgccagacggcaaatacgctaaagcggcaataatccatgactatctctacgacaatgctttacgtacaaaatatgaagcagatcgcattttccttgacgggatgacggtgcttggtgtgccgaaatggaaaaagacgatcatgtattgggctgtcaggttatttggtcgtggaaattacaacggataa

SEQ ID NO: 385379 - DNA, 840 bp, Salmonella enterica
atgaggttaaatgtaggggttaatacggcgatgtttgatggtcacgatactgatatcgctttcgcaacgatttttaaagcgggtttccattacgtggagctagcctataaccagggctacgtaggagagctgagcccagatttgttcagcgcccgacatgcggataaaattctttctcttctagagaagcaccgtctggcaacacacacactaggtgccacaatggatctggccgcggataatgccattaatgcctttagccaacggataaagtttgcatcaatgatcggtgcccgaagactcacagtctgtctgggacgtcgtgcagatcaaaaattaattatagaaaggctgaaaatgttatctgatatcgcagcagcgaatcagtgcataatctgtatagaaaatggaggagatcataattataatgtttttgagacagccaaagatggttatgctttattagacgcagttaacagtccggcccttgcctttaatattgacgcagggaatatggtttcgctatgtcatgaaatggatgcaatagctgaaagcatggcgatgctgccttctgcagcacattgtcatattaaagatgtaaaggtcattaacggagaatattactttccagctatcggtgaaggcattctcaattatccacctttacttaacgcattagcagataaaaaaatcccctgcagccttgaaattccattacgtatgcatcgaaacatggacagttatccagtacgtgcgcaaacaccagtaccagtaaatctcagtcttgaaatattaaagaaatcacgtcttacactggagtcgtggctaacctcagaataa

SEQ ID NO: 385380 - DNA, 948 bp, Salmonella enterica
atgtataccggcccaataattgatgctcaccagcatttctgggagcccgatatcaatccgcatccctggctggcaaaggatgctcagatcccatttcgatatggcgattacaacgcaattaagcgtcgctatttaccgccggattaccttgctgatgcagccaggcaccgtattgtcgccagcgtctatattgatgccgaatgggacccgagtgatcccatcggagaaactcagtatattcatcaggttgcgcaaaaatacgggttccctaatgccgttgtcgctcaggcctggctacatcatgataacgcagaggagcttctcgctgcgcaagcgcagtggcctcttgtccggagcgttcgtcacaaacccggtggtgcaataactcctgatgaagcaaaatcaggagttcgctcattaatgagcgatgaacgctggcgtcaagggtttgatttgctgaaaaaacataatttgcattttgatctacaaaccccctggtggcaccttgatgaagcagccattttggctcgggactttcctgagacacaaataatccttaatcatacgggtttaccagcagatcgcagtgttgaaggattaactgcctggagaaaggcgatagaaaaagtcgcacaatatgagaatgtagcggtgaaaatatcagggctgggacaagaaaaaataccatggaatgttgagaacaatcgacagatcgttctggatactattgccatttttggtgcagaaagagcaatgtttgccagtaattttccagtagacagtctttgtgtaaaactagatgttctgtggcagggttttaaaataatggtgaaagatctgactgccagacatcaaaacgcactcttttacgaaaacgcccggcggatctataacatcaatgtggaatatccgttcattgcacccgttacgctgaaggaaaaattatga

SEQ ID NO: 385381 - DNA, 1293 bp, Salmonella enterica
atgcctgaaacagcccagtcaaccaaggtaaggtggaaaatcttttccatcattttcttactggtcgtcgtcaatcttatcgaccgcgtttcgttgtctatcggtatgccgaccatcgcccatgagtttgatctgtctcccgccatgcagggaatcattctcagtagttttttctgggcctacgcactgctgcaaattcccggcggctggatgatcgatcgtttcggtccacggcgcgtcattaccggttcaacctttttctggggcgcatttcagacgctggcggcactggcaaccggcgggtggtcactactgattacccgcgtagcgctcggcgcagcggaggctccgttgttcccggcgggagcgaagctgaacgctatctggctttccacccgtgaacggggccgtggtgctgtcattatggattgcggtggaccgcttggtgcagcgctgggcggtttaatcatcgcccatatgctggtactactcaattcctggcgtctggtattcgccatcgcaggactcgccaccatagtgttgagctgggtggcctggcgctatattcgcgacaccccgcagacacatccgaaggtcaaccagggtgaattacagcaaattgagctaaaggtcgacgccatcgcctctgttgcagaacaacccggcgaccacggtcgctttggcctctcaggacgccccctgtggtgtatcctgactggtcgagctgcctgggcaatgatgttttttggcctcttaacctggggacctaattacctggcccaggcacgaggctttgatttgatagctatcggcaacgccaccttcttcatctttatggctggtgccgcgggttcgctatgtggcggtattttaatggatgcgctggtaaaagcaggctatcggcagtttatcgtccttaaaacgttgctgctctgctccggtacgattgttctggcggcatttctttctctgccagcgctggcgaatgcagtactcgcggttgcgatactgagtatcgccgcctttttcctgatgtggggcagcctttactggagtctgccaccgctgctggtcagtaaagataaagtcggcatgatgggcggcgtgatgaatatggccggcagtataggcggaattagcattccgattatcgttggactgattctgcaagctaacggcggttatcaggccgtgttgtggttctttgctgcttgctcggtggtctacatcacaggcagcctctttaccaccctccctttgaccaaggagaaagcatgtataccggcccaataa

SEQ ID NO: 385382 - DNA, 1038 bp, Salmonella enterica
atgtctttacctgtcatagctatggtgctcggcgaccctgccggcgtaggccctgaactggtagcaaaagtgctgtctgataatgccctgcttcatcaggcacactttatcatcatcgctgaccgtactgaactgaaaaagggaatggtgatcgctggtcaggagttcccgtatcgtgaagtaaccctgcctgaggcatcagatcttaacgcaggagaagccctgttaattcatcatcgctgcagccacccggcaccgtttgaatacggtaaagctactgagcaaagcggaatttatattctggagacgctgaaaaaagcactggaattgactcaatccggttttgcgcaagccatctgttttgcaccgttaaacaaacaagccatgcatatggggggactggagttccgggatgagctgcactggttcgcccatcaactgaactggacgcctttctgctgcgaagtcaacgtagttgacaacgtctgggccgggcgcgcaacttcgcacatccccttcagggatattgtggccaacctttctgttgacggcgtactggacaccataatccttatgcacaataccctccgtcaggcaggattcaccacgccgcgaatcgccattcaggcgcttaacccacatggaggggaaaatggactctttggtgacgaagagcagaccatcatacgtccggcaatggagaaagcacgccagaagggcatcactgtgtttggtccctatcctgccgacaccacatggaaagccatgcaaaccgaaaaactggatgcggtcgtttcgatgtatcacgaccagttcgccacagccctgaaaatgctcggttttgaacgcggcgtaaccgtacagggaggtctgcctgtacctgttacaactgcgaaccacgggacagcatacaatctgtatgggcagaatgtagccacgccatcggccttccggcaagcagtactattggctattcgcatggcctgcggcaacctgcaaaccgcaacggtaacggaaaaaactccagataactcctga

SEQ ID NO: 385383 - DNA, 1311 bp, Salmonella enterica
atgaatattatgaaaaataaaagcacaaaggttctagcgttattttgtgctctttcttttctgatgtatgttgacagggtaaacctttctgcctcagcggcattaattaaggaggagatcggtcttgataataccgaactgggtattattttctctgcttttgcctatacttacctggtattccagataatcggcggctggttttgcgaccgcttcggtgccaaacgtactattattatctgtggtagcatttgggtcgtagccactatctgtacgggattcgtcggcgggttcgtctcacttttcttaagccggctgctgctgggtattggtgaaggtgcagcattaccatcacaggcacgcgccattacattctggtttaaaaaagaaaaacgtggcttcgttcaggggctaactcactctttctcacgttttggcaatgccgttactccgtcattagtggccttgctggtattagcccactcatggcgcttctcatttatcgcgctgggggtactgactgccatctggttaatgatgtggatcgcctggttccgcgacacaccgcaccagtttccgcagttaagtcaggaagagctggcacaatatccccaacccgacccgcaagtcagggataaaataaaagagccgactccatggggtgcgttattaaagcgtatggggccgaccatgggcgtctatttctgctacggctggaccggatggttattttttacctggttgccaaccttcttcatgaatggtcgcggaatggatattaaatcctcagcactatttacttccggcgtatttctttccggtgttgtgggcaataccgtcggaggcatcgtgagcgattatatttataaacgcagcggtaacgtcgtcgcagcccgtcgcaacgtcattattttcagttttctcagcgctctgttactactgctgccggtgattttgtctacctcaatgacagtgattacgctatgccttgccgtggcattcttttgccttgaattgaccatagggcctatctgggcggtaccaatggatatcacaccaaaacatgtaggcattgccagtggcctgatgaacgcaggttcagccgtcgcaggcatcatttcaccgattttgttcgggatcatcatcgacaaaaccggcaactggagcctgcctttctatgggtctgtggttctgttaatggtaggcatcattctgacgttctttatgcgcccggatattccgttacaggaaaataaccgaaaaactaacacgcgttcgcaagataaatcatccataacatctgcacattga

SEQ ID NO: 385384 - DNA, 2010 bp, Salmonella enterica
atgctcagtcgtaaaacattaagcaatgcattgcgcgcgctaagtatggacgcagtacagaaagccaagtccggtcacccgggcgccccgatgggtatggctgacatagccgaagtcctgtggcgtgatttcctgaaccacaacccgtctaacccgtcctgggctgaccgtgaccgcttcgtgctgtctaacggccacggctccatgctgatctacagcctgctgcacctcaccggctacgatctgccgatgtctgagctgcagaatttccgtcagctgcactccagaaccccgggccacccggaagtgggttacaccgcgggtgttgaaaccacgacgggtcctctgggccagggtattgcgaacgcagtcggtatggctatcgctgaaaaaacgctggcggcgcagtttaaccgtcctggtcacgacattgttgaccactttacctatgcattcatgggcgacggctgcatgatggaaggcatttctcacgaagtgtgctcactggctggtaccctgaaactgggtaaactggtggcgttctatgatgacaacggcatctctatcgatggccacgttgaaggctggttcaccgatgacaccgctaagcgttttgaagcttacggctggcacgtggttcgcggcgttgatggtcacgacgctgatgccatcaaacgcgcggtagaagaagcgcgcgcggtcaccgacaaaccgtccctgctgatgtgcaaaaccatcatcggcttcggttcgccgaacaaagcaggcacccatgattcccacggcgcgccgctgggcgacgctgaaatcgcgctgacccgcgaagtgctgggctggaaatacgctccgtttgaaatcccgtctggcatctatgcgcagtgggatgcgaaagaagccggccaggcgaaagaagccgcgtggaacgagaagtttgccgcctacgcgaaagccttcccgcaggaagcggccgaattcacccgccgtatgaaaggcgaaatgccgtctgacttcgacgcgaaagctaacgatttcatcgctaagttgcaggcgaacccggcgaagatcgccagccgtaaagcatcgcagaatgccatcgaagcgtttggcccgctgctgccggaattcctcggcggttctgccgacctggcgccgtccaacctgactctgtggtccggttctaagcctatcaacaaagacaacgccggtaactacatccattacggcgtacgtgaattcggtatgaccgcgattgccaacggtatcgcgctgcacggcggtttcctgccgtacacctctaccttcctgatgttcgtcgagtatgcgcgtaacgcggtacgtatggcggcgctgatgaaacagcgtcaggtgatggtctacacccacgactccatcggtctgggtgaagatggcccgactcaccagccggtagagcaggtcgcttccctgcgcgtcacgccgaacatgtccgcctggcgtccgtgtgaccaggttgaatccgcgattgcgtggaaatatggcgtagagcgtcaggacggcccgaccgcgctgatcctctcccgtcagaacctgacgcagcaggagcgtaccgcagagcagctggcaaacgtggcccgcggtggttatgtgctgaaagattgcgccggccagccggaactgatcttcatctccaccggttcagaagtggaactggcggttgccgcgtgggacaaactgaccgccgaaggcgtgaaggcgcgcgtggtctccatgccgtccaccgatgcattcgacaagcaggatacggcctatcgtgaatccgtactgccgaaagccgtttatgcccgcgtggcgatagaagccggtatcacggattactggttcaaatacgttggcctccacggcgctatcgttgggatgaccacttttggtgaatcagcaccagcagagaagttgttcgaggaatatggcttcactgtcgataatgtcgtcggaaaagccagatcgttactcagttcaggaacgacaatttaa

SEQ ID NO: 385385 - DNA, 981 bp, Salmonella enterica
atgacgatgcttgatcaactcaaagctttcactactgttgttgcggacagtggcgatatcaccgctatccgtgattacttaccggaagatgcaaccactaacccatcactgattctgaaagcagcaacgcaacctgtttatcgcccactccttcaacaggctatctcctgggcccgcatacagggaggcaatgaaaaaacacagctaattaacgccagtgactggctggcagttaatataggagcagcccttcttcagcaggttcctggtaaagtttctaccgaagttgatgccagattatcttttgaccgcggtttgtgtgttgcgaaagcacgcaagttgattcgactgtatgaagagcaaggaattagtcgttccaggatacttattaagctcgcagccacgtggcagggaattaaggccgcagaagaacttgagaaagaagggatccactgcaatttaacgctattgttctcttttgcacaggctcgcgcctgtgctgaagctcgagtctggcttatatcacccttcgtgggccgaatttatgactggtatatggaacgtggattgttaacaactgacgatccccagatggaccctggcgtacagtcagttcaacgaatctatgacttttataaaatacatcgttaccccactgtcataatgggagccagctttcgtaaagtcgaacaggtactcgcactggcaggatgcgatcgtctgacaatttccccgccactccttgattcactggcacatcaggagggtgaacttgtcagagcacttaccccaccagttgaagcccacacaccgccctccccgttaagtgagtctgaattctactggcagcacaatcaggaccctatggcagtagacaagctggcagaaggtattcgtatgtttgcctgcgatcaggaaaaactggaagcgatgctgcaggaaatattacgtaataaggagctctccaatgctcagtcgtaa

SEQ ID NO: 385386 - DNA, 474 bp, Salmonella enterica
atgatgttaaaagtagctataggcgcagatgacgctgctacctgtctcaaaaatcaggttaaagcacatctgcaaaataaaggtattgaggttattgatttcagtcacgatgtggaaaacaacgaacaaatttatccggatattgcctttaaccttgcttcatctattaaagaaggcattttcgaacgcggcatacttctgtgtggaaccgggattgggatggcaattgtcgccaacaaagttccgggtatccgcgcggcgcaatgccacgacgtttactccgcttcccgcgcacgcaaaagcaataatgctcaaataatgactattggagctcgcgttattggccaggaactggcgcttatgttggttgacacctggcttgaagccgaattcgagtcaggacgttccttaccaaaaattcagcgtatcgattattacgaaacacttttacaccctggtagcgcaagtaaatag

SEQ ID NO: 385387 - DNA, 1758 bp, Salmonella enterica
atgacctggatatttaatcgaccttcagatttcgcgaaagaaatggtggcgggatttgttaatgcgcattcttctctggtgcgccaggttccgggaggcgtagtacgtaacacgcaaagtaaaccggatagtgtcgctatcgtgatcggcggtggatccggacactatccggcttttgccggactggtagggcaaggccttgcgcacggtgcggctatggggaatctctttgcttcaccttcggcccaacaaatatgttctgtggcacgcgctgcgaataacgggggaggcgtgttgttggcatttggcaattatgcaggcgatgttttgcactttgggctggcttgcgaaaggctacgtgcggaaggtatcccctgtgaaacaattgcagtaactgatgatatttccagcgccacgttgtcggaaaaagaaaggcgtcgtggtgtggccggtgatcttgttgtttttaaagcagcctcagcagccgcagagagaggtgattcattagcggaggtactggccgttgcccgacaggcgaatgcccggacgcgttcacttggtgttgcttttagcggttgtaccttaccgggttccgggcatccgttatttacggtacctgagggaatgatggggtttggtatggggatccatggcgaacctggcatcagcgaaattccggttccctcagccgatatgttggccgggatgcttacggaggctttgttactggaggtaccgcctgaggttaccgctatcaaaggggccagagtgggagtaattataaatggccttggttcagtgaaatatgaagagctgtttgtcctctggcattacattgaacctcgccttcgtggggccggggtcatcgttgctgatgtacaaattggcgagtttgttaccagctttaatatggctgggatgtctatgactctggtctggtttgatgaaatgcttgagcagttgtggttttctcctgcctttacgcctgcttttaagaggggggctgcgatggagcatctgccgctgacagagaaacagtgtgatcgggtggttatgccattgatgccacaaggtagcccggcctccagggatgctgcggaaaaagtgatgtgcattttaaatgcagttgcggaaaaaataatagatagtgcctgcgagcttggaagaatcgatgcaattgccggggacggagaccatggaatcggtatggaaagaggtgtccgtgcggctcgacgtgcggctgaaaaggcattacgacagggggctggggtgggggcattgttgcaatgtgctgcggatgcctgggctgatgaagcgggtggaacctctggcgcaatatggggggttatcctcaatacgctgggaacatctttggggaatgaagaatgtcctgatgcgaaaggtgtcgcgtatgccgtggcacaggcaagcgaaggtgtgatgcatttcgggaaggcgaaaccaggcgataaaacgctggttgatgtgcttcatccttttagtcaggccttgctggaggctgccgaaactcacacactatccgtagcctggcaactggctgcaggggttgcgcaattaagtgctgaaaatacggcacagctggttccgaaaattggtcgcgccagaccgcttgcagaacgtagcctgggtacaccagacgccggagccgtttctttggcaatggtcgttatgacggtggcagaatttatgaagcagtcatgcccgaccttacagactcaggagggcgtatgtctgtaa

SEQ ID NO: 385388 - DNA, 762 bp, Salmonella enterica
atgtctgtaaatgtgatcgttggcatcagccataaaacctattttggatatcaacagactctggaatggtgtcagaatgttgcggacaacctgagaagtaaccagaaagcgcatgaaaatattgaacttttcactttccctgcaatgccagctattgctgatggtatggcgattttcagagacagcggtatggcggttggggcgcaaaatgtctgtgctgagcctgctggagcgtggacaggcgagaccagtgcttccatgctaaaggagattggttgccgttatgtcgaaattggacatgctgaacgccggcgtcattttggtgagaccacagggataataaaccggaagcttaatatggcgtttgattgtgggttaattcctgtaatttgtatcggtgaagagtcagaaatggtgatggaagaggctgcagctttcgcgaaagcccaggttaatgagttgcttgcgcatcgaaaagaaccactgccacctctaatctttgcgtgggaaccccagtgggcgattggcgcccctgaaccggcaagcgatgaatatatacgttatgtttgcagctccgttcgttcctggcttcagaaacgttttggaaaacagtgcagggttatatacggcggaagtgcaggccccggtttacttggacgtttgtggccggatgtggacgggatttttcttggccggtttgcacatcagccatctgcgctggaggcaattattgaggaagcccgggaaatagtccgacaataa

SEQ ID NO: 385389 - DNA, 963 bp, Salmonella enterica
atggacaagcccatagtgtcacaggaatatgagttacttactgagattgctgtagcttattactgtgatgagataacccaggaagagatagcgaataaatttggcctttcccgtataaaggtagggcgtctgctgaaacgggcgaaagaggaagggatagtggaaattaacgtccgttatcaccccgtgttcagcacacaactggaaaaacaacttaaagaacgttttcccgtcagtcgtgctttgattgccctggaccatcatgacgaagaagaacagcgtcgtcaggttgcatctcttgtgtcggcgtacttaaataatgtccttaaggataatgttgttgtggcggtcggacagggcagaaatgtggcctcggtggcggagtcttcaggggtaattcagggacgcgactgtcgttttatttgtggcattggaggtactcatcgtcccggagatgtcatcaatgctgaccatatcagtagactactggctaaaaagtttggcggcagcagtgaatcattgtatgcacctgcctatgttgaaaacatacaactaaaggaactactgctacaaaatggtacgataaaagagacgcttgatcgtgcacgaaaagcggatattgcgctggtggggataggcgatatgaatgaagaaagttatatggtgaaactgggatggtttacacctcacgagattaatgatgcgagtcttaatcagggagttattggcgatattgctggctatgatttctttaacgcacgtggtgagcacgtaaatacagtaatggataatagagttattggtttgagtgttgaagagttgcgtcagatcccctgtgttattgctattgcttctgagaacactaaggctatggcgattatgggagcattgcgtaccggtgcaatagatattattgctacaagtgcaagaaatattagaactattttgagtttgagtcagtga

SEQ ID NO: 385390 - DNA, 612 bp, Salmonella enterica
atgcgcaataaattattattagccatggcagtaaccggcatgatgtacggagtttctgcctatgctgttgatgaccccacgcctccggctaaattcggttcaggcactgtcaccttcaggggcaccatcacaaatgctccatgcgatattgccacaggcgatgacgacctgcatgtggacttcggacaggtgtcctacagatccctgaaagcccacgatgccgctgatgacgcacatgcaaaaaacttcactatccatctgcagaactgtgaatttgataaaggtagtgccccacaaggtgggggaacagcaccagatctgatgtccaaagtacagattgccttttccggcaccccggcagctggcagtaaaaaagcttttgtcagtgccactgacccaaatctcggcgttcagttagcagacgccaaaggtgccatcattaccccttctgccgcacctgatttcgatacagcgggtgaccctgttcagttgaatccgggtgacaccccgctggtttacaccgcaaaactgataaatgtgggagcaacggatggtttagttaaacccggggctttcactattcccgtcaattataccctgaaataccagtaa

SEQ ID NO: 385391 - DNA, 339 bp, Salmonella enterica
atgatgcggcatataccggtttgccgagagattatagtccagcaccgccccggcgacaccgtcactccagcgggaaggcggcacccagtccgggtccaggtactccatccaggcctgaggaataacaaaggtcagtcgctgtttttcagcgctgtactgtaccttactgtccctggtgttcaggtcaagacaatgcccgccactcacgttgctttccgtgccgggaacgactttcagtccacggacaatattatccttcagacccagcatatccaccatagctggcgtcacacagatgaccgaatcgccactgtcatcatacggcaccaccctgactga

SEQ ID NO: 385392 - DNA, 201 bp, Salmonella enterica
atgactgatttttttacgcatatatatggtctgttacttgaaggtgatggaacggtacttattattttatatttgggtattctttgtttctggtggtacctgattgtttctgcactggctgtagtcagatttatttcttttattgttcgcctgctcagggaacgcatcatcagtaacagaaataagaaggccaatcgatga

SEQ ID NO: 385393 - DNA, 918 bp, Salmonella enterica
atgaataatgtgttaacgggaaatgttcccgcgcgccacacacgccggcgtctgccatcccggccatttctgaaatgggcgggaggcaaacggcgcagtcttgccacgctgctgcagcgactgccttccccggatgaggtggaatgtctggtggagccgtttgtgggtggtgccagcgtgtttctggggacggattaccgccagtatctgctggcggatatcaatgctgacctgattgacgtgtatctgcacgtcagggacgacccggcggggatgattaagcgcctggaaaggctgtttcttcaggggaataacgaaacggcctaccgggaaaaccgcgacgagttcaaccgtattcaggcagggccggagaagtcggcgctgtttatctatctgaaccagcactgtttcaacggtatctgccggtataataagcagggcatatttaatgtgccgtttggccggcgtaaagcagcctatataccggagacggagatcatggcgttcgcccggaagacagagcggtgccatgtctcgttttttcatgcggagtttgaagacaccctgaagatgacgacggcggggatgtttgcgggactgtcatgtgcggtgtactgcgatccaccttatctgccggtgagccagacggcgggattcacggcgtacagcggtgatgtgtttaccgtgtcagaccatgaaaggctggcggggcaactggcggcgcttcatgcgcggaaggggatgccggtggtgatatcggcgagtgacacgctaatcagccacagggtttacggggaggcgggattccggctgtacggacatgatgtggtgcgttcggtgtcggcgagcgctgcgtcgcgaaagacggcaggcgaactgacgggagtgctgatgcgtggtcagggagacaaaagttaa

SEQ ID NO: 385394 - DNA, 1512 bp, Salmonella enterica
atgctggatctggatgtttttgttattccggcggtgattatcgccgtgattgtgatttgcgggctggcgttctgggcccgctaccggacagtgggaccggagcaggcgatgattgtgacggggtcgtttctggggaatggcaacgcggtcatcagcgatgacccggggcggaaagtcaagatagtccggggcggcggtgcgttcatctggccggttttccagcagtcacagtatctgtcgctgctgtcccacaagctggatatctccacgccggaagtctacacctctgagggagtgccggtgctggccaacggggtggccattatcaaggtcgggggagccacggatgatattgccacggcagcggaacagtttctgggcaaaccggtggacgcgctgaaaggggaagcgcgggaggtgctggaaggtcacctgcgggcgattcttggcgggatgacggttgaggaagtgtaccgtaaccgggacaagtttgcccaggaagtacagggtgttgcagcccgtgacctgaagaagatgggcctgcagatagtctccttcaccatcaaggacgtgcaggataaccacggttatctggacgcgctgggtaaaccgcggatagcggcggtcaaacgtgatgcggagattgcggaagcggaggcggtgcgtgacgcgcggatccgcaaggccctggccgaggaggaaggacagaaggctgaactgctgcgcgacaccagtatcgccgaagcgacaaaggaaaaagagctgaaggtggcggcgttccgcaaggagcaggaaaccgcgaaagcggatgcggaccaggcctaccagatccaggaggccatcgcgcagcagaaagcggtggaggagcagatgaaggttgaactggtgcgcaaggagcgcgaaattgacctgaaggaaaaagaaattctggtgagccagaagcagtatgacgcagatgtgaagaaaaaagcggatgcagataagtacgcggtggagcaggcggcggaagcggagaaggtgaagcagatgcgtctggcggaggcgagccagtacacaacggagtcgcaggctaaggccagtgcggaaaaaatccgtctggatggtctcgcgcaggcggagtcagcgaaggctaaaggggcggcagaagccgaagtgatccgcctgcggggactggcggaagcggaggcgagggagcgtcaggcggaggcgtttgataaattcggccaggcggcggtgctggatattgtggcgaagatgctgccggagctggcgggcaaagtcgcagccccgctcgcgtccatagataaactgacggtggtggacagtggcaatggcagcggtgccctgcagctcagccagtatgtgacgcaactgatggcaactgcgccggacatgctgaagaatgtgtcgggtatcgatgtcacgcagctcgtcagggggctgacggagaaacaggtcgggtcaccggcaaagccggaaaacgcagaagataaggataaaaaggaggtgtga

SEQ ID NO: 385395 - DNA, 498 bp, Salmonella enterica
gtggatatttatgtgggattactggcagccggcgtgctgctggcgttattcagcctgattgccggtgactggctggagagtattttttgcctggatgcgctgcatccgatggtggtggcgtcaggctgcactgtcgccgggggggccggcatactgctgctgaaacacaccgcgctgaccacggtggtcgtgttgttccttgcgcttgcctgtgcgctgatcctgtctgtggcggtattttacggctatgtgcgcccgatgcggcatgctgaaacctccacggcgttttccatgaaggaactgacaggaaaggaagcagtggtgagcgtcaccattccggcccaggggtatggcgaagtgatgatccgtgttggcgcggggtcgaccagccaggtggcggccagttttgatggtacgcagattgagaaagaaaccatcgtggtggtggttgaagttaccggcggggttgtttttgtctcgccgttttcattagagtga

SEQ ID NO: 385396 - DNA, 585 bp, Salmonella enterica
atggcgcgttttatttataccccggagatgaaggcctggatgcaggacaactatctgttgcggatggataaactgtccgtggcctttaatgcgcattttggcaccacccgttcatctgagtcgcttaacggcctgcgtaagcggcttaagctgcgaaccggccgtcgcggatgtttcactccggggagcattccggcaaacaagggaacccggggcgtcatgaaggccaacagggggagcttcaaaaagggaaaccggcccggtaacacggcctgcgtcggggatgaggcactgacggacgacggttatatccgggtgaaggtggctgaacccaacagatgggaactgaaacaccgtctggtatgggaaaagtaccggggagagataccggagaacggggttatcaggttcattgatgataaccggcgtaactgcgatatcgacaatctgatgctggtaacaaaagcggataacgccgtcatgaaccgctggtattccggctcatccccggaatacagacaggccacgctggcgatggcgcagataaaactggcgataacacgccggcagcgggatacaaaataa

SEQ ID NO: 385397 - DNA, 228 bp, Salmonella enterica
atgaaaaatggtcttgaggatttgcataatcatttgtttgctcaactggaacgcctgtctgatgagagcgttaaaggtgacgcgctgaaagaggaaatcagccgggcgagggcggtgtctgagattgccaggggaatagtggaaaacggcagtctggccctgaaggcgcagaagctgaaggctgacggggtaataaaaaacacgccccggtatctggagtcagaataa

SEQ ID NO: 385398 - DNA, 249 bp, Salmonella enterica
atgttcagtcctgttcagcgggggcaactgtacgccgatgataacggctggccggttactgtttacgacagcagtgtctgccgggtggtgtgccggcgggaggatggccgcctgtgttcagtgtccattcgtgagttcagtcaccggtttgaacgcctggagcaccaggaataccggcagataaaagccgaaatggagcaggaaagacatcttaaaacgttacgtgcgctgcgtgggaggcgaaaatga

SEQ ID NO: 385399 - DNA, 381 bp, Salmonella enterica
atgtcagtggctgaaaatctgatggcagaagccgtattaaccgattttgatccgaatatggtggcgtgcgggcgatgggtaaaacagaccgtcaggctgacgttcgggtgctggcggtacaggggaacatttgaagtggagttcaggggaaacgtcaccgggctggaagccattcgtaccgcagtggaaaaactgtatcaaagtctgccgtcagtggtggtgacggatgacgacgaccaggaatgtgaaatggaaatggcgacgattgagctggatggtattacctgcgatgacgatgaactgcgcggtgaggagtggctggccgacatgctcgtcagcgcggagataattcgctatgaaccggacgacggggggctttga

SEQ ID NO: 385400 - DNA, 285 bp, Salmonella enterica
atgagaaaaccattcatcatattcagcgatataaaatcactggaaattatcagaaacatcatccgtgaaacattactgggtaatagcatactggttttaattgcatccgtaactttttacataaatagtaacgactcatcatacctgatatacattatggctgacccgatattaataaccatcttcctgacagtgtttgcatggttaaccttaataatacatcactatcttcaggagccagtgaaaaataaaaattcattatcctttataatgtttttcatctga

SEQ ID NO: 385401 - DNA, 288 bp, Salmonella enterica
atgaataaagataatctttcctggtggctgtcttttctgttttcgggcctggtcagttactgtctctggttatggatgagtccgggctggaatccggagtatcttttcccgggaacgctttttgccgccatgctgtcattcactgctgtgttcggggcaacgttacatatgcagcagtattcggacaggttcatcgcccccgtgtttctggtgctcagtgttctgttttctctgctgtttgttgtttatgtatgggggctggcaatggtattttattcacagggttaa

SEQ ID NO: 385402 - DNA, 315 bp, Salmonella enterica
gtgtactggagcctttattttattaacgataaatttttgccggaatggccggttgtcaatatgaaggggttacgcgttcagatactggaggtcatggtttccgtggttataacgttattctttttcttttgttatgacaccagaaaacgcagggaggtgatgtgggttttcattacttttatgctgtcgctgcatattcttcactttttgctcccggcgctttatttctgttatgagtggaagtgggatggtgatgaacttctggtctggcagtttatggcctttactctcggtctccccccctggttcccgtga

SEQ ID NO: 385403 - DNA, 210 bp, Salmonella enterica
atggtaaattttatagcagatttagcagatataattgctttgttgcacggagaacatggcggtgtcgtactcgtcattttgtttttaggtacactgttctttatggggagtcttgtgattatagttctgactttagttagatttttttcatttgtttttagtttgctcagaaaagtcttcctcagatatagaaataagaaaatcaattga

SEQ ID NO: 385404 - DNA, 591 bp, Salmonella enterica
atgaaacgactgaccgaccaggaaatccaccggatgcatgaacgactgcaccggcacccacgcgtcacccgctccctgacgcgggatgatgcgctgcggctgctggatgaggttatctgccggcgcatggaagagcggcagccgtccggcagtctgtcccggtggttgtccggccccggtaacggatgttcccggtcaccggaagccacaggcaggctgacgtggctgaaggaccacctggcgcacgttgtcaccacgctgggcgggctgtacctgtatccgttctccgcatcatgggatgcgctgctttgccggttgctgaatgagggcatgattgccggcagcaatgtttacacggtgacgttcgtgctgaacgggcaggatatgacggtgtggcgggccggccggtggtatgccagcggtacgctgtttgcggttaacggcattccgctgtcagacaggcgaaagtggcgaccacgctttgccacgctgcgacgcctgcatgcggtggcagaacgatgcgctcatcagcagggaagcgggattcagaccggcgctccggagcgtatgatgtctgactccggacgctga

SEQ ID NO: 385405 - DNA, 279 bp, Salmonella enterica
atgcgtaacacatcaacatcccttcttccggcacggattgccgcgctcagcctgacggaacatcatggtgacattctgcaggcggtcgacggattcatcgtggagggcgggctgaacattcgccagctgaaacttcatgcccgccatacccggaacaggctggccgccgccgggattgcggtaaaacttaaccatgcactggaactggtttcctgtgtgcacggcttccgggactggcaggctgcgctggcaggtctgcgggagcgggacggcgtatga

SEQ ID NO: 385406 - DNA, 651 bp, Salmonella enterica
atgacacaacctgccaggaaaaaagagaccgccacacaactggcgttactggaagcggaactggcggcagcccgcaaagtgacagccagatacagggccgcgatggagaaagcggaaaaacgccatgaggcagcggaggaggcgcaggctgacgtgcagtaccggtatgactgtgcccttgtagcttcctggggcgacacgcctgactggctgacgctgctggacggtgatgaagaccggagttcagtgatgtatgagctggcgtgcgaggggctggaacgtctggggctggcgacatcgatgattaatatggaaaccgggcagcgtgtggtctggctggggttcaggacggacagtgaggacgaactgcagcagaagctgcgcggggtgcagtttatcctgccgtttgtgaaagccggctttaatggccagcgggaaatcagtatcagccacccgcagcgtgataaatttgcgctgtccctgatggtggatgcggggactcaggcggtcagcgtgatgaagcgggtgtgtggccgggaaaaagagcgcaccggttttcccgggctggaggcggcgcttcgctgtattcgcgacagccattcagacaccagtattgaggccggcgctcagcctgcgctgttaacatcctga

SEQ ID NO: 385407 - DNA, 891 bp, Salmonella enterica
atgaattcgacttacacagcactgattgcactgttacgtgccgggggaatacgtcccttcacggaaacattaacgaccggggaaactgaaagtacccagttttcggtcagactgcgtccggaaacccggatgttctttgatgcctgcgctgagcgtatggggatatcccgggctgcgatgtttggtcttctggccgacggcgtgatagccgaagtccgtaatgacacggctgataaggccgtgacgctgtacgaacgtttctgtctgctgctggacgcgcataacctggatgtgaccgcgcaggcccggctgctgaaaccatggggattccggaccagtgtgctggccagtcgtgagcgtacgctggacctgctggagcagccactgttacagcaactggcggactggtttcatgtggatgtggactggctgcggggagtctcaccgtcatcggttcgtaccggcggggctgatgctgacggcatcagcagatggatgatgctggcagatgatgtgcgcaggctgcctgaaacaaccggcccggctgagatgatattctgcttctgccgtcatggcagggagcctgtccgtgatgcgggactgtgtctgcggtaccggcggattatccatgatgttccggtgccggcggttatctggtacggaacggcagtctgggatgaggcggacacacaggaagtgtaccgacagctacagtcgctcatttcggtgtcatccgcagggcatccggtcagacccccacaggaaacgtacccgcagatacgtgggcgttatttcagactgaccgcgcgacagatgcagggactgtcccggggggaaatactgcccgtgatggcgctgaataatccgcaggggcaatatccgggaatataa

SEQ ID NO: 385408 - DNA, 468 bp, Salmonella enterica
gtgatttttgtcctttttttgttactggcgttgctgctgtactgtccctgctacacgctgcagtccgtcatcgggcggcagaaaggattttcggtgttcacgcttcgccaccgggggtgccgctggcgggttatccatctggcagtacgcgaacgggtgggcagaatgaaccgccatcgggtgaagttttatcatcatgcctttctccgggcgctgaatgaggcgctgcagacaggggagccggtagtcttccgctcacacctgatgcgtcccgcgcaggtcaggctggcctgtcagacactgatgtccacccgcagacgccaccatattgtgacggtgaatattcctctttatgagcgccggctgatggcgctgctgatgctgctccaggaatggcggtttatccgggtacctgcgcagggtgtgatggtggtggtcagtccgaaaataaaaagggatatttcgtga

SEQ ID NO: 385409 - DNA, 165 bp, Salmonella enterica
atgaaatccgaaaaatccgccattaaagttgttgcccagtatctgcccgcccttattactgccgtttttgcgttccgggtatggtcagcgggacatatcatgtcagcggcactactgaccactttgtgttgcttcctggcacttctggcaattgctatggaatga

SEQ ID NO: 385410 - DNA, 600 bp, Salmonella enterica
atgaaacattttcccctgctgcctctgctgttcctgttctccctgctctcaggctgcgcgcctgcggttctcatcacctccgcctccgtggtcacccacacggcaacagacccccgcagcaccggcagacagattgacgacggtacgctgacgctgcgcgtcagtcatgccatcagcagtgccggactgccgctgcaggcccgcgtgaccgccaccgtgtaccaggggaatgtcctgctcaccggagaagttccggatgataacgcccgacagactgcttcagcggccgtcgtctccgtcagcggcgtcaggcatatctggaacgaaacccgtaccgggttccccgtcagcacagggcagaaaatgaacgatatctggctggcatcggatatccgcgcgcgactgctgctcagcccggataccagactggctgatgtcaaagtcgtcacagaaaacaacgaagttttcctgatggggctggtcacaccagaagaggggcagcgcgtggctgacctggtcagccgtatcagcggcgtcactcacgtcaccaccgcctggactttcacacaaataccggcgcagaccccgccagcgggttaa

SEQ ID NO: 385411 - DNA, 1140 bp, Salmonella enterica
atgtcgccatccgttcgcgtcaaaaaactttcactgttccgggcgctggaccgttatctggacacggtttcggttcacaaacgggggtatcagcaggaattctggcgcgtcagcgtaattaagcgtcatccggtcgcgcagaagatgatggatgaagtgacgacggtggacatcgcatactaccgggatgagcgtctgtcacaggtgaacccccgcacgggaaagctgatatccggtaacacggtacgtctggagctcgccctgctgtcagcgctctataatctggcgaaggtggaatggggcacctgccggacaaaccccgtggaaatggtgcgcaagccaaagtcgtcctccggacgtgaccgtcggctcacctcatcagaagagcgccggctgtcgcgttatttcctggcgcgtaacgcagagctttacaccatattccacctggctctggaaacagggatgcgacagggggagatattatccctgcaatgggagcatatcgacctgcagcacggtgtggctcatttgcccgtgaccaaaaatggcagcaccagagacatcccgctttcacgccgggcaaggaatctgcttcacgagctgccggtgcagctctccggcgcggtgtttcattataaatccacagggttcaaatccgcctggcgggtggcgctgcagagcctgaagattgaggacctgcattttcacgacctgcgccatgaagccatcagccgcctgtttgagctgggtacgctgaatgtgatggaagttgccgcaatctcaggtcataagtccctgaacatgctgaagcgctacacgcacctgcgggcgtatcagctggtcagtaaactggatacccgctgccggcagtcacagaagattgcgacgtattttgtgccgtacccggcggtactggaagaggccggcgatggtttccgggtacatctgcacgattttgaagggatgagtgtcagcggtgatacgcgtgaatcggcgatggatatggcttcggtggtgctgctgcgaactcttgcaacggcagcacagcggggtgagcgggttccccgcccgggagacctgccattaaatgccggggtgatgattaacccgctggcggggtctgcgccggtatttgtgtga

SEQ ID NO: 385412 - DNA, 1572 bp, Salmonella enterica
atgttcaggcggattaaaatttcttacggactcatcgtggtccttgttctgttgacgcttatccagattatctccggttcatggagcgtcatgtcatatcttgagtacgataaaaatatgcagcgtaatgcctttcaacgaacccgtcttgctttactggatgaggcttataccaccatttcagatacgcggggtgatgtctggaaaatggccgttcttacgtctcaggggcggcaggatgaccatttccgggaaaaactgaacgaaatgctgaaacggtatgatgaggccagccgggtgatggaaaaatattatgtactgtccgcaaagggaagcgaacacgatattcgccatgctgaacagataaaaagtctttatcaggctgcccgggactcccagatcaacagtatccgcctgctggaggcgggtgattttcagggactggataacattgcccgtcagggaaacccggctgctgattttctcgatgccgtaaatcgtactgaagatgccatcaacaggtttgtcgtcgggccttcactggcaaaatccgccgtgattgtccgtgaaggcattattctggcgggggtgttcgctgttgtgtttattctgctgacggcaactgcggcgttgtggtgccggtggtatgtcattggcagtatccgcaggctggcaggataccagcagaccattgccggcgggaatttgtccgtggacattccgcttgtaaagggtaatgagctggatgacctgacggccggtctttcctcgatgcgtgattccctgagtgaaatggtgataactatccgcgccggcgcggagagcattcacaccggaattcaggatattgctgacggcaacactgacctgtcttcccggaccagccagcaggctgctgcgcttgaggagacagcgaccagcatggagcaactgaccgccacggtgaaaaacaataccgataacatccgtcaggtgaccggaatttcggcggccagtgccattactgcgcaggagagcgcggccatgacgaccagaatggtggacacgatggcgcagattagtgaaagcgcgcaaaaaatcaacgacatcatcggtctgattgacggcattgccttccagacgaatatcctggcactgaatgctgctgttgaagctgcgagggcgggggaacagggtcgtggctttgcggttgttgcatcagaagttcgtcatctggcgcagcgcagcgcggactcggcaaaagaagtcaggacactgattgacgagtcaggggagcatgttcaggccgggaatgaactggcggagaaagtccgccgtatcatgagtgaaatagcggaaaatgccctggggacaaaatcaacaatggaggaaatgctcagttgtgccgaagaacagagccggggcattgaacaggtgcgtattgccgtgtcggagatggaccgggtcacccagcagaacgcggcactggtcgaggagtcagcagcggccaccggggcgctgacgcagcagacaaacaggctgacgcaggtggtgtctctcttcaggactgaacggtcaacagccggcgcgtga

SEQ ID NO: 385413 - DNA, 1299 bp, Salmonella enterica
atgaaaagagaacgacgtattacgggaccggactgcggttttgccatgatgagcgtggcggtcgcgctgctgatagtgatgatgatggcgacgatggcgtccggatatatgtcggactacctgaagtcccggcagtggcagttgatggcggcacagacgaaccggttcacccaggcggtggaatcctatgcagggcgttattacacgaacgccctggcgtcagccaccaccacccggccggtgaccataacggcgcagatgctgaagaacaccggatttttaccggcgggattccgggagaccaacagcaacgggcaacagcttaaagcgctgctgatacgtaatgctcagcatgcggaggtgctgcaggggctggttattacctcgggtggtcagccactgccttataaggcgctgcgccagatatcgctggatatcagtgtggggctcgggggatatatccgcgacggccggacggcgacaggtgccatgaacagctggacagtgccactggccagttttggaaccagcggcggtaacggtcatattgcggtgctgctgagtccggaaacgctgacgggggcgcgtgaagacagcgacaggctgtaccgcttccaggttaatggtcgtccggaactgaataaaatgcacacgtcgatagatatggggggaaacgaccttaacagcattggggtggtgaacggaaagtacggtaattttgacgtcagcgtggtgagtaacggccctgtgacggccggtggggatatccgcagcacaggcggggggataatctcgcgtcatggtcgtggctggatggatgagacacacggcggcggattttacatgacggataatgaatggatcctcagtctgaataacaaaagtatttacaccggcggtcagctaaaaggaggctcagtccggtctgacagtgacctctccgcgggtggggttttaaaactcgataagacgagttatgccggcacctggtgtctgcaaaacggggcgataagccacgacagctccggggggatactttcgtgccaatccggtcgttggcagaaagcaggaaaaacgagctggagagtaggaggcactttcaccgtctggcctggtcagactcaaactttaggacgattcaaattatgtataaacacataccgtatagacggtcgtgaaatggcattgacgcaactggttcccactgatgcgcctgatgctgatggcaacatgaactggcaggcgtacaacggcacccagtatcctgcatactacatgggaattcattgttttatttaa

SEQ ID NO: 385414 - DNA, 675 bp, Salmonella enterica
gtgaaaaccctgatagccacggcatttccggtggaatatgcgctgccggtgatggtgagtgctgccctgatgtctcgcctgattttaataccggtgcgtcgttttctgaccgggcagggctgtggcgtgaacgcccggctgcgcacggcggaagccacaggcatatgggcaatggcggtagccgcgatgctgttctgcctggcgcaggctccgctggccgaacgggttcacgccctgctgatgtcggggtttctgctgcagctgggtgtgtgcgacgcggcaagcggctggcttccgcggcagatgacggtggcgttcctgattgcgggactgctggcctcagcgataacggaacagcctgtcgtcctgccggtacatggcgttgtgatggtgctgatattcgtgattatgcagcgcctggtgatgcgcaaaagacaccaggatacgtaccagcgtctgggaacgggagaccagtggatgattgtcgggatgacagcctggctggatttaccggatatggcgatggcgctgataaccgcgttcgcgggttttgtggcctggcacctgacggtgggaacggggatgcgcggaggtggtccgctgggaccctggctgagtgcagggtgtgtactgatattaattcaccggctgtaccagccgctgtgggtgatgtga

SEQ ID NO: 385415 - DNA, 555 bp, Salmonella enterica
atgaatgcactggccggaactattctgggggcggtagtgggtggaggatgctccattctggctgtctggatgacattgtatgtagaaagaaaacaacgccatatatcagacagaagagaaaaacaggcgctgaccggggggctggcagatgaaattgactgtctgttcggtatgtataaacaactggtttatgaaccactggaagcagtgaatgagggtgacattctttgggtgcgattttatgcccggcaacgttacttcagcttttatgaagcccgcgccggggatgtgtcaggactgtcgccggaagtccggcggtcagttatccgggcatacagtacggcccgcagcatgctggaagggctggctgtacatacctcactgctggaaaaatacgaagaaatatcacagtcggccgggaaggaagaaagtacagccgacatccttcggcaacgactgataacaaatacccggcaattgagggcgtttcacggagtgatgtgtgcggtaacggaacagacactgacgcagctccgccaggagagcacccggtga

SEQ ID NO: 385416 - DNA, 375 bp, Salmonella enterica
atgagcagattcacaactccggcaatccttgaaatgctgggccactacaactggcgcgtatacgagccgtttgagttttacctcagcgacgacaacagcgacgtaatagaagtgccggttggattcgttaccgaccttgcgaccgtcccccgcatcttctggatactgttaccgccagacggcaaatacgctaaggccgcaataatccatgactacctctacgacaatgctttacgtacaaaatatgaagcagatcgcatttttcttgacggaatggcggtgctgggcgtaccgaaatggaagcggatgattatgtactgggcagtgaggttatttggtcgtggaaattacacggataaattacagactttttag

SEQ ID NO: 385417 - DNA, 453 bp, Salmonella enterica
atgtcagccagtcaatctatcgactggttgtttttttatggttactggtattctgttagtttttttctgccaccaggtttatcagcagtatttttcataccagtattcgcaacaacgtggtgtgtggcgattatttggctttactggttattgtctcagcaggtttgcccgccaccacactccgataccaacatcaaatacgtttttcttgaagacatttttctgttgacttccactacctgcaggcacgaaaaaaagttgttcctacttatccatagacgacaattatcaggcatcatgttgttactgcgatcagttttctgtgaccaagaacatcccgtgtttttcatcgtgaacaggattgatttagtgatatcttcatatggactgagttgcatttttcttctgttactcttctctgtggttgttattgtcacagaacgttacttttga

SEQ ID NO: 385418 - DNA, 939 bp, Salmonella enterica
atgagtacgttaatccgaattaatgtcacaaataacagcccgtttttacatactttcttctttttccagcagccgtctgtctattccggtggttctgaggttttttctaacagcctgttgtccactgccattcttcctgcggctcagggcggcagtgtttatacatttttactaaatcttcagtattatgccggggtacaacaacgccatggacaacctaccatcggccagccctccggctacgcttctgcaatacagtcgatagaactcacgcctgccacaggaacggtgaataactgcaccacaatgatgaatcaacccgcactgggactgaagccgccggtgaatgacggtggtgtgcagaaaggcgcgttccgtattatatctccgtcatataatcctgcgcttgaagagtataatggtggttcggctgtgcgtatgatggatggttctgtggtactgtcaaactttgtcaccgttaatccgggcagtaacctggactgtcagcctgttctgaagttttatgttcagacgggagaatatacagccgggaccgttatgaatttcaccagttcatcggttaatgcggcgctgtgtgatgcaacggaaggacataccacatttaatgttgtatacaatgctgatggtacctggacagtcactccgggtgtaagcaggatatctgcaaaagctgatactcacggtaatcttctttttgacgagcaggatctcaatacagatatttataatgaggcgggaacggcaatcatatgtcgtggatatacggatgacaggttttctccatatacggttactaatttaactcaccctgggaatatacatattcaaggagcatatcagttatccgtgaatcatggagaccgtatcggaacagactgtacaaatgtgaatggaactacagcacagttcgtccactaa

SEQ ID NO: 385419 - DNA, 483 bp, Salmonella enterica
atgaaaaacgttaagattatggcagtggccgctgccctgagcgcagtgatgaccggttctgtttttgctgctactgcagtaggtgggcaggagctgactattagcacgaccttcaactcgggcgcagtaagctatgcagaagtacagtcagagcacgtgtctattgttagtggtaaatcattagcggcagatacgttgctggcgaaaatcactaacctgcctgtgggcgcaaagcttattgatacaactgcaggtaacaatagcggtcagattttgttcaccaaagttggtgataatagcgttacgttcccggcaacagttaaggatgcttcagataatgtcctttctgataatactgccggaaccaccgccagtgtttatgacggtgctgcagtggtttcagtgaaaacagcggctgtaattaataatgcgcaaccaggtgtttacacatcacagccgactgtttacacatatacggattaa

SEQ ID NO: 385420 - DNA, 189 bp, Salmonella enterica
gtggggtcgctcgaccgggggctggaaaatctgaaaaacgagatggagctgcgccgggcggtcagcagcaacagcctcctgaagacgctggaacgccaggaaatacgtaacagtacgaaccagctgatacagaagggcaatggtgcggatgaaaaaatgggcgcgcttgagcagaaggacgataaatga

SEQ ID NO: 385421 - DNA, 402 bp, Salmonella enterica
atgatgaaaacgccttttctgaattcagttgtttccggaacacagcgtgccggccgctggctgatacagggttcatcggtgtcactgcgggtactgttgtggggtgtgctgctgagtatgctggtgatgctactggtggccattgtgctccgggacccgcagggggacgcggtccggcagtggcttttccatgcacgctggtcgttactggcctggcggatggtgctgtacgctgtcctggccgatttctggctgtggccgggagagctgcgccggtggtacctgaaacagctcagggcctccggtcacccgaatccccgtttcgcggtgttccgtacggaaattattcccgtcctgctgatagcgctgtctgaatacagcacctgggcacggatatcctga

SEQ ID NO: 385422 - DNA, 1500 bp, Salmonella enterica
atgaccgcgaacagtattattgaatacattctggtgttcttcggctgggtgctgaataacgcgatgtggaacatcattttcggtaccgggttatatctgctgcccctggtgttcaaatgtacggccgtctggctgaagacccgggaagaaggatttgatgaggggaacaaggggctgctgttgcagccccggctggagcatgcgctgtatgtgccgtatctggtgattttattctgtatcctgccggttgcgccgatggatatcagtaccatgaagtttgacagcagccgggcgaaacagtgccatgtgtcggtggccagtccgcaggactctggctacagcacgctggtgaatgatatggggggaaagacggcgagtattcccgtgtggtggtatctggttcaccggctgtcgaaaggggtgacgcaggcgatgacggcgtccattccctgcggggggcaaatccgtcagttgcgttttgaagtgcagcagagtcagttgagggacccgatactggcacaggagctgcaggagtttgccaacagttgctatgcacgttcttactacaggctgaaaaacagcaatccgtccctggataaaaccatagattcggtgggctggattggcagcgactattttctcaaaacggaaggctattacgacacctacacctcgaaacagccgaaaaaggcgtggacatggaatgaaaagcgggatgcggggtatgcgaacacaggcgacggcgggtatccgacctgtaaggaatggtggctggatccgaagaaaggacttaaggaccgggtactggccagtatgtcaccgaaagtcactaacgacttacgccggcaggtgggtaaaggctgggaggaaaccgcgcttcgctggctggtcagcccgcagaacgtccgccgttcggtgggaaatgacacctatattctgggcagtaatgataactcagccgggggcatcggtgtgcttacccgggcggggacgacgcttggtgtggggctgaaacagctggacacgcagccggggtttgatgcgctgaaactggcgctgccgatagtccaggcgctgcttgagatgctggtgattgtcagtattcctgtgttgctgatgttcagtgcctatgagcctaaaaccattgtgaccatcacctttgcgcagtttgcgctgatatttatttcattctggtgggaagtggcgggatggcttgacgacacgctgctgaagatgacctacgacagcatcacggattttacaaagtcagtgaacgatggctggatcatgaatattgttctgggcacgatgtatatcgcattcccgttgggatggtttactctgatgggctggacgggagttaaaattggcaatcttgtatcaaacggaatagataaagctggatctatgtctgaacaggcaggggcggcaggccctaaagcagctgaaggtgcagcaaaagctgtggtgacaaaaggaaagagtttaatgaagaaatag

SEQ ID NO: 385423 - DNA, 255 bp, Salmonella enterica
atgaataaaaataccgtgaaacgttcctgcactgcgggtatccctgactttttaccgcgtcagaaagaccagaaaaatcagatacagcagaaagaagatatgtggcctgaaattaatccgtggaatgttatgttctctgtacttggtatatgtgcaacggctgttggcgacactttatcaaaacaaacgcatgaagagtatgaagtcagattcaatcccaaaactggtcaatatcagtacactccattttattga

SEQ ID NO: 385424 - DNA, 291 bp, Salmonella enterica
atgccggaagaaaagcgtaaaaccccaaagctgcccgaggataaaatggcccgggaactggaatccagaaaactgtggcgaagagctgttggccgctggcgtcatgtcctcatcgaaacggaggatgccctcgttgctgaacggattatctggcgtatggcctggtgtcagcagcagataccacaaaagcgtccggggttgctgatactgacagcaaatgacctgcgtcatatcgacagggtcgcccggaaactgggatgcggacccattgcccggcactggatagaatag

SEQ ID NO: 385425 - DNA, 282 bp, Salmonella enterica
atgaatctaaaatcatggctgttttttgatacgatgatcaccccaaagataatcaggattgtttactggatattattgttcctgactatcatcagtggtgtatttggaatctttattaatccggttagtatcatcgtgaccattatcagtatcatattcctcaggatctcatgtgagatggtcattctgatgttcaacatttaccagcagataaaaaaaattgctgacaatatccctgttaaagacaccgggcgctccaggacactcagttcagacgagtaa

SEQ ID NO: 385426 - DNA, 312 bp, Salmonella enterica
atgaaacaacactatctcaggatcaccattctggccggtctgctctattctttcatgatttccggcgtgatggctggttatgaaggatgcgggtataaacgtcagcaacttgaacatcagctggaatatgcacaggcatataataacgctcaccgggtggctggtctgcagagggcgctccgccagattaatgaacactgtactgacaaccggttactgacgcaaaaagaaaataaaattgttgagaaaaaacgaaaagttgcagatcgtcggcgggaactggatgaagcccgaaacagattaaatcattaa

SEQ ID NO: 385427 - DNA, 480 bp, Salmonella enterica
atgacgattcatatactgtcgccgcagccgttcaaccagatagcagccggggaagtggtggagcgtcccgcttccatcgtgaaggaactgctggagagcgccatcgatgtcggtgccaccaacagcaggattgatgtggaaaagggcggggcgaagtgtatccgggtcagcgacaacggctgtggtatcagtaagaatgatctgtccctatcgttgatgcgctatgccaccagtaagataaccactctggaagatctggaaggaatcgccagtctgggattccgagaagcgttggccagcatcagttctgtatcgcggctgacattgatctctaggacagcggtgcaggatgagggctggcaggtttacggagaggggaggggtgaggaacactggctgatgctgcaatggtgggctgattttctggatacaaatggagagaaagtcgtgagcccatttgactttgcaaaaaatcaataa

SEQ ID NO: 385428 - DNA, 1605 bp, Salmonella enterica
atggaagacataaaaacagacgttgtcatagtcggtacggggatagcaggattatctgctgcttaccatgctactaaaactggcctgaaagcgattattgtaacgaaaggtcgtatcggaggaggagctagctttttccccctgaaggcctcgcttggcatacaaactacaggtggtcacgaagacattccggttttcttaagagatataatggaagttgctgatggtatgaatgatgccgaactggctcgtatatatgtcagggaatccggagcatgtataaatacgcttaataaaataggttttgaaccctggctacggagcgataaacgaccagcctgcttctcccctcatgcaagaaatatctggttgattaatggctgggaaaaagccagaaataaggcccgtgaatacatccggtataaccaccttttcttcgaaaacactcaacttttaaaagtcataactcaggataatcaggttcagggggtgtttattctttcggaaggagagatcatcaggatccagtgtagctctgttattcttgctggtggtgggattgccggcctgtatcgtcataacttgtatccatcagatattactggttccctgcacagtgtggcactggatgcaggtgccagtcttgtaaatatggaatttattcagtttatacctggcattaccgcccctaaatacaaggttctttttggagaacatacgttaaaatatggaatttctttattcaacgaagacgggaatgatgttcttgatgaatataataaagaagaaaaaaatgccatacttcaggaaagaagtgggtatgcgccattcagttgcaactttaaatccagcataatagatataaaactgcatgagtatagcataaacaattcatctgatttgatgattaaatacagtccatctttgtacaaagacaaggatgagtttttttcagtttaccttaactggctggaaaaagaagcaggaatcaatctcattaatacacctgtcacccttgcaccttttgcacacagctgtaatggaggaataaaaattaatactgattcagaaagtagtgtggaaggattatttgctgttggtgaaatatcatcggcgattgaaggcgctaaccggatgggaggaaattcggttggcgcatcactggtatactcaggaagagcaataatgaaatccctgcaatataagggtaaaaatcttcgaaaggtttcatccgaaaaagaatcaacaggattaataaacagggaatcaaatttacatctcagttctgatttttcagcactgcgggaaatgatgaccagaaatgccggcattgtgcgcaataaagaaggtctcagcaaaacattagaatatgttaattcattaatacacccgttacataatgaaaaacatacagagtattaccactctctccggacagcaaaatcgatgttactcgccatgctggcaagaactgaaagccggggagcacattacaggaacgattacccgaacagggataaccataactaccgcacagaaatatctttcggaaaatacgacaaagaacctgtagtaaagaaagtaattactgagaaggatttttaa

SEQ ID NO: 385429 - DNA, 1476 bp, Salmonella enterica
atgaacagtgataatatcatcccatggtataaataccttaaccgttctcagtggcgagcctttattgccgcctggctgggatatttactggatggttttgactatataatgatcgctctggtattgacagaagtccagaacgagtttggtctgacaaccgtcgaggcggccagccttatctccgcatcatttatttccagatggttcggtggtctggttctcggagccatgggagatcgatatggccgaaaacttgccatgataaccagtattatattattttcatttggaacactggcgtgtggtctgtctcccggatatgtaacgttgttcattgcacgtttaattataggaatgggaatggcaggtgaatatggtgccagtgtaacatatgtggtagaaagctggccaaaacatctgcgtaacaaagcaagtggttttttaatttccggatattctttcggtaccgtccttgccgcccaggcgtacagttttattgttccggtatggggatggagagcattattctttattggtattgttcccattatctttgcgctgtggctgagaaagaatatacctgaagctgaggactggaaacaggggaaagaagaaagggaaaaagcatttacgatggttgaagtactttacaagggaaaatacaaattcctcaatacaatactgaccattttcgcaatgactgccctgtggttatgttttaccggcgaagtcaacagttatggtggaattgctgttctcggtgttatctgtgccatcatttttatcagttttatggtgcagacaggagggaaaagatggccgactggcatcactcttatgatgatagtcatgtttgcattcctgtacggatggccaatccagtcccttcttccaacatacctgaaaacggagcttgccctcgaaccatcaacggtagcaaatgtcctgttttttagcggctttggagtggctgtaggttgttgtgttggcggatttctcggtgactggctgggaacacgtaaagcgtatgtctgtagccttctggcgtcccaggtgctgattatacccgtttttgcaacaggtggtggcaacctctggttactgggacttttgctgttcttccagcaaatgctgggacagggaattgcaggtattctgccaaaattgattggcggttactttgatactcatcagcgtgctgccggacttggatttacttataacgtgggtgctctcggaggagcgctggcaccggttattggcgcggccatagcccaacgacttgatctgggcacagcgttaagttcactctcattctgccttacttttgtggttattctcctgataggactggatatgccctcaagagtacagcgatggattcacccggaagcgattcgtactcatgatgcaattgacgggaaacccttcagtggcgcaatcgtatcgaaggttactgactcgcagacaaactaa

SEQ ID NO: 385430 - DNA, 1128 bp, Salmonella enterica
gtgaaaaaatacaaaatcactctcttactctcattatttcctctgatactgaatcaggcacattcagctgaaatttataataaagatggaaacaaagtgcaactttgggggaaacttaatgcccttcattacttttcagataacaaaggtgtggacggggacgaaacatttttcagaatggggatcaatggtgaaacaaaaatttcggataccacagatggttacgggcaatgggagtaccagattaaggcgcaaaacccggaaaactcaaatacacataactcatggacacgtcttgcattcgcaggattaaaaatagatggtgttggttctctggattacggacgaaactacggtgtactttatgatattggcgcatggacagatgttcttccagagttcagtggcgatacttataacgtcacagataactttatgaccggaaggaccaataacgtactgacctacagaaatcataatgtttttggtataaatgccatgaatcttactctccagtatcagggaaaaaatggaggcacaagtgaaacaaataatgggcgtagtgtaaaaaatcaaaatggtgatggatttggcatttcagggaactatgaaatacttccctcgctcagagcaggtgcatcatgggccagttcatcccggacgcaggaacaaaaagggattactgatggtaaaaaagctcaggcatggaatgttggtatcaaatatgatgacggacatacctatctggcagcacagtatgcagaaacacataatatgactccctttggaaactttggaaagatttcagacggacaatatacttcagccggttttgcaaaaaaaacacaggccacagaggttatagcagcatataactttgattcaggtctggttccttatatcacttacagggtgtcaaatgctaaaaacacagaaataaataaaatacagtatggttctaatgacatcgtaaagtatgttgatgtagcggttgcgtacaacttcaaccagaatatgaaaacatatattgattataaaataaacctgctacgggataatgatttcatccgaaaaacagggatctccactgataatatactggcattatctttaatgtataagttttga

SEQ ID NO: 385431 - DNA, 255 bp, Salmonella enterica
atgctggggcttggagcctcatgccttgctgacggacgtacagaaacgtctgggcccgaagatcgtcccgaggaagaactgccgccgctggggggcatcttctcagattatccgtgcatgatactgaccgggagtcgctttcccggtcagagttccccggcaagtcccgacgtcagaacttgcacgcttgacaccgaaaagaacggggccccgctcaccacggggattcagcgcggtacaaacctgattcagtag

SEQ ID NO: 385432 - DNA, 429 bp, Salmonella enterica
atgataaagcaaatacgccagcagagtgtttatattgtcgatatagccagtcaggtcggatgttctgagagaacggtcaggcgcctgcttaaatttccagagcagccatccaggaaaacacgccataagatgggcaggctgaagccgtttatgaactatatcgacatgcgactggctgagaatgtctgtaacagcggggtcatactcaatgaaatcaaggcgcagggtcataccggtggacgttccatgctgcgttactacatccaacccaaactgtcggggcgcttacacctgcagccagtcgacatcggcgataagccagttaaattcgtcgggagtgaggtgccaggcagcgttatccgaacgtggccagcggaagctgcctttagctatgcgcagcagcgggtaacttctgacgtgaagtgttag

SEQ ID NO: 385433 - DNA, 4977 bp, Salmonella enterica
atggcagtggaaaataaatttaaacttaatattatagccgcgtcagtactgatggggctgagtctttctgtggtggcatcagctcaggcagcaggttcagtttctgcggcagaaaccacaccggtcaaacctgaagtgaacagacttgcagaactgaccgctccgctggaatccagtaaagttaacgttactgtggagaattttaatggtggtagcagcaccttagctgatgtcctcgataactcaaaggaaggttccgttgcgaagctgggggcggcctatcagtcggcgaagactacatacaatgcgttgactctggcacagaaagaaatcataacaaaactcaatacgactactgcagataaagaggcagcaacgcagaaatggaatgacttcggtaatcagctcaaagcggctgatgacgtttataccagtaacctgaacagcctgtacggtgcaaatcataatgcttttacaataggaagcggtggtgccattaccccggataccaacaagagttcaacatatgatgaatttctgacagcttatcaggaccttgcaggtaaaaatgggaaggttaaagcactgaacgatgaaatccttgagctgctgaagggtggcggtcatgatggtgaatcggaagttaacatgaccaacgaagccaaaatattggcttactccagttaccttcagaagtatgctgacctgcaaactgcaaaactgaaggctgattctgtcagaaatgttgtcattcagaatattgccggtgttctttctgcagttgacgccagggcagatgaagacgatgtgacaggtaaactgaattccttcagagacgcatttaatgcgtggaatggtaataaaactgccactaatgagaacgcgcttgccgctgcatttaataccctggttaagtcctccgacttaagcggcgtcccgggtctggacacatggaaagatgctgccaaagcatggagtactgctacggatggtgtgaaaagtgcagaatccgccctgacaacggctggcacagtaggtggaatgaatactactatctctgagcagggttcgagtgttgctaacgtagctaacaaaacactggaggatggtgataaaccacaaaactttcaggacgctctgaataaactgaaggccgcatacacggagctgcttaaagatggagcatttaaagacgatgttgacccaataaaagcaggggcgttgtctggattaattgcggatgttcagggtgcccaatccacactggacggattaaagactgagtatcaggctaaagtaaataaaattaaagaggctggcgctgcccgcctggatttgttgctgaatgcactacccggccagcaaaaggactttttaatagctcagcagaactatctgaatgcgctggcggcgtacaacaaatccgacgataatgatgcgaaagaagctaaaaaagccctggaaggcctttacgggggaaacaaagacggaacatcgggtgccctgcatgattaccttgactcgctgaaaaatacatccgctggcattgacagtgctcttaccactgcagcaagggcttatagaagcgtcgtgagcggtgagggcaaaacccagcaggagaaaaacaaggcactttacaaactgattagtacgcagaaaacgctggtcccggtaaaactgcagatggatactgaccgtctgaatcttcttcagtcagctcctgctgatgcaatcaatggtctgactgcgctgaaaaatgacctgagtactgctgctgcgaataaggctaaagcaaaagctgattacatcgttgcggtaaaaaattaccttgccgctgataaggcatatcagacatcaaaatctgaaactgatgctgcagaactcgccacggcaaaggctaagctcatgacggttgtcgggattagtaaccctgatgacatcagtaagttgtataaggctgaaggcaagccggaaagcggctttaagcagtttgataagctgtcggccctgtcgggcgataacagtgatgtcatcggtaagtacaatgctgcagtggcggcgctggctaaaacagatggtagtactgaaatccagaaagcccgcgctgaagttgttaaaagcatgaaaacaattgccggtctgatgcctctttcctctactgaggagcagaatagtttccgtgccgcgtacaacaacgctctgaaggaagtgagtgttaagtccacgactgctgatgagcaaagtaaggctaaggatgccgggaaagtcacgcatatcctgggcagtctgtccggcgaggaaattgctaagtttgatgttaattccggtaactataaatccatcattgttaacgttgataaagaaggcaacatcaccggcgtgaaggataacttcaccggggaggacctgtacaccggcagcaaggacaagccgttcaccaccactgttcttgatatccgtgccctggagctgggtaacggcgataaactttctgacaccaacaccatcaccgtgggtgaggctggtaccaaagacaagaaagccactccggttgaggtctgggctaaaacggcgggtgctaaatgggataaggatgccaatggcggccagggtgcgtatgataaatcaggtaacggcccggctgtaaaactgtccggtgagctgagaactgccaccgcagcgctggatgagaacggcaagccggtggacggacagattgtccgtggcgcagaccagattcatctgcagaacgttaacatccacaacagcttcacgcttgatgataaagtgaagatgctggccgatgatgttgctgcactgaaccagcaggcggcggataagcttgccctgagtcagccagccaaaagtgacagtgaacatgacatcgagggtgtgaacgactggctcagaaaacagaatgacttactgaacggtaagtacgacaaccttcaactgaccggcctgcagattgacaccaaaacagtcaatcctgagtttaagcttggcggggataacgccggggagtttgttaataccgcagccactgtggcaccgacagacgctaacatcctgctggataacatgaatatcaccctgcagaacgacagcgtgggcggcacatcaactgcgattgacctgtccggaaccggtaaccacattctggctaaaggtggcgtgttcgacgccggtaaagcagataatctgaaacaggcaaacgtccttgatatcactggtgaacataacctcattgagtttaacggttccgttctgaaaggtgatattcgttccggtgtttcagatgaccaggaacacgcaaagacgtcaatggataacaccgttaatcttaatgatggcagtctgaccggtaatgccattgccggcacaggtaacctctaccttaatctggaccacagtgtctggacgggtggcgcaggcccgaacagtccggatatcagtctgagcaacaactccgtctggaatgttaaagattttggtagcgaccattctgatgatgtgaacggcccatatgcttccgtcagttccctgtccctgtatggcagtaacagcattaacctggttgatgcgggcggactggcacaactgggcggacatggctttgcaggagagaagtctgcagtcaccctgaaggttgaccatgacctgaccagtgatggcaagggtgtgacttccgttctggccggtacctactcaccggataatcttcacagcctgacgaataccggtcgtgctgacggttatcagttcggtacccttaaagtggacggtctggcgacgggtggtaagtatgccctgtccgtggaaagcgccggtgctgaaccgtacaccgtcggtggtcgtctggctgatggtcctggtgcaaccagcgctcatgaatttgtgtcatacaaaacggctgaaagccgtccggatgatacgaattcttcagtactcaagtcgaagccatcaacggctgacttcaccagcctgagtgctccggccgaactgggtgtgtaccagtacgccgctgagaaggtgatggacggggtgaacaaccggacaaacatctactacagcagcacaggtaagctgtccaacagtgccgctactgttgtttccctggcggcagcgccggttgatgtggcgaacctgcagtctgacaccctggcgaagcacatgaacagcgtgcgccatggtaaggattccggcgtgtggctgtcctacttcggtggggagaaccgtaacaccacggcagcaggtccggaatacaccctgaagactaacggagtcatgctgggtgctgacaccctgacagagaacgactggctggccggtgtggctgtttcttcagcccgctcagacatgagcgtgatgaacagcagcggtgacctgaacagctacggtgcgcagttctacatgtcccgtcgttatgacagcggtgtgtttgtggacagtgcgctgcagtttaaccacttcagcaatacagccaaagcccgcatgattaacggtcagcaggcgaaggctgacttcagtggtaacagctacggtctggaagctaaggtgggttacgcctggaacagcgaaggattctttgctgagccgtatgtccgtgctgcggcccgtgcctttgacggtgagcattatgccctgtccaatggcatgaccgtgaacagcaacgactataagtccatgctgggtgaagtcggtaccgacctcggataccagtatgccatcagtggcggttacgtgaagccttacctgcacctggctgcgctgaatgagtttgctgacggtaactccgttcgcgtgaacaatgtttcactggacaacagcgtgaaaggcgccgccttccaggcgggtctgggtgctgaagtgaaggtaacggataacctgggtgggtatgcagcctttgattacacgaaaggcgataacaccgagcgtccgtggcaggccactgtgggtgtgaactacacctggtaa

SEQ ID NO: 385434 - DNA, 789 bp, Salmonella enterica
atgagaaaaatttatatttatggtgacaacccggaggttatcacagtgatacgtgaagggttaaaagacctcctgtgtaaccccgggtattacagtgaaaatgctgagccggtgtttggttatgccggtgttattcagaatgcgggagagcttctggagcgggtgcagaaatccattctgcctccggtggtgttactgaacattcagcccggcagaaatattctgttgttacaggctttgagggaaatccgtgaaggggtgggaattgctgtgttcagccctgaaataatgtatccggacagaattgtggccagatggtttaactgcacgctgaatcaggatacggatgtggctgaaggaaatatgggacgttacctgctccacgcagtgagaaagggacgcatgaagtaccgcagacagacagactgcacccgggtcgggctgctgataccggagctggcccggcgtatgacggagacggtgaaggagctggattacatactgcatatatcgttgctgtcggagtcgctgacgaaaaaggagaggacgatgctgtcgtatatccgggaaggacggtcggttgaacagacggctgcattaacgaaggcggggaggaatgccgtggggggatggtacaggaacctgtgtgaacggctgacccttcagtatgacaggaccgacctggcggaaaacttcacgctgtccccggacaggcagaacaatccgttcaggataccgggcagtacatgccggagaggcaccattaaacagacagaagggatattctga

SEQ ID NO: 385435 - DNA, 495 bp, Salmonella enterica
gtgggggcagaaatgaaccgcgtagctactggtgcgattgttgtgctgctggttgtcgctgctgcgctggcatggacaacggaccactaccacggtaacgccgtgaagtacaaagaccagcgcgacacagttactcataagctggcgctggcgaacgcgacaattaccgacatgcagacacgccagcgtgacgttgctgcccttgatgccagatatacaaaggaattagctgatgcacagaccaggaatactgatttgcagcgccgccttgctgctggtggccgggtgcgcgtcaaaggacgttgtacagtgccagccagcgccacacccgccagatccggcagcgtgggcgatgctgcctccgtcgagctctctgcagttgctggacgaaacgttctcgatatccgcgccggaatcatcagcgaccaggaaaaactgaggtatctgcaggattacatccggacacagtgccagcgtaagggcggaaaggaatag

SEQ ID NO: 385436 - DNA, 756 bp, Salmonella enterica
atgctggatgtacttcgtctgattgagaaacgtggttcgctggaaaaattacgcaaggtcaggcaattctgtaatcagatctttcgttacgccatcgcaaccgggcgggccacgataaatccagccagtgaactcaccggcacgctgactgcaccaaaaacaaatcacttccctcatctgacagccgaagaactccctgcttttcttactaagctggcaaaatatcatggcagcccgattacccgtattgcaacgaatctgttattactgaccgccgtcaggacgattgaattacgcgcagcggagtggtcggagtttgattttgataacgctttatggacgatccccgaaaaccgcatgaaaatgcgtcgtaaacatcttgtcccgctgtcaaatcaggttgtcgccctcctgcaggagctccgggctatgacaggtcattaccagttggtctttccagggagatgcaacatcaacaaacccatgagtgaagccagcattaatatggtactcaaacgtattggctatgatggcaaagctaccgggcacggcttccgccacaccatgagtactattttacatgagcagggctttaattcagcatggatcgaactgcagctcgctcatgtggacaagaacagcattcgcggtacctacaatcatgcgctgtatctggataatcgtcgtgagatgatgcagtggtatgcggattatattgacagttttgccggtttatcgccaaaggctaaagagtaa

SEQ ID NO: 385437 - DNA, 951 bp, Salmonella enterica
atgtcttcgaaatttgtcagcattatttatgagctactggatgatccgggcattaatggtcagaaagtggtggatgaactgactgccctgggagcaacagatgcaactgtcacaacaacgcctgtctgttatgaagccccggaaattacctcgcaggtttgcgattttatcaaagtcgtcattaaaggacgcaatggcaaatctgcacatggggaaacaccggcgccaaccatggggattattggtcgtctgggggcgcagcaggctcagccggtcagaaccggaaaagtgtcagattctgatggttccattgttgcgctggcgacggcgatgaaactgctggatatgtcagcaaaaggggcgcaacctgaaggtgatgtgattattaccacccatatcgcgacacacgtttccattacgccgcacgagccggtggattttatgggaatgcctgtttcatctgacacgatgaatgactatgaagttgatgatgagatggatgccattctttcggtggatacttcaaaagggaacagcattattaaacaccgtggaatagccatctctgcgacagcaaaggaaggctatattctgcgggtcgcccctgaccttgtgaaattactggagtatgcgaccggaaagccggcaaagacttttccgatcaccacacaggatatcacgcggtataataatggcttctatcacttcaactccatcatgcagcctcatgtggccaccacagcgccggttgttggtctggcgatcacggcgggagcgattgtacccggatgtgagaccggggccagctatgaaagtgaactgacagatgcgacagtttttgctgttgaactggcgaagcagtttacgcggaaaaaggcagcgttttacgatgctgatgaatatcagttgctgctggcaaggtatggcagtatgacggttctgcagggataa

SEQ ID NO: 385438 - DNA, 726 bp, Salmonella enterica
atgaaacgggcattactgatgagcagttcgcgaatggggcagctcggttatctcgggcatgcggaacagcagttacacatgctgttgcaacacgatgctcacgaagtattgtttattccttatgccgcagtctcctttagctttgatgatttcgagaatattgttaaaacggctttcgatcgttacgggtacgggcttaaatcgatccaccgatttagcgatccggttgaggcggtgaaaaatgctaaagcaattgccgttggcgggggaaatacctttgtgctgctcaaccgactgtatcagagtgacattgttgatttgatttcacagagggtgaatgaaggtgaactaccttatgtcggctggagtgcgggctgcaatgttgcgacgccgacgatccgcaccacgaatgacatgccagtagtacagcccccttcatttaatgcgctgaaaattacccctttccagattaatccacattttatttccgggaagcctgtcggtcataacggtgaaagccgtgaagaaagactgaacgagtttttgaatattaatcccggggaagaattgctggccttatatgaaggctctgcactttatattgaaaatcagcagggacgtattttaggtgaaaaagaggggttgtggtttcgtgctcccaaccagactgacaacattgagccgaatcagtcgtttgaattaaccatgattaaaggagctcattaa

SEQ ID NO: 385439 - DNA, 1197 bp, Salmonella enterica
atgacggactgggcatgcatttaccgggacactctggtgacagaacattatgcctattttgataccgccgccgccgcgccgccgccggtgccggtggtcgaagcggtgaaagcatatctcgataaaacggctcagctgggaatttatctgcctggttttcgcagggaggtttatcagaatattgagcggacccgcgaaaaaatggcgaagtttattcatgcgacggcaaaagaaattgctttcacgaaaaatggcaccgaatccatttgtctggttgcacgtggaatcgactggcaggaaggtgacgaaattatccttcctgataccgaaatgctgagtaacgtttcggtctggcatctgctggcgaaagagaaaaaactcagtcttgtgccgttgaaagccaccgctgaggggatgattgagcctgacagcctgcgtaaactcatcacgccgaaaacccggctggtcagctttgtggcgctatcgaatgtgacgggcgcggttcagccggttgtccggctctgtcatatcgcccgtgagtcaggcgtgctcagccatgtcaatgcttctcaggcgatcgggatgctcgccgttaacgttcgggaatggcagtgtgatttcctgtccgcctgcggtcgtaaagggctgcgtgcaatagaaggctccggtgttttatatgtccgtgaggagcgtattacctcaatggctccggcgctggttggctggtggaacagcagtgttgatgcacaaagtggagaagtgcagctccctgaaacggcaaaacgttttgaagcgggttgcccgaatgtccccgcgattgtcagtctggacagtgcgcttgattatgcaaatgacattggcattggcgtcattgagcaacgctgccgcgagcttacgcaatacgccctgagccgcctttctgaactgcccgggtttgaggtttacggtccggctgatgttcaactgagaatggggattatccctttcaacattaaaggtatccagccagacaaattaaccgggtggctggagttgcgtcagatcattattgaatccggacactttatggccagcaccattctccggaactatcagacagaaaaaatgggacgaatttctctgcattactttaatcagactgcagaaatagatcgtctggtttccgccattgctgaatttacgggagtacaacaatga

SEQ ID NO: 385440 - DNA, 1638 bp, Salmonella enterica
atgagtacaggtttttctgcaggtggagcccctccacacccgacggtgtcagtattcagacccgcattgtttttagtgatagtcgcactgtcttttctcggcgctgttatcggtattcagattattgtgacgctgggggtatctgcgaatacgtctgttattggtgccgtactcgctattttgttgtcccgtattccggtcacgatattttccacttttcgctctgttgatgcacagaaccttgttcagacagcgatttcctctgcaacattcgcggctgcgaatggtctgttgatttccattggtgttccatggggtctgggaatgcatgagcttatctggccgatgctggcaggttcagcgctggcgctggtgattgacggcacgattttgtatggggtttttaactcacgggcctttcctgcaaatggcagttggcccgccggggtggcgatggcagaggcattatgggccggaaatcagggcgggaaacgtcttggtttgctgggggtgggggtagccctgggcgctgccggagcctgttacggcattcccatggcttccgcaggtattgcatttatcggcagtttttttgccctgatgatgtttgccatcgggttgctggttcgtggatattcggaatcagggcttattcctttcaatctttatgaacactttgttcctcatggtttcatgaccggcgctggtctggtggccctgctccaggttggctggattgtcgttaaaaaacgccgggataccgatgttcaggataccgaaaataatcctgagcttgaattcagctctttgcgtcttaaaaaatcattgctgacaggtgtggtcttttacttttttactgcactgctgttaacggggctcacccggatatttacccacatgtcctgtccgatgctcctggggttcctgctgtttgccacggcggcggccctggttcaggaaatggtggttggtatggcagccatgcactccggctggtttcctgcaacggctgctgcgctgatatcgctggtcactggcatgttgcttggttttccgtctgaggcgctggcggtactggtcggattttgtgttgcaacaggaccggcctttgcagacatggggtttgatttaaaaacgggttttatgatccggggctatggcagggatttacagcgggaacgttatggccgcaggcagcaatatattgccgccatgacgggttttgcctgtgcgatgattgtggtggccctgagccatgagttctatttctcccaggacaacattgttccggcctcacgactttatgccgcaacgattcaggcagggaaatccagtgatattgcctcgatgttgctgttatgggcgctccccggtgcattgcttcaactggctggcggtcctcgccatcagactggcgtgctcttttcgaccggactgatgctccattatcccgttgccggctggacggtgctggtggcgctggcggttcgcttactgatggaaaaatttttccatctcagcagtgacaggctctcgacgctggcgggtggtctgattgcgggtgacgcgctgacatcggcggcgaaggcactttatccggcagcgaaaataaaatttcttaacatcataagtcactaa

SEQ ID NO: 385441 - DNA, 717 bp, Salmonella enterica
atggctaatattttacagtctgccggcatggttttctcgctgttaaattatttcaccctgcaaaagtcacaatggggagtgagagaactggcccgtgagaccggacgaagtccttcagtcgtacaacgggcgttaaacctgcttgagcaggaggggtttattattcagaacagtatcagcaggacctatcagctgggttttcgctgtattgaactgggacatctggccggccaggcgctggcattttcacaaattgcagagcagttgctttctccggttgttgaggaatgtggggaaactgtttttatataccgtcgccgtgctgatttcgcagtctgcagttttattcttgaaaaccagaagcattttcgtttcacagcacagaaaggtgatcgcttatttttacatgaggctccgttcacacagattgtactggcttatatgtcaggggatgaacaggcggattatttgcagaggcatcatcttcatcatgatatttccctcagggaggcacttaagttatggcagttgcagggatattcaaattcccgcgaagcctggcaacctcacacccaggggatatctgtacctctgtttgatgccggtaaccgtgtaacaggggcgttatgtattgcaacatcagatatgcgggaggatttaattatttataaagatttactgttcagcgctgcggataaaattaactgctttttttga

SEQ ID NO: 385442 - DNA, 258 bp, Salmonella enterica
atgaatattaacacagaagctatcgatgatgccgttctcgcgcttctctggctgactttgcatgactatgatcgggcctggaaagggttcgactgggatgtgcttaaccggctttatgaacgcggcttcatcggcaaccccgtcaataaagcgaaatctgtggtcctcactgaagaagggcttcgtcaatccagacttcttttccagcgatattttgccactgaaggcagcgaaaatgatgataaaacggacttctga

SEQ ID NO: 385443 - DNA, 708 bp, Salmonella enterica
atgatgaaagccacgtttggggaatatgtggacattccgcattcgcaactccgggaggtcctgaattcgggtaaccgggaagcgatggagcaccttttcgaacagctcagggaagaatatgttgccagccagacaggcagggaagatgctcccggagataaagagccggaatggcagaatttcgaatttaattattcccctgatgaaaatgacagcacatccactattcgtgaaatattcagggggagtcaactgagtaaaatataccgacaggttgcccgggttgttcatccggacagggaacaggacccactgaagaaagaggaaaaacacagactcatgcagcaactggttaaagccagaaaagagggggatgttgttacgctggttacaatgtatggtgagtttgttcccgatggtgatattttactggacagtgaagcactggaacatgttgaccatctgttgtcgatgagactgcgggaactgaaccatgtccaccgggatatttttcatggtcagggttttaaaacgtgtgtatggaaacagttttccgcatccagtaaaaagcaaacgcaggaaaagatggtgcgttatatacgcgaccttcacaatgggataaaacaggtggaaaaggacattcagtactttaatacgccccggaaagtagtgacgttcatccactccctgttctggtctggtttttga

SEQ ID NO: 385444 - DNA, 435 bp, Salmonella enterica
atgaaccagccaggaagtcagattgttgtcggtgtaaatgcttctgtaaaacagagcaaccatcttcgggtgctttgggagaaagttgagcaatatgaacgtcgtaatgaaaaagcgacagtaaaagtgaatacgctctatcagaaatatgagcagcaggtaatgcctcatgacaggaaaatgggagatacccgttgtcggtggctccggcatctcatgtcatttctggattcgaaggaactaaagcggaaggacaagcagttgctttttgaatatgttgatgaacaattgagtcagatgcaggattttccttttttttacgatccacagatgttgcggtcactgacagaatatctcgggcaccatggtgaaacactgttccgaaaagagagaaagcaggtactggatcagagatttgccatgaatttagcctga

SEQ ID NO: 385445 - DNA, 465 bp, Salmonella enterica
atggctattaccacaatcctgatgatgaaaagtgtgttcaacctgccgcgccaggttttacagggcttcgttgactcaatttttaagctgatggaactgccgctgtgttgcccggactactcactggtcagcaaatgggcaaagagcgtcaacatcaacataaaacgccaacccgtggtaaaatctcgcatctggtcatcgacagtaccggtcggcgaaggcgaatggaaggtcaggcagcacagggcagataagcgtagagtatggagaaaactccatctggcggcagacagtgtcacacatgagataatctgtgctgatttatcgctcagtggaaccactgattcacaggcaatgccgggtctgattaatcagactcacagaaaaattaaagcggtctcagcagatggtgcgatttgtgtcatgtggcgggagatgcctctcactaataatggtctcaggtag

SEQ ID NO: 385446 - DNA, 2001 bp, Salmonella enterica
gtgctcattaaacaactggtattacataattttcgggtgtttaacggaacacacaccattgatttggcaccgagaaaacggccacacgaagtaaatgcccgccctattgtgctttttggtggtctaaacggtgcgggaaagacgtcgattctgtcggccatcaggttggcgttgtatggtcggctggcgtttggcctcgcgactcagcaacaagattatattgaacagcttagttcgttgattcacaacggggcgcactatatcgagcaaccggaagagtcggcggttgaactaatctttacctataacaagggcggccaggaagccgaatttatcgttacacgagcctggaaaaagggtaagaaagatcgcctttctttacaacagaatgggcaactactcaacgagctggattatgatcagtgtcagggatttcttaatgaattaattcctcatggtattgccgatttattcttttttgatggcgagaaaattgcggaactggcggaagatgaatccggcaatattttgcgcactgctgtacgccgtttattgggtctggatctaatatcgaaactgcgtaatgacttaatgattttcgttaaacgtcagcaatccagccagttagcagactctcagcagcaacagattgcagagctcgaagatcaaagtaaagagttagcttatcagacagaagaattgctagaaaaatctgattttgccaaaacgcgtattgagtttctgtctaaagatataactcgttatgaaggcttgttaaatgctcagggaggggtatttgcccagactaaagcacaggaaaagcagaaagttgaaacactcctaaaagataaagaacatcttgaaaaagcattgaggcaagaatgcgatggctctctaccctatgcgcttgcgcccaatatattttctcgtttgctgcaacaaattgccgatgaaacgcaaattaaacaggcaaaaagctttgaaaaagagttgcgccagtttttaactctacttagaaatgatattgcattccgttctgtggggactggaaaaatagcagcggaagcgattaccgataatctgaaagagtatatggcaaccaagccgaagggcgatttgctgtttgatatttctgaacgtgaagcgggtatgctccagcagtcgattgagcaggacagcaaaagggcatggcagcgcttcgacctttatcgttctcaattagcggagattgaacagcagttggagcaggccgccgccaatattgcccgcgctccagaagatgaccagctaatggatctttttgagaagctgcgcgagctggataagcaacgtgaaaagcagaggcaaaaatatctttcactgctggaagaggctaaacgggttaagcaacagcaactggattgtatccgtcggatacaaaaactacatgatgttgcccgcagtcagcatggctttaatagtgcttttaaaaatgcgcaagaaacgatccatttactcgatcggtatagtgatgtattaactcaggcaagagtgaaaacgctgtcagctaaatttgaaattgcctaccgcaaactagcgcgtaaagaagatttacaactgagtgcgcatattaacccggagacattcgacgttgagttgattgatgaaaagggaactgtcattaaccgtaagttgctgtctgctggggagaagcaaatttatgccattgctattctagaggcgctggcaaaaacctctggccgtgatttaccagtgattattgatacgccgctgggacgtctggattctcagcatcgggataagctgattaaccattatttcccgtttgccagccatcaggtggtgttgctgtctaccgatacggaagtggacgagcgctattttgtcgatcaactacgagatgatatttctcatgcctatgagattgtatttaatgcacatacgaagtcatcggcactgaaacccggctatttttgggaattaactaaggaggctatctga

SEQ ID NO: 385447 - DNA, 624 bp, Salmonella enterica
atgggcatcggtgagtcagaagccaaagcgttctggctggccttcctgctgagccttaaagagcgcggactggggggggggaagctggtcatctccgactcgcacagtggtctgaaggcagcgatacagcaggtgttctctgccaactggcagcgctgccgggtccacttcatgcgcaacgtgctgagccgcgtcagcagggccagccagtcggtggtacgggcagcattgcagcaggtgttcgtgcagaccgacgagaaaagcgctcatgccacctggtgggaagttgccggccaactggagaagagcaatccggcagtcacggagatgatggacgaggcagaagcagacgtgctggcttacttcagcttcccgaaagcacacagggtgaagatccactcaaccaacacgctggagcgcctgaacaaagaagtgaagcggcgtgcagatgtggtgggcatcttccccaacgaagagagcatcatgcggcttccaggtgcggtgctgacagagcagaatgaagaatggcttctgcagaaccgctacatgccgcaacacaccatggcggagatcgaccaggccgctgaaaacgacgtaatagaagcgctgccactcagcgcataa

SEQ ID NO: 385448 - DNA, 1896 bp, Salmonella enterica
atgaacaacaataacacgttgtacgtcggattagatgttcacaaagaatcgattactgtcgcttatgctatcaattcagaacctgttgaactgatagggaaaattggtacaacacccactgatattcagcgtctttgcaagcgtctggggtcaaagtcatcgcaggttagtaccgttaatgaagcgggtccctgtggttatggactttatcgtcggctggtgaaatccggttttgactgcatggtctgcgccccctcacttatcccgaaaaaaccgggggagcgggttaaaaccgatcgccgtgatgctatcaggctggtgcgttcactgcgtgcaggagatctttctgctgtctacgtacccggcgttgaagatgaggcattccgggatttggcccgggcatgggcatctgcccgcgatgatttacggcatgcaaggcaacgtctgaaatcgtttcttctggtacatgggatccattatgtcgggcgagcagactggggccccgcgcaccgacgctggctcagtaaatattcattcgagagtccctggcgacagttagcttttgacgaacacagtcgtacaatagaagaccgactggcacaatgtgaacggctggaatccgccctgagggaggctgttaccgaatggagactttatccggtagtggaggtggaggcgctgcaggccatgcgagggattcagtttattactgcggttggattaattcctgaactgggtgatctgacccgttttgaacattcccggcagctaccacatgttccggtattacgcctggacacatcacgggcagatcactatgactgtgtgaagtacagcctgcttgattctctctgcatgctgttcgaaaaaatggccccggtaacacttctgaaagagcattatcgctgccatcctaaaatcattcagttctgtaataagcagttttacgacaatgcactgatcccactgacgactgatgcaggtgaagcttcattatctttggttatcacggcaaaaggaaaccatacccgtaatttttcaaatctcagggagcttgaatccatagaaggacatttctgggatgaagaaagcagcagaggatacatcgccccctataatgcgcaggttaacctggctgaaacggtgctgcctgccgattttgttaaatcgacggtgcataaatttcagggacgggagtgtgatgaaatcgtattttccactgtactggataagaagctcagtagccagcaaagccgaaacatcacctttgttgatgatccctgtctggtgaatgtggctgtttccagggcccggaacaaatttacgctggtaactggtgatgatgtttttgaaaaacacggcaggcatattgctgcactgattcgttacatcaaatactatgccaatgatggaaagattttcgagagcccggtgatatccgcattcgatttgttgtacagtgagtatgataaatcactggagcggctgaataaccgattgaatccggaggattcgcgttttaaatcagagcagattgtcgccagcctgttgcgggacgctctgtcacaggatatctaccggagcatgatgttccattcgcagatagcgctgaaccaactggtatcactggattggggagattttactccctgcgagctgtcattcatgcgtaaccgatccagttgtgactttgtcatttactataaagtcgggaagactccgttgggtgttattgaagtggatggcggttatcatctggaaagtgctcaggctgaacgcgatgaacttaagaacagtatactgaagaaatgcgatctgcctcttctcagattacgtacaatagacagtaatatcgaagggaaagtgagggaattcctgtcagaactgttggactaa

SEQ ID NO: 385449 - DNA, 720 bp, Salmonella enterica
atgatcattattagtaataaaaatcagtcattaaataactgttttttaaaaacacgtcgtcaatatcagaaacaacgtaaacaacttggtatgagcctgcttgaagttataatcggtcttggagttatcggcaccaacactgctggagtggttgttctggcgcaacgggcgcttgacgcacaagaaattactgaactggtaaacaatatcaataccatccgtttcgcgatgaaggagacctaccagcgtggtggaatatatcctgcctacatatcaccattaacactgacaccggatactatgaaaaacacacctgatgccattgccatctcacagttagtcaaactgggaaaacttactccggatgaagtacgcaacaacatttccggtgactttattggtattggtcgtgcaaatgtcactactacgaccgggtcaatggtgtccggtggttttgcaatggagattaatgggttaaatcaaaaacagtgtcgtgcaattatcgagcagatcggtaataactgggattacgtcgcggttggtacctcaggttccggaacctattcactgacctataatggtataaatataactgaagcatctgatggcattactgttatgcgaagcactggaacaggtggacaggaatacctgaaccccgaaaaaattctcaatacctgtaatgcaaccataaattctattatactggccagccgttaa

SEQ ID NO: 385450 - DNA, 510 bp, Salmonella enterica
atgaaaaaattcatcatgctaactctgttaattctcagcgttctttcaggttatgctgagtccggtacatttaatatcagtcagtataataatacgaacgatttaatccgggataaacaattccagaaacatattaaactttttttcggtagtcttacagactattatttctggaaaggtggggtggcacaacaggtgacagatggtttatggggacctcctgagtctgttgtcagaccaggtaaaaacatatggatggcctcagcctgtcgcccccactcatgtacggaaaaagcggcatatataacgaatggtcgctatgagctgtttgctctgattgggtatatgtgtccgtcagaaaatgggaggattcagtataaatatgatggatgtctcagtatattttaccatgaacgaaatgcagaaaaagcgttgtcgccatacctgaactgctggaaagaaaatcttattccaggtgctcctgtatactctgtccgggtacgcgaataa

SEQ ID NO: 385451 - DNA, 1695 bp, Salmonella enterica
atgtcttacccgtctcttgaacaatataatcaggcgtttcagctacacagcaagctgctgagtgatccggagctgaagtcaggctcagtctcaacgacggggctgggtctgccattagctatcagcggtggatttgccctgacctatacaatcaggtccggagtcaaaaaatatgccgttcgttgttttcacagggaatcgaaatcattagaatgccgttatgaagcgatttccaggaagatttccagtctgcgctcgccctattttctcggcttccagtttcagccacacgggatcagggttgaaggaatatattaccctgtcgtcaaaatggcatgggctgagggagtgacgctgggagagttccttgaagttaacaggcggtccccgcaggcgatggcaaaactctcggcttctgttgaagcccttgccgcttttcttgaaaaagaaaaaattgcacatggtgatattcagagcggaaatctgatggtctccggtggcggcgctgttgttcagttaattgattatgacggtatgtttgttgatgagatcagggcactgggaagtgctgaactgggacatgtcaattttcagcatccccgtcgtaaagccgaaaatccgttcgatcatactctggatcgtttctcactgatcttactctggctggctcttaaagctttacagatcgaaccgtccgtctgggataaatcgaattcagaactggatgcagtcattttcagggccagtgactttgtggcaccggagtcatcttccactttaaatatgcttgttggtatccggcagctttcctcctgcatcaggaattttgctgcagtctgcgcttcagcaatggaaaaaacgccttccctggctgattttattgccggcagaaatatacctgtaccaccagacaggataagtattaccggagcggttcccgccagtagtctgaaacccggttatatcggggcttacccggtactttctgctcttgagtacggcacctgccttcagcgggtcggcgataaggttgaagtcatcggaaaaattacgggagttaagtttaataaggaccagaaaggtaagccgtacatcttcattaatttcgggaactggcagggacatatcttcaaaatctcaatatggggtgaaggtctccgcgttttaccttccagaccagatgcttcgtgggtcgggaaatggattagtgttaccggtcttatggatcccccttatgtgaataagaaatataattattcacatctctcagttactgtaacgaccatcggtcaaatgatgatcctttcagaaagtgacgcccgctggcgccttgccgggctgaaggagggacagcaggccttaatttccacgaacaacaaccgggaaacactggaacgtattaaggggaaaggaacccggacagcgcctcagccagtgagaagaacggtcacttcgacgaatcaggcgattctcaacaggatgcgggctgcaacgcaacatccagctccggagaaaatgccggcacggcatgtcatacagaaatcatcgaataactatgttgctccggtgagaacaccagcttcacagccagcatcgtcggtacataacacccggaatatccggtataaatcagggcaaaaacattcgtcccggaatataatcacaaaaatgttcagatggttttttgatgattag

SEQ ID NO: 385452 - DNA, 720 bp, Salmonella enterica
atgaagctggaattctccgggacagttccaaaagatcctgaatgtcctgaggcaaatgaggataaatttgtcttctccgcagacgggagaagacttgctctttgcgacggggcgagcgagtccttcaactcaacattatgggctgctcttcttgcccgtaaatttgttgcagatccgggagtaagccctgagtgggtggccgcggttatcagggaatacactgatgctcacgactttcagtccatgtcctggtcagggcaggctgcgtacaggagtggcagctttgcgacactgacaggcgtggaacaatttaaagagcatcagacggtagaaattcttgctgtcggggacagcatcaccatgctggttgacagcgggaagctcatctgtacatggccttttgatgatccgcaaaaatttaaagaacggccgacgctgattgccacatttccgggatataacgatttcatcggtgagagtggcttctggacacgacacgggaaaactttttacctcgaaaaactgacccgccccggactcctctgtatgaccgatgcactcggcgaatgggcactgagacaggcgctggcggaggaggctggttttatcgaaatactttcacttcagacagagaaacagcttacagagctggttctaagggagcgtgcagcaaagcggatgcgtatcgacgactcaacactcatcatattatcgttttaa

SEQ ID NO: 385453 - DNA, 834 bp, Salmonella enterica
atggcttatgaagcgccgatcagtcgaaataatcctgctgcatttctttttgtagtggatcagtcaggttcgatgtccgataaaatgtcctcaggcagaagtaaggcggaattcgtcgccgatgcgctaaaccggacgttaatgaacctcatcacccgttgtaccaaatcagaaggcgtgcgtgattatttcgaagttggtgtgctgggctatggcggacagggagtctctaatggtttttccggttcactgggaggacagatcctccatctcatttcgacccttgagcaggatccgaccagagtagaggatcgtacacgaaaaatggatgatggtgcaggcgggatcgttgaaacaacaataaagttcccggtctggttcgatcaggttgccagcggtggtacgccgatgcgtgaagccctcaccagagcggctgaggaactggtgatttggtgtgattctcatccggaaagctatcctccgacagtgctgcatgtaacggatggtgaatcaacagacggggatccggaagaaattgcccgtcatctgcgacagatccgcactcatgacggagaagttctgctcctcaacatccatgtcagttcgctcggaaatgatcctgtacgattcccttcttctgagaatgtattaccggatgactatgccaggttgcttttccgtatgtccagtcctctgccggcacatcttattcatttcgcacaggaaaaaggtcataccgttggtacggaatcccggggttttatgttcaatgctgaggctgccgaactcgttgatttcttcgacattggaacccgcgcttcgcagttgcgttga

SEQ ID NO: 385454 - DNA, 1314 bp, Salmonella enterica
atgaacactttcaggaaaatttatcatgaccagtcacatgtcagacgtcggtctgcaataaaaaagaaccttgaatatatggctgaaccacacaggctgaatgatgacgcttctgctctggtatctgtttcagatacaaatgatgaatcagtttttaaaacctgcagtataaaatatggtttcacggaagatactatagtctcaacgtctgaaggtccatttcatttaggtgatttacgggattttactaaaggaattaaagttattactcaggctggttacgtattaaagtcaggtggagtgggcaacggtggtgtacaggatgtttttggtttgctcacagacagttcttacataaagggagcatctgctcaccaggtattacgtatttccgacgatgatacatcagaaatgacagcgctgacagatttgcgtaaaggtgatttagtggtctgtcagaaaggtatttttggttcccgggaaccggtgtataatgatgaacgccttgatgtttctgaggtacaggaattaggtaagcatatcagcaatatgtcgatggataatatgcagaattcaggcctgtatctttctgataaatttcataataaatccgggtatttttcgattaacatttataatatcctgaataaatttgatgcttttgtttatcgtgtgcctaaaaaaatattgtacgcgccaaaagaatatgtcgctgcttatttaagaggctattttgacggtggtacccggtttcatttaaaccggattactgccacagcagcctgtcgtgagttagcttcagatattgtgtacctgttaaatctgtttgaaataaacgcagatataaccaaaaccctgtcagggtttgatgtggttatttctggcagggacgatatagacaggttcaggcaggaggttgaatttctgaaaaatactcatgatttttcaggagccagaattaaaccggttaattccggtgttgattatgataagttacgtaaagaatataatgccagagtgccggaaatgtcacaggatgttttagggttgcctcaggaactggctgagctgatgaaacagctggataagtatgaggaaagtttcagacagctcgggctggagcataaatttaacaccctgaaattactttcgcacacaggttgcagggtaactgaagttacggaatatgcaaaatatacggggaaggatgaggtctttggcgttgtgaacgtcgacgggagccacacctggtgtgccaatgggattgtggtgtctgacattattcatcctgacaacccggcaggtcagatgtga

SEQ ID NO: 385455 - DNA, 4137 bp, Salmonella enterica
gtgaacaaaatatactcgctaaaatacagctcccgccttggttctgttattcctgttccggagttttgtcatagaaaaacaaagtcagcgacaaagaccctgcagacaggagttttattatcactactgtgttccggggtgccactggtaaatgccagcctggtcagcgataatattccttatcagacgttccgtgattttgccgaaaataaaggcgagttttctccagactccagagatataaaaatatatgcgaaaaatggcaactacgttggtgaactcaataaagctcctatgccggattttagcagtgtaaatgcggggtctgcggtcgccacgctgatatcccctcagtatattgccagtgtgaaacataatggtgggtatcagggcgtcagttttggtaaccttcagaactactataatatagtgaacagaaataactacccattgcgggatttccatataccacgtctggataaagtcgtgactgaagtcatccctgctgatgtcacttcggcagggatcgggcaaggggtatacagcgatcaacgtcgttttcctgttttctacaggctgggaagtggtacccaaatgaccagggacaaatatcttcagttgcacaatatttcgggagcttatcaatttgtgacagggggaactataggaaccccgaaatattctgaatggagtattgttagttatccaggtcgtttatcagaccccgcgaatggccctctggccagttatggtctggctggtgacagcggctctccggtatttacctgggatgcagataaaaagcgatgggttatgctgggggtgtacagtaattacgaaggaaatcagggggcaaagagtcgtttcactatcgtcccggttggtttcactgaacagattaaactcgaaaatgatgatacccctgtgtcttccatgcagtcagcatctccttttcgctggacatttaatgccggtaccggagaaggaagtctgaagcagggagagcattcttttgatatgcatggagaaaagggaaagaacctggatacggggaagaacctgacattctacggaaatgacggaaatattattcttcaggacagtgtcagtcagggcgctggcacgcttactttcaatgacagttatatcgtgtcacctgaaacaaaccagacctggaaaggtggtggtatagatattgcccgggatgcagtagtgacctggaaagttaatggagtcaaaggggataatctccataaaattggcgctggcacgcttaaggttaatggaaccggtattaatgaaggtgggctgaaagtgggggacgggacggtcatactctctcagcaggcggatggaaatgaccgggttcaggctttcagctctgttaatattgccagcggcaggccgacagttgttcttgctgataaccggcaggctaatcctgataatatatcatggggatttcgtggaggcgtgcttgacatcaatggtaatgatgttacatttcataaaatacaggcagctgataatggtgctgttattactaactccagtgacacaacctcattgttgactatttcgcctgtaacagacctgtcggtcagtattaatgactgggataaaaactggcgttcaggtggtgaaaaaggactcctttataaatataataacatctataatcacacagttgattatttaattcaaaaaaagaaggggtacagttactttcctgttaaccagagcagcaacgctgactgggagtaccttggtcacgatgagcaggcggcaaaaaaaatagtgttatccagaagaccaaaggataatttacttttccatggtaatctgacaggaaacatgaatgtcagaacggatacttcagccagtaacggggggatagcttttgatggaaatattactcttccagaaaatactgtctctcagtccggaggagaactgatattccagggacatcctgtcatacacgcctttaacaccaaagggatagcggacagactggcttccctgggggatacatctgtcagaacccaaccagtgtcatttgaccagccggactgggaaacaagaacatttcttgttaacgccctctctctgaaggatgcctcattccgtatggccagaaatgcggtgatgaacggtgacatcagcgcaagtcattcggtcgtgaccctggggagtccgtcgctctggattgacctgaatgatggcagcggaaaaaaagccatgatacaggaaggcgtctctgttgcccgtaatgagtcagacatgagtgagtatcacggtcatgtcacacttgacaatcagtccacactggatatacgcgaaaaatttactggcgggataactgccagtaacagttccgtttctgtcgcgtcgcgtcaggcaacattaaacgaatacagcatgttcagaaaaacaccgctgatgctgcaagatggtgcccgcctgacagcccgtgacgggctctggagtgactcgtctgtcagtattaatccgggggcaggcctgacgttaagcgcctctccgggagtggtcgttccgaacagctacattccggcagagtaccgggtgcagtcattcatcttatcgggttcggactccgggttacagatgcgtccggggacatatgtcacgggtaatattgaggccagcggctcagcaactatcgctgtaggagatgattctgctgacacagtgtgggataaaaatcttccgttcaggtcctggttgttaagttcacgtttgcgggattacagaaatgtctggcagggacgggcggatgcagagcatgcccggctgagtctgatgtcagcagactggagaatgaatggtaattcccgtgttcatgacatgaatattaaggattcacgggtcagttctggtggttccgggtttactcatctgacagtggacagcctgacagctaatcagagttcttttgtgctcagaacagacctgaagaacagcgataaaattacaataaaacaacatgcgcagggcagtgataacaccctgcttgtgaactggctcagaaaaccttccggcggggagtcgctgaatattcctctggttagcgcaccagcgggtaccgacccgtcgatgtttaaggcggcggaacgggcaacaggattcagcctggtggctccgcgcatacggacggaagaaaaggacggacttaccagttgggtgctggacggatttaatgttgcaccgaataaaagtgtaacccgttcagccaacagcttactggattcgggaaagaagaacttcctcgcggaagtcaataaccttaacaagcgcatgggtgatttgagagacacgcagggagaagatggcctgtgggttcgtgttatgaacggggccggtacgggggattcggggtattctgatcgctatacacacttccagtttggttttgacaggaagcaccgactcaacggtgccgacctgtttaccggggtactgatgagtcataccgacagtcatgcaggcagtccggcattcagtggggaaacgcgttcgctgggtgggggaatgtatgcttcgcttatgctggactcaggtgcttatgtggatgtcatcggtaaatatgtccatcatgacaacgattacaccgcccgttttgttggtccggagaaacaggattatggcactcattcctggtatgccggagtggaagccgggtaccgttacaggctgccgtgcgaaatgtacctggagccacaggcggaactggtttatggcgcagtatccggctcccggtttaactggagtgctgacgggatggacatgtcaatggccagtaagcattacaatcctctgacggggcgtacgggtgtggcgttggggaaaaccttcaggggtaaagactggcaggtgacggcacgtgccggcgtggattaccagttcgaccttgtgtcaaacggagagacggcattacgggatgcctccggtgagcaccgcttcacaggagaaaaagacagtcgcatgttatataacgtcggtatcaatgcccgactgaaagacaatatgcgttttggtgtagagctggaacagtctgcgtttggtaagtataacgttgaccacgttattaacgcgaacctgcgttatatgttctga

SEQ ID NO: 385456 - DNA, 336 bp, Salmonella enterica
atgcaccagttgcccggtttccgcattcgtcaattcatcttttggtttcttttccgcctttaccttgccaaaatagttggcgatgttcttgacgtactcaaccgcttttttggcgtcaatgccgctatcaaccaggatttgcgctgcctcacgagcaatgcgaccagtacgaataccgatattcccggccagcgcctgctcaaacagttccgaggtacgccaggcgcgtttcaggctctgagaggagatacgcagacgcgttgcgccgccaagcaccacggtttttggcgcgccggtgtcgtcacggttgaggttggcggcaggataagcggttaa

SEQ ID NO: 385457 - DNA, 387 bp, Salmonella enterica
atgccttatgcgccaggcgggcacccgtggaagatgagcgctctgcgagtacgtaagagctggtgggaaaagcataacggtgagtttgaacggttagaaggtgaattgtttctacagtggtgcgttgaacaacaccagaataaggacttttccatcgtgattgtggtaacggactcagcagcatgcgattactcggcgacagaaggtctgaccgaagatggagttgattgcccggagccggacagctccggggcttatccccgctggcgcggggaacgcgactacagtaagcagacaattgtctataactactggtttatcccctttctgcctgggggaaacagacatagtttagcagattatggattgaagagtttttttatttaa

SEQ ID NO: 385458 - DNA, 183 bp, Salmonella enterica
atgaaaacaggaactgctggtctggagtattttttcagttatggtgtcgggtactgcgcagagaacagaaactcccgggatataagccgatatgcgctgacacattttattgtggactactggtattatgcgtcgggagatattgtaccggatatctatctgacatcatctacagcatggtag

SEQ ID NO: 385459 - DNA, 216 bp, Salmonella enterica
ttgaatgactgtcccagccaggaggagatatcattaaattattttcctgtcgtttcaattttgctactcagattagtggtgtttgttgccatcagggcgctactgatctggtttttcaggctaaaaaaggctttttttcaccccatcctttatgtggcggttatttgtgtgatttatgtcctgttaccatcactgatggaaacaccccacacttaa

SEQ ID NO: 385460 - DNA, 393 bp, Salmonella enterica
atgtggaatattcatcctgaacggggagagtttaggttgctggaacagttcctttcgcccctggatgcacgaattgtggcaggccgtctggtgagtgaggggatagaggtgatgttactggacgagcatatggtctggaataatctgctgcagtcacaggctgtagggggcgtaaaactgctggtgaaacagcatgacctggatgctgcgctgagggtgatggaggatatccgttcggggcactggtgtccggacaaagtgaatcaggatgaggccgtcagggaaagttgcgcggcatgcctccggtgggcgaagtggttgctgagtgcggtcatgattatttttttgtttattctgccggtcattgcattattcaggagagtatttgaatga

SEQ ID NO: 385461 - DNA, 879 bp, Salmonella enterica
atgatcgaagcagaatcgttgtcgtataacgcactcgtctggctgaaaaaacttgatcatcgcctgaaatcgaaaaattacgagaagaaaaatactgacagtaaaatcgtgatgcaggttttgcgttggtgtacagcgctggatttgatcccggctaacagtttgttgctgcctgagttcctttttacaatgatgttactgaataatatttcagatactcaacaacgtcttaaacaggcgaactttcgtgacgatcttggtttaaagagccgcattgagagcgcacagttaagcgatcaggagattaaaacagcgggagttcgaccacagcagcatcgggtactgctccgtcttaatcagcccttagtcaatgagttggggatggctattgaggttgtggatacggactggcgtaatattacgctgacgcagtttgatgttcttattgtggtggagaatcaggactgtttctaccatctggcgctttttgattattcccggtgcgatttccgttcgcctctgattatttaccgtggcgatcgggcatatagcaaaggggctgttgcgttgaagcgttgctggttaaaaacagggaaaactgcgatctattttggtgattttgacccgaaaggggtcagtattgcgatgaatgaagattatcattttatgttattaccttcgcaagacgcggtgataaaaaaatcctcttcagtgatgtttcctgatgcgcagctaaagttcttacctgaattattgagaggtaaggttcattcccattttcgggactatctgttggttctggaaaaacatcaggcgctgaggcagcaaaaaatgcagggtgaaattttgaaagtggttatgttgaaaacatcagattag

SEQ ID NO: 385462 - DNA, 1239 bp, Salmonella enterica
atggcgcaggagatttctccgatatccagtctgtttaaaaacggcgctgaccggttggcattgttgggaaaacaccatcatgccttaatgaaggggtatgtcgatgggtttatcgatgaaacggcttttagcgaccagacattaaaaaagctgattgcagcgcgtattgtatggcgtcctgatgagcaacagccattgatgctacgcccgctggtgagcgaactcatcgccagtatggttgctgatgagagccgacggcagattaatgcggatgtggcagaaaagctggaacaaattcgcaataaggtgcaggcctggcgcgatgcttattataaaggtgattacagtattgctgaacggcaaatgcagagactgactgagctcgttcacgatctcagcgggcaatttgaagaggccatcgacagcctctggcatcgccttaataatgatttcggtttcgtcagcagcctgaatgaaaaaattaacgagaatgcgcgggcgcaaaaccaggttcgtcggttgcttgatggactggatttgatcgttttccatgaattgatagagtttgctgaaaataatagcgcactgcgtaaattattagtgagccagttacaattgcgtgtcagtcttcaccatagttcattactggccgttcagcagcgtctggtggatctcatggcgaaatttcgccaacagcagtcgcgcacattattagtgacgaatatggctgcttttttgcgtcagcatccacaatatcaacccgccagctaccctgaacgccgggaagtaccggatatatttaatattgcggcttcgctttcactgcaagcctccatttcgctcgacagacctgtggatcgacaagtcatggcggagatgttgctcgctctgcccagagcatcggttatgctcccagctgtaccaaaaagtgcgggttcagtaatacctcctattgatgaggaggtcgctgctcgtcaggttgcgcttaaaatggacgttgaggatttttatgttttcgctgccggacaatccgggccggtgagcgcgctgcattatctgacggagaatcatctgaactgggacagcgagatatggctttaccaggttattacggaatatcaatcattgccgttagcggataaaccgcgtttctggcagcgttgtgatgagcatcaggccagcccggtaaacgatctgcgtattatatcggatgtgattattggcgtgaggggaaaatga

SEQ ID NO: 385463 - DNA, 624 bp, Salmonella enterica
atgctggaacatggacctttaatcaaaaggctgctgacaggggaatttatttgccgtatcaacgacccggatgcttatcgtcatttacaggatgagagtacccggcaagcgatggacaactatttgcgccttcttaactacagaatagtcagtaatgaaacgcaaacagtctattatgcgggcttttgtgagatgaatcgcgatacccgcagccagcttatgaatcagtttaaggacatcatatcttctctgttgcctctgcttgagtggttacaactcatacaggagacgcaagggcgggagagtacgctgacagcaggcgactatatcaggttgtcggaaatcatgacgcgtgtagaggataatcagagcctgcaacagcgtctgaatcagctttccagcgatcgttttttcaattgtcgaagtgattccattgatcttcagctcaaacaaatttttcggcgtttgaaagagcacggctatgtcagacaacccaacgccgggcagcagatatttattgccacggggaaaattgactatctgattgacgtgatccgctttatccgtgatgaagagcatttaccggttgaagacacaccacctgttcagcaggagcttctgtaa

SEQ ID NO: 385464 - DNA, 3666 bp, Salmonella enterica
atgtcacaacttcttcgtgttattcttatacacactcacctgcctggtgttgttgaaattcaactggatcaacataccaatatttgtggaacaaatgcttccggaaaaacgacgcttcagcgccttgtccctgttttctacggcgaacagcccaataaagttgtaccaagaacgcggaagaagttcgacgagttttatctcccctgtagcaatagctatatcatttatgaataccagcgagaaacgggtgacaattgcctggttgttttgacgggtaaaggtgagggtggtgttgaatatcgttttgttagcgcgtcttatcatccagactttttccttcgctatacggaagatggcgcgaaagggctgagttataacgaatggtctgcccagatgcgcagccgggaagacgtctcagtttcagccaaaataggttcaacgacggagtaccgcagcatcattcagaatgatgtcgcgtcattacgcggtaattcgacggagacgatgaggcttcgccgtttggcggcatcgtttagtttggtgaatggtaactataagctcaggcatattgagaaattagtgagcgccgttcatgccggtgaaggcaaaatggaaacactcaaaaccatgctggcggcgatttttgccgatgatggcgttacgctcccccaaacaaaagtaaaaagcagctttgcgcgggaatggatccaaaaaatgcgccagtcactgcgttacgataaattacagcaggagtttgaactcttacagcgcctgggtctgaaactggatgatgcggaggcacagttagctgcgctccaccctctgttaagaaatgatgaacaaattcagaagcaggcaaaggcggatgcagaacaacagattatccagcggcggggagagcttagccaattagaggatcgctttaatcaacaaagtcgcgaactgaacgatcaattaagtaaaacgcagagcgaattaaaaacggttcagtcatggctggattatgtccaggaagaaaacgatcgttatgaacgtaaagatatccgtcttttgcagacgcacatggacgaattaccccagtggcgggaggcgcttttagagcaaagtgagcaataccggcttatgcaggatcaagtcggtgaactttcccgagaatttgaacagcacaaagcaaaactaaaagacagtttttaccgtcaggagcggctgactcagcaaaaaattcaggattgccagcgggaaaaagaggtggtcagggataaatttgatagccagaaagagatatttcggcagcacttcgaagagcgaaaacaacagcaggaaaaccactatggtgaacaactggggattatttctcgcgatcggacggctgttagcattgagcttaaacattcccagttaaccgctgaagaacatgaagaacgccagattgcagagttgcgtattgagcaggcccaggagtgtttattgcaactgggcgagcgacgacaaaatgcgcagacaaagctgtccgaggcccgtaaacagcaggatagcgcagaaaagcatttgcacgatgcccgcgctggcttgcatcaggctgaagaacaattgctgcaactgcatcgccagctggatcctgaacagggaacattacgccacttcttgcgttcacgttacgagggctgggagcagaatctgggcaaggttctgaatgaaaacctgctcgaacgtaaagacttgcagcctgaactaagggaactgtcggaatcactgtacggcctgcaactggaattaagcgtactggatatgccggattttgcgcaggatgaagcttcaattcgacacagtcttgataaggcagagcaaatcagggcgcatgctgaagaggcaaagaaaacggccgaagtcagttttcaggagcagcatcagaatgtcaggttcctacaatcgcaagcggacgagtgtgaaagacaatatcaacgccaaaatcaggaagtcggctatgcccgtgatgcccgtactcgtttaatcacagagcatgaggcgctggatctagaacgtcggcaggaaaaacgcgcccgcttaagcgcattagaaaaagcgcatatcgaattaacgcaacagaaagaacaagatctccgcgcattaacggacgaacataatgcgcaaacgctgcaatggaatatcgaccttcaaagtgaacagcagcaaattgatgagaaggtggaacaactgtcccggcagataaacaaaaaacgcgccgatatggaagaacagataagaatattccagcaggctctggacgatgatttagcgaagaagggaattgatccccgtgaagttaaaatattgcgggagcgcattgaaacacttaaaaaagatattcaggcggttgaagagcgtcgggatgagctgaccgaatggttgcgttttatcaaacttgactgggaacagttgcgccctgagaaacagaagcaggaaggtgaactctctcagcagaagcgtgaactgttgcagtcagaacgtcagttaaaagcagagtatcagaataaaaaagacaggcttaatgatgagagaaaacactacgatacgctgatgcgtcaggctggtgaccttgttggccagttaaaggtattactggaccgattattgcctctgccgctggccgaaattgttccggcttatattgattccgccgctgatatcaatgaacgtatgtcgcgtaccagtgatatgctggaacaacacgccagcgtgactcgtacgctggatagcaaactgaatgagtttaagtcacgctttaatcaggacgcagaccccactttccttgaattaatggactctgagatagataaattacccgctccttcaaggacccggcagcagttgccaatacttgagaaactactacagcttcttaaagataaacagcagcaatttctggagatgggggaaaatatcggtggcgatctgaaaaaattctttgatgttttcagtgatattaatcgccggatttcgcaacaaagtcgacgcttaagcgatgcggttaccgacgatttgcaactggaaggcatcaataaatcagaggttcgcattttatcgactatcgaccagttacgattctggaaaccactaaagcgctttgctcaaagctatagtgactggcgctcgtctggtcagcaactccctcccgaaagctatttaaatgcccttatggatgtggttgaattgcttcatgccgatgagcgtttcactatggaatcgttattaaacctcgaacttcatcttaatgaaggtggggaagatattgttatcaaaaacgatcgccagttactggaagcatcaagccacggtatggcctatctgatcttgtgcaagtatcttttggcgttcacgcgtttgttaagaggcaaatcagacgccattattcactggcctattgatgaaattggcacgctggcctaccacaatgtagagaaattatttattgcctgtagccataataatattgtgattgtaggcgcttttccgaatgcggaatcggatgtgttaatgctgtttaagcatcgttatttgcttgatgccgatcagctagagccgactcagcgcaggttgaaaaggatccagccgaaagtgagccgcctggcagcccgactggcgcagatggaacagggggcagtgtaa

SEQ ID NO: 385465 - DNA, 1299 bp, Salmonella enterica
gtgaatcccgctcctttaattaacgacagaagcagccttatgacagaacagaaaagtaattttaaagatggaggcagcccatcccgtcaggatgatgatgtctgtaaagatatattgttttcagggagtaatgacgaacaatgttttgatgcagaagcaggttgtttcactaaagatactattgtttcaacgtctgagggaccgtttcatctgggggatttacgtgattttaataaaaaactgaacgttattactcaggctggttcagtattaacgtcaggcggagtggcccgtggcggtgtacaggatgtttttggtttgctcacagacagttcttatataaaaggaacatctgttcaccgggtattgcgtatttccggcgattccacatcagaaatgacagcgctgacagatttgcgtaaaggtgatctggtgctctgtcagaaaggtattccgggttctcaggttccggtatataatgatgagcgccttgacgtctctgacgcacaggagttaggtaagcatatcagtaatatgtcgatggacaatattcagggttctggcctgtatctttctgataaatttcataataaatccggatatttttcgattaacatttataatgtgctcaaaaaatttgacgcgtttgtttttcgtataccaaagaaaatattgtatgcgccaaaagaatatgtcgctgcttatttaagaggctattttgacggtggtacccggtttcatttaaaccggatcactgccacagcagcctgtcgggagttagcttcagatattgtatatctgttaaatcttttagaaataaatgcagaaataaccacaacactcaccgggtttgaagtggttatctctggcagggacgatatagacaggttcaggcaggagatcgaattcctgaaaaacacgcatgatttttcaggtgccagagtaaaaccggttaattccggcattgattatgagaaattatgtcaggagtataatgccagggtgccggaaatgtcgcagtcttttttaaggctgcctccggacctgacagaactgatgaaaagtctggataagtatgaggaaagtttcagacagctcgggctggagcataaatttaacaccctgaaattactttcgcacacaggttgcagggtaactgaagttacggaatatgcaaagtatacggggaaggatgaggtttttggcgttgtgaatgtcgacgggagccacacctggtgtgccaatgggattgtggtgtctgatattattcatcctgataacacggcgggtcagatataa

SEQ ID NO: 385466 - DNA, 207 bp, Salmonella enterica
atgaagagtaaatatgactggctgtttcagctgagaagatgcagtaataaagaaaccctggaaaaagtgaccgaatctaaccgttataaactgtcaactgatgagctggagcattttaactcagcggcggaccacaggctggcggaactgacgatgaaccgcctgtatgacaaagtccctgccagcgtatggcagttcgtccggtag

SEQ ID NO: 385467 - DNA, 513 bp, Salmonella enterica
gtgccccctgaacattatcgtctggtgtattttgatgaggccggatttgctgcctcaccgcccattcagtatggacggggaccccgtgggcagccccatgtggtggagcctcagaatcattgtcgtcgctcagtactgggggcgttagattacagtgataatacattgttttataatacaaaatcgggaggtgttattcgcgatgatgtgatcagttttttggagcagatagccagacaggggaatgatcgtctgacaattttagttctggataatgccccgattcaccgtggaattgatgacgaaacaagaaaaagatggtttttcgagcacaatatgtgcctactttatttgccagcctacagcccggaactgaacttaatcgaaatggtatggaagaaggcgaaatatcactggcggcgctttatcaactggagcaaagaaacactggaatctgagttggataaattatttggtgcttatggtgatcgctttgcagttaatttctcctga

SEQ ID NO: 385468 - DNA, 5070 bp, Salmonella enterica
atgtccgtaaaacagtatgaaacctacctggcggaaaccttcattgaatgggtcagcagcaccatccagccaggtgaacgcttccagttcaaatcgcccgatcccgacaatgctttaaaactctggcaggctttcgactccctggcgggtggaaatacattagagattgcaccaggacagcatcttttctgcgtcccatgtaatggcattcagcttattcctgtgctgcacggtacagcgtctcctgcatttacggaaaactatatttcccatctgcgtgacaaagtttcaggccgcaatggggttttcgcccaaacggcgttgttgattatccataacagcatgctggataccttgctcaatagtaccaaggatgtgactgctccaggtgctatttggcatcctgaaaccttctgccatcaactcgaaaaattaattacaacagacagcgctcgttcacaagtctcccgctgtttgctgggcgatcagttgacaacaatactggatgaaggagcaaccgtatttggtttttcatcgttataccgcctgctggacgacggtaagctggatttctctgagctaaaactattcaatgatagtaatctgttggattttagcggtaaacaacttcgttcccgactcaatgagaaccagaagttatatcgccagattgaggacagcgtcgagcgttatagcgggcaactggagaatgtgttaaccgagtttagtaccaaatttattcaagaacacttcgttgataaagacgactggcgcgagctagatttttctgtctaccaggatgaaaaagcgcagaatagcgaacagaaactggtgctggaaaacatctgcgttgaaaacggtgaagtctggcaaagagcaaaaagcatcagtaaagcgggtaaacgtgatatcagcgttctggtgcagatacagccgggacaatcgcaggtcgaactggagttcagctttcagggtaacgaccttcaggatgaacaagtaaaaattgctcatcatcgccagttacagaaagaacgtttctggcgtaccagcagggccgggggaaaaacctcccgcattatggcatcagtgcctttcgacggacgtccctgcttttttagcctcgaaataatcaaccgtaataacccggcagaagagtataagttccgtctgttattagtcgaacatgagcaattctggctggatgagatccagcattgttatcgcgtggagtcgggtaaaaatcaactgacgctgcaattggaagataacgagttacgtattgctgagactggcaaccagacctgcacgctggacgaagagagtgatgatattgactgtcggcactatgcactggtgaacttcgagacgctggcaaaccaaagcgaactgatcaaatttacgctgatttcaggcgactctcgtctgctactcaatatcgaagggccgagggctgaggaagggttaacactgccgctgttttttgatcagagtcgcttcaataagctctttatagaagatagcaatgcgacctggaaccggatgaaagggcgcgtcattctggataacaccgagcacaacgtggtcggtgtgcgccagcagttgctgatgcaggaagcctcattaattgagcagaatcttcttggtataggcaatgacgatagcgtgtttgcgctggatgaactttataccagctacccaaatctccataatgcctatcaccaattgttagcttactatcagctccgtaacaccttgccgagcctggtatcgtggtcagcggaatatcgtgcgctggtcagtcatgtcgtagatacttttgaacaggcattacaacaaattggcctgagtaggacactgaccccacaggaaaaatggcttctacatctgggtatttgtcgtggtgagacgcatgaacgcctatcgccattgcaccccttagtgttggcctatcatctacaactggcggaaaccatcattgcggagccagaacaacctacattagcgtcctttgcctcattaccgccgattaccctcgatcgtctggttgcctctggcttaatgccgttcgtgtaccatagtgaacatgagtacgcgcagctacagccggtggcggaaaatcgcttctggattgacgttattccccaacgccagatgagccatgattacgttaaacgcttggtcaaagacaaactcaacgaatttactgacgcctattcccggttgttccagatcgccggaaacaactcgctgattatcaatgctatcaatcaggggagcgccagagagctgttcctggggctggtggagtacttcaagcaggagaaagagtgcgcaatttcggtgcatgtaaactgctacgatgagcgtttgttaccgaatgcttttgaccgctttgccgaaagcggcagctatgaacagcttaaaaatgatcttggtctgaacagcggcgcatggcgtgcagaagccgatatgttgatcgatctgctacgcagccgcctaacgttcagtaagtttgtcctgccgtcggcaagcgacaaactggcttacgctcacctggcatttttcaccaataccgcgccggttgattgccgccagctccgcattgaagatgccgctagcggggtgttatgtcatggacttattgcgggcgaaggggcagaaacccaaggcgatgcctactttaccgcttttggtttgcgtaatgtcgataccgaaccttattgtgccctacgtcttgcccgcttgttgggtagcctgtggcaaccggcgcgacaaagcaacagtcagtatcacggacaggggatcgccttggcggtaagcggcaactttaagcagctactcaaccactcttatgacagttcactctggaccactattatcgaccctaaagtcacgcttgatttctttaccagccagaaagatgtggtgttgatccattactctgaccagtataccagttgtgcaggttatgacgccgtgactgtaacaaagcaggttgggctgttcctgtgtctgcttcagaccggacaatccaccgttaacagccagcatctgcttgctgaatttaacgcctttaacggcgaatggctgttgaaaatgttgcgttcgggtgagaaggaacgcaaagagaagcacggcattatcggcgcgtataaattcgtgcagtccatgctgcatcagtccgatatttgctgggttccgctgtcggtggctgaaatgatccgcgtgtccggcaacgtcgggctgagaatgaaagaaagtgatttgtcccgacatttacagggatatcagaacggtgcaatttctgacgatgtgctgtttgtgggcttcaaagaaaacaacctttatctgctgccgctggaagtgaaaacgggagcgcggcctgattataaccatgcaggggagcaggcgcgtgagctgaaacgctatttacagcaggatattctgggaccacggacactggcgtcacaactgttccgggcgctttttatccgtcaggtattaatgcaggtagaaaagctgcgtctgtacggtgtactggacagcaacaagctgtctcctttgttagcacgacgagaatggtggctcaccggcgattatcagttaggtgaacttgccgactacgttggcggttttgtggtggcgcatgtggacagtgagacctgtttcgatctctcttataaagcgacgccggataatatcttacagattgagatcccttattcgttattgccatcattgatttccgcgcaggaggagcaattaccgctggccgagcgttatcacgtaccggaaaaatatcggcttaaggcggagtgtgaggtatccacgtatgaggatgaggtggtagcagaaacatcttctcagactgaacctaaagtggtttatgagatagagcagcaacagtccgttgcactatcgccgtcaactgagagcaacgatgcactgctgcaaatcctgtttggtcatgaagctttataccagcatccactatactgggagccgaccaataccgcgaagtttatgaacactaataccggtatcattggcacgatgggcaccgggaaaactcagttcactaaatcactggtcacgcagttgatacgcaaccagtcctgtaacgttgatggcaaaccgattggtttactgatcttcgattataagtcggattatgtggaccaggctttcctggagacgacgggagctaagaaataccagttatctttgttaccttataatccgttatcgctatttggtgacatgcctatgttgcctagacatacggcaatggcattcgctgaaacgatgggaaaagcctataaccttggtgtgaaacagcgaatgaagttggtttcgctgattatggactgttacgaccttgcagggattgttcctcacgatcgttcaacctggaatcgtactgcgccgacaatcgaagatgtttggcagcagtacttagctcaggaaaaagtagacgaagattcattgtacgctgcactttataatctggccggttttcaagtttttgaaacgaatccagagaagatgaccagtttgtatgatttggttgatggagtcaccgttattgagttggcgagctatccatcagagattcaaaacttggtagttgcactgacgctagatttattttatgcacaaatgcaaaaacgcggtaaaccggtagtgcgaggggattatcgtcagctcaccaaaatgattcttgtggacgaagcggataactttatgcgtcaggatttttccagcctccgtaagatccttaaagaaggccgtgagtatggtgttggtgcgatcctgtcaacgcaggagatcactcactttaagaccggggaaaataattatgcctcctatattttaacatgggtgatccatcgtgtttctgagattcggaatgcggatattaaggcggtatttaacgtcgatgataaaggtgagcaggagtctttgatggggcagattcgacagcttgaaaagcattttagcctgtatgtggatggggataagcgggttaagaagatgcgggatcgggcgttttgggagttggtgaaatga

SEQ ID NO: 385469 - DNA, 1323 bp, Salmonella enterica
atgtatcccatagcaacaacgttaaaagtgggtaacaaccaactggatagttacctaccggtgcgtaataaaaacaataatattaactggcaaatcgttactggtctggtattgagttatgctctgaagcgtaaaatcgacacctacactactgagcaatttcgtgaggattgcagaactcatctgcaaggattaattgatgagccagccttctggtctatattggagcggatgtatttttccagcgaggatatatttcgggtctctccgttttttttgctgttccatgcccagtttgatgctgaaaagataagcgcaggctccgcggcagacaaacgtcttggaacgttgtttgccaatctgatgaggggttttagccttaactacccgatacaggataagttgaactttatcgaacaggaaatgctgaataaactcaacgagaaggtaaaaatactgggagaaggtccattcgccgaagaacaaccttatttgccttatctggtaacgtgttttcagaccgatttagcatttctggcggatcatccacagtatcttttgcaggaattgaccaataccctgcgcctgtatgcctttagctggtgcgctcaactggcgcttaacttggataactggcgggacggcgaaccccaaagtaaatcgctgtttttcattcttgatactgaaaaagccagttcagagcgggaccagataaagcgttttggctataaatggttcgccagccaaagcgaaaaactgttcccgatactctccgcattagaagtgttgcagtggggtaaaggagagaaaaagcgtccattgtggcagatctatcaggatgttctgaatgattcagatccttcgtcgcagacattgaatgccctcaacaagtatttgcaggattttattgaggatcgccaactcccttctcgcgatcgcgtgacaagcctggaagatgccttcaaacagctattatccgttgccgttgaacagtttcagggtaagaaatccgaacgggcatcggtcaatcgcaaatatatcaatgagctggaaagtcagatttgtactgacttcatccaggtacgtggtcgggcggggaaagtgctggtgctgaatcaggatcggctactgttactgaccaatctcaccgtgggtaaaaacaaaaaactccggttgcatgaactgctgcgcggtttcgagcaacgcggattttatttggataatcagtccacacaaatgctggtggcgttttatgagcgcatggggaatgtggagcgaatgagcgacagtggagacgccgtatatgtccgtaaaacagtatga

SEQ ID NO: 385470 - DNA, 1650 bp, Salmonella enterica
atgagctcaatcacattacgtaaagcgttgggtgtactggcgaagtcgtcttcgttttccgtaaccacggatactcgccgacaaagggatgtattcgatgagttaaaagaacaactctttgttaaacaagaaattgaagaagagttacagcgttatctggatatcgcaaagcccggtgaaatcatctttctgtgcggtagcagtggcgatggtaagtcagaaattttaacccgctgtcagtcaaacctgcgttaccggcagcgatttacctttcatcttgatgcgacgcatagtttcgcccctcagcaaacagccattgatgcactaaataatttattcagtaatcatcacccacaatcatatccgttgctggtggggattaataccgggatgctcgccaactttgccagagaaggcgctaaatgccatcagccgctccgcttggtgattgatgcctttttatcggaacagcaggaaaggagtgggccttatcgtactggtcatttttctttttttgattttgaacattatcctaagttccagtttgatgaagaccggcaatactcgccctttataaaaaagttattgaatcaattaacaggcgagaatgacaaaaacctgttttacacgatttttcaacgagatgaatcaacaggttacgatttaaataccgttgctaacttcaaactactctgtatgcctggcgttcagaatgtcttaatcactcaactatttaaagcccggttaattaaagaccagtttgtaactacgagaacgttactggattttttgcatcacctgctgactgggccaggttatctgtttgataacctctttaatggcgtagaaaatgatctgattaacaagctctctgatttcgaccctggcagactgcatacttacgaacttgatcagttcattttgcgctatgaactgggtctggttgacgccgacctagatgattttctggcaacccttgaacagttacacattacgtttgatcgccagtgcgtcaagccgggtgatgcggcctcgttaatcaggcttttctggctgctacagcatgagtcgttggggaataattatcaccaacagttttcggcattctttaacgaatcgctgtttgaacgctactcagaaatctggcatctgcataaaaactacactgctgacccggaacaaaagagattgctgaaccggttttattctttcgagcttatcgcgggtattcagcgttacgcgaaccgaaaagcacctgagttgagtacccaaaaagaagagttctttttgggcgaatttggtggcgtgaaaatcaccgcaccggtcgcgctgaagccggactgggatgccattcttaagaaaaacacaacccacccgacctgtttcgacgttcatttaaaagtggggcaaaactcgctggtgcctgttcgtatcggacttaatttatttgagctattgagcaaactgaataacggttatcgtccgaataaatatgacaagagcgccattgtgttactggatgaaatcgttgaactgattgttgaacaagctaaatccagcagcgaaattaaattttatgatggcgcgcagcgggtttacagcgcaagcacagacgacggtatgatcactatcagcggcatggagggataa

SEQ ID NO: 385471 - DNA, 366 bp, Salmonella enterica
atgagaataactcaccgttataccgacattttttgcctgcgcctgaaacaggcccggctggcaagcgggatgtctcaaaaatgcttgggaattgcggctggcattgatgaatttgttgccagtacgcgaatcaatcgatacgagaaaggcgtacatgagccagggacggagatcgtgcaaaagctggcggaagtgttacgtgtacctctggcttacttttatgctgaagacgatggtttggcggagctaatgttatccttttggtcattaccagaggtagaccgtaccgacattatctcttatgtgaaaaagaaacatatggccaagacagaagacaacaaaaggcctataaaaaacaagggctag

SEQ ID NO: 385472 - DNA, 162 bp, Salmonella enterica
atgctgtggccatttacacagaaaattttacagtctcgttcaatcttcaactacgggtatcatccgcaacttattgaaaatatggattgtaacataattcatggaaaacccatgtatatgggccaacttttctataacattaactacattagtgtctcttag

SEQ ID NO: 385473 - DNA, 555 bp, Salmonella enterica
atgcaagtaagtgatgaagtattacggcaaattgtgttagaaagggagaggttaaatacccctccccaggctatgagtaaggtctctggagtcggaatcgctaggttcgttgtgtcatgtaatgatgcacttttagtttcgactcttgctaagaaggttatgactattataaacaattattcgacacaaagttggccatctcttgatagatggttaaatatacttccgtctcaatttacccattgtttcttatcagagttaactgaagtcgaaaaggaaaagcaaacaaaagattgggatgttctaacatacgaagagaaactagctgaagcttctcatgacgaacagtggacgttatcgtcatggttatcttggatggagccgagtgagcgtgagtggttttggtgggatactgttttattcgatgtgcagttaaataatagccactttttagtagaagtaacaactttggactcaatgtttatgaccggagcgttgaaaaggttatttaaagcttgtggagcgatagatgttatctcagaagatgacctatag

SEQ ID NO: 385474 - DNA, 444 bp, Salmonella enterica
ttgcacaggcagaatggagaatgccagtttttatttttatcgaaggaggactggcgttctctgatgaaagttttgagcagcttgtgctatacggtggtagtcacttgcccggatagcccgaaaatgagtcaaagaaggaaagttcacagcgatagtttagccggacagcttgatatattgatatcccggcttgctcagaaatcaggaaacaaaagtcgttcccggcagatttatggttttcgtgtatacattctggacatcagtgacgaaatgagactgttttgcaaaaaaaacagaatcagtatcggatatgcccgttttatggagactgaattcagaggagataaggacttacttattgtctttgctaaaagatttttttctgcaatgcaggagaatgaagtcagcatctgctacttgtatgatactgaaatctgtgagtga

SEQ ID NO: 385475 - DNA, 279 bp, Salmonella enterica
atgccaggcaacagcaacgaagataacaacacgacatactgtgaaatgaacgtcagcaccgaagcactcgaagacctccactgcctgcttgacacatactcagaaaatctgcaggagaagctgcttctgctggccgtggtaacgcattccctgatgtccgcacaggacattgaatattttgaatcactgcttccctgcggtcacaaaatacagtttattaacaatgaagcgctggagcagccttctcctcctgaaaattacccgccctggttgcactga

SEQ ID NO: 385476 - DNA, 1026 bp, Salmonella enterica
gtgagaaaaacaaaacgcgtcacaataaaagatatcgcggatctggcgggtgtctcaaaagccaccgccagtctggtgctgaacggacgcagcaaagagcttcgtgtggcggaagaaacccgggagcgcgtgctggcgattgctaaagagcatcactaccagcccagtatccatgctcgttcgttgcgtgataaccgcagtcacaccattggtctggtggtccctgaaataaccaactacgggtttgccgtattttcttatgaactggaaacgctgtgccgtgaagcgggtgtccagttgctgatctcctgtagcgatgaaaatccggggcaggagaccgtggtggtgaataatatggtggcgcgtcaggtggacggattgattgtcgcctcaagtatgctcaatgatatggattaccggaaactgagcgaacagcttcctgtcgttcttttcgatcgccatatgaacgacagttctttaccgctggttatcaccgattctattcccccaacggctgaactggtggctgatattgctcgccagcatccggatgagatttatttcctgggtgggcagccaaggctctccccgacgcgtgaccgtcttgaagggtttaaacaaggtttgcgtgaggccaacgttgagctgcgatctgagtggatcattaatggcaattatcacccaagctccggctacgaaatgttcgccgaactctgtgcgcacttaggtcgtccaccaaaagcgttgttcaccgccgcctgcggtctgctggaaggggtgttgcgttatatggggcagcacaatttattgcaaagcgatatgcgactcgccagttttgacgatcactatttgtacgactcgcttactattcctattgataccgttcgccaggataaccgccagctggcatggaactgctttgatctgattggcaaattgattgaaggagaaacgccggaacgtcttcatcggaagctgaaagcaactctgcaacggcgatataaaatggaaaaacagacgcaatag

SEQ ID NO: 385477 - DNA, 1407 bp, Salmonella enterica
atgacattaccctctcgctggcctgcagttttgcaggccgtaatgaaaggcctgccgcgatcgcttgccgacagccattacccccggtggcatcctgcaccggtgacggggttgatgaacgatcccaacggttttatctggtttgcaggacgttatcacctgttttatcaatggaacccgctggattgcgatcaccgctataagtgctggggacactggagttcagcagatctgttgcactggcagcatgaaccgatggccctgactcccgatgaagcgtatgaccgaagcggctgctactcaggcagcgccgtggagaacaagggcgttttgacgctgtgctatactggcaacgtcaaatttgatgacggaagtcgtacagcctggcagtgcctggctgtcgaacaaaacgacggcagctttaagaagctggggccagtattgccactgccagatgggtacactgggcatgtgcgtgacccgaaagtctggcagcacgacggacagtggtacatggtgctgggggcgcaggacctgcaaaagcgtggcaaggtgctactgtttaagtcagctgatttacagtgctggcagccttgcggtgagattgctggtaatggtatcaacggcatcaaagatgctggctatatgtgggagtgcccggatctgttttccctcgacggaacacatattctgatctgctgcccgcaggggctggtgcgtgaaccgcgtaactatctcaacacctatccggcggtatggattagcggggagtttgactatcaatgtgccgcgttcgctcatggtgagctacacgagctggacgccggattcgagttttacgccccacaaaccacgatggcggaagacggacggcgcattctgatcggctggatgggcgtgcccgatggcgaagagatgctgcagccaacgcgtaagcacggctggctgcatcagatgacctgtccgcgggaattgcagtatcgcgatggtaaactgtggcaaacccccgttcgcgagctggcacgacttcgcaatgaagaacatctgtggcagggtatcgccagcgatgctcccgctctgaatgtgacaagccttgaatttgagctgagcccattttccggatgcatcgattttgccggaaccctacagctcacgatcgatgaaggcgagctacgtctggaacgtgccagtctgaataccggggaaaccctgactcgttattggcagggagaagttcgtcatctgcgtgtgctgtgcgatcgctccagcgtcgaaattttcatcaataatggcgaaggagtgatgagcagccgttattttcctgagcatccggcccgggtacgtttcgaaggtgcgtccgatatcacattacggtactggtcgctgcgcgactgcatgatagaatag

SEQ ID NO: 385478 - DNA, 1518 bp, Salmonella enterica
atgtataaaaaacgcagacttgccgtgatgataggcatgctggcaggcagcacctctgtttttgcccagatggatatgacgagtatcgaatcacgccttgcggcactggagcagcgtcttcaggaggctgagacccgtgcgcaggcagcagaaaaacgcgccacggcagctgaacaaaaaacgcaacagttggttgctgcccagcagaaggtgcaaaccaccacacaggaggtggtacaacggactactgcactggaaaagaaagccgatcagagcagtggatttgaatttcatggctacgcccgttctggtctgctgatgaacgatgcggcatcaggtagtaaaagtggcccctacctgacgcctgcaggggaaaccggtggggcgattgggcgtctggggaatgaagcggatacctacgttgagctgaacgtggaacacaagcagacgctggataacggcgcaaccacgcgctttaaagcgatgcttgctgatggtcagaaaacctataacgactggtcggccgacagcagcaatcttaacatccgccaggcctttgccgagttgggcaatctgcctgattttacggacgtactgaagggcagtaccttctgggcaggtaaacgttttgaccgcgataactttgacattcactggctggattccgatgtggtattccttgccggtacaggcggcggtgtgtatgacgtgaagtggaacgacacgctgcacagtaacttttctgtctatgggcgtaacttcggcagcgtggatgagatcgataacaacgtacagaactacatcctcagcatgaaccactttgccggaccgttccagataatggtcagcggtttgcgggcaaaagataatgatggccgtaaagacagcaacggcgatttgataaaaaccgatgcggccagcaatggtgttcatgccctgatcggcctgcacaatgagagtttctacggcctgcgtgaaggttcggccaaaacggcgctgttgtatggccacggtctgggggcagaggttaaaagcatcggttctgacggtgcgctgctgtcggatgccaatacctggcgctttgcaagctacggaatcacacctgtgggcggtagctggcatattgcacccgcaatcctggcgcagagcagtaaagaccgttacgtcaaaggcgacagctatgagtgggtcacgcttaatacccgtcttatcaaagaggtcacgcagaatttcgcactcgcgtttgagggcagctatcagtacatggatttaaacccggaaggctacaaagatcgcaatgcggtaaacgggagcttctacaagctgacttttgcgccgacgttaaaagcggacaagatcggcgatttcttcagccgccctgagttgcgtctgttcgccacctggatggactggagcagcaaactgaataattacgccagcgatgatgcctttggcagcagcggctttaacgctggcggggaatggaactttgggattcagatggaaacctggttctaa

SEQ ID NO: 385479 - DNA, 906 bp, Salmonella enterica
atgggaaaaatctgggtgcttggtgatgcggttgtggatcttttgccggatgatgagggcagattactgcaatgtccaggaggcgcaccggccaatgtcgcagtaggcattgctcgcctcggtggtaaaagcgcgtttattggccgggttggcgaagatccattcggcagatttatgcaaaagatgcttgcaaaagaacaggtcgatattcaatggatgcggcgtgacccgttgcatcgcacgtcaacggtggtggttgagctggacgaacagggggaacgttcgtttacatttatggtaaatccgagcgccgatttgttcctgacgttagacgatctcccgccatttcaggctggagagtggctgcatgtctgctcgatttcccttagcacggatcccagtcgtaccgcgacatttctggcaatggagaccataaggaaagccggtggttttgtcagttttgaccccaatattcgcgccgatttctggcgcaatacagacgaactccgacgctgtattgagcaggcactgcacaatgccgatgtcgtgaaactctccgtcgaagaacttggattcttagccggtaccagacgggtaaaagaagggctggccgtgctcatggctaactgtccggctagcctggtgctggtgacgcagggaaaagaaggcgtgatggcctggcatgagggcagagtggcccactatccggctgtgcctgtggaatgcgttgacactaccggagcaggcgatgcgttcgtggcaggacttctctacgggctggcctcatcaggatctgtcgccaacagcgatcttgcttcaatcctgagtgtagctcagcgctgtggtgcgttagccacaacggccaaaggggcgatgaccgcgctgccgtatcgccatgaactgtaa

SEQ ID NO: 385480 - DNA, 378 bp, Salmonella enterica
atgaaaaataacagattactgaccctcaccggcaccctggcactgttgctgtcttctttcttcaccactcaggcacaggctcatgcccatctgaaaagcgctgagcccgcagcagaaagtacggtggaaagcgcacccggacatctgacgcttcatttcaccgaagctctggagcaggaattcagcgcggcagacgtgaccgacagccagaggaacaccgtaaaaacggaaaaagcggtggtcgatgataccgataaaagcgtgctgattgttcccctggaggacgtgctgccttccgggaaatacaccgtgaactggcatgtcgtggcagtggacgggcataagacaaagggcgactacaccttcacggtaaaatga

SEQ ID NO: 385481 - DNA, 498 bp, Salmonella enterica
atgctgaaaaaagacatgactgaaaagcttaacgaccagctgaacatggagctcttttcttccctgctctatcagcagatgagcgcctggtgcagctatcacagctttgaaggtgccgctgcgttcctccgtcgccatgctcaggaagaaatggagcatatgcagcgccttttcgcctacctgaccgacaccggcagtatgccgcaaatcagggcagtggacgcccctgtcgcggagtttgactcgctggccacactgtttaaaaaaacgtatgagcacgagcagctcatcacgcagaaaatcaacgaactggtgcatgtggccatgagcacacaggactaccccaccttcaacttcctgcagtggtatgtcgctgagcagcatgaagaggaaaaactgttcaaatccattctggataaactggcgctggccggtgataccggcgaaggtctgtatctgattgataaagaaatagcctcaatgggaaacagcgcgtga

SEQ ID NO: 385482 - DNA, 381 bp, Salmonella enterica
atgagacttaaatattccacggcggaggtggcggaaaagggagaggacggggtactgtttgacagtctgccgcagtcggcaccggtgacgggccgggcgcaggcggtgctgctgcaacaactgataaatcatctgagagcccggctgtgcggggaggtgaaaatcacctgccatcctcaccgtatcggtcaccgtggcagcgtggcgctgacgcttgaaggtgaacgcggacgggtggatttgctgattacggtgaatggccggacgctgttcccggaggaggaagagtataccagtgcgccgcgctggtacatcgatgtggtggatgccgtggacgcggtgtacctgatgctgacgctgaacagcggtctgacggcataa

SEQ ID NO: 385483 - DNA, 168 bp, Salmonella enterica
atgacggttatgtatggaacgtttctttataaagccgccgtgtttatggacaccactcttggcgagctaaaggcaattgttaatcgcgcctacctgaacaccaggttaaaggccgtgaatagggcgacctttaaccgttattcagcgatatccgatatcaatggttga

SEQ ID NO: 385484 - DNA, 264 bp, Salmonella enterica
atgacaacctattgccctatatgcgaaggaccggcagcgtatataatgagaagtgctgaggacgttcgctcctatcactgccatatctgtggcgattacgatattcctggcgactgcgcccgactgatggagaaagggaaaatgcatcctgatctgtgccaaagaatgcgcaccagaaaaaaggggcaagttccgcatttcaaaattaatgagtacggcgctattgtcctaaattttctccctgcatctgacatcaaccattga

SEQ ID NO: 385485 - DNA, 150 bp, Salmonella enterica
atgaatcacagcgattacatggacagggcttatgaggtgtatttcgaaagtcttgccgaaggtgaagaagttctgagctttgctgaattttcagaggcactttccacaccaaagttaaaaggtgatgcagatgaaaactatcgaccttaa

SEQ ID NO: 385486 - DNA, 240 bp, Salmonella enterica
atggctacacacagcagcattactgtaaaaacttccaacggaaaattccagaccgtatattgtcatttcgatggttatcctgaaggtgtaggtaaaaaattagccctgcattataactctcaggaaaaagccgaggtactcattgcaggtggcgatatttcagttcttggcgaacactgcgaccagccggaaggtcattcattttgtcatccagtggaaggatatacccagttaacttga

SEQ ID NO: 385487 - DNA, 468 bp, Salmonella enterica
atgaaccgcataacgactggcgcaatagtctcgttgctgattgtggccgccgcgctggcgtggactaccgaccactaccacggtaacgccgtgaaatataaatcgcagcgcgataccgctactcataagctggcgctggcgaacgcgacaattaccgacatgcagacacgccagcgtgatgttgccgccctcgatgcgaaatacacgaaggaattagctgatgcgaaagctgagaatgatgctttgcgcgatgacgttgccgctggccaccgtcgcctgttcgtcaacgcaacctgtcccgcagtgccggcaggtaaaaccacctccacccccggcgtggatgatgcagcccgccccagactggcagactccgctcaacgggattatttcactctcagagaccgggtgaagacgatgcaaaagcaactggaagcgacgcagcagtatatttgggaacagtgccaataa

SEQ ID NO: 385488 - DNA, 303 bp, Salmonella enterica
atggcaaaagattgtgaagtagtggaacagatgatgaaggaaaaaggctgcactggtaaacgagtcacaaaggaactgattgagtcacatatcgacagtgttgattaccagactgttgagatcgccgggcataagttcatgtactgtggcatcaaaatggataacggatttgtggcggttggcaagccagccacctgcattgatccgacgaactggcgtgatgaaatcggtcagaaaatcagttacgacaatagctttgaagacttgtggaaactggaagcctaccgcctgttgagcgagtga

SEQ ID NO: 385489 - DNA, 798 bp, Salmonella enterica
atggcaaagaccgactggaaaaagctggagcaaaaatttcagcgtgctcatgccagaacaggtatcaagcttcaggactggtgtaagcaaaatagcatcagctatgacacagcccgacggtatataaaactgcgcaaaaatgcgcaaaaaaatgcgcaaaaaaaggaacaaaaaactgcgcaaaattctgacgcattttcagaagaaaaaaccagcggtgacaaggattacggcgatgatgacgtggcagacgatagcgatgaaaactgcacaaattcggcagaaacgaaacgcaacaaccgtagcgggaatccccatcccgtttgccggttcgtcgagcgcaataccgcagcagtaaaacaccgtggatacgccaggtatctggaaaaagactacctgtttgatgatgcggctgaaatggctctcattgacgaactggtatttacccgcgccagggcactttcggtaacagcaacgctgaaacgcatgtttaccgaactggataaaacggaagatattccggcgcgcacagcattgtacggaaaaattttgcaggctgagacagccctcgatcgcaatattgcccgcattgaatcgatagaacgtaccctggggacgctggatattattgccgtcacccctgcaaaaattattgctgatacggcgtacaaggaagcggataaagcctacaaagaggcggttacagccaaactgaccgcagaaaatcagggcgtaaccacgccgcttactgaagccattgacgaactacagtctctcaacaaaggaggcaagctatga

SEQ ID NO: 385490 - DNA, 1680 bp, Salmonella enterica
atgaaagcagccagtgaaatgactgagcaggaacagattgctttcattaagtcacatctggctgatgtctggtggcgtcttaatcatctttacaaggtggtaaacgagcgtggtgagctggtgacattcagattacgtcccgctcagcgtgatttgctgaaaaatatgcatgagaaaaacctggtccttaaagcacggcaactcggcttctcgaccgcgatagatatttatctgctggatcaggcgctgtttggcaaaaatatcaaatgcgggattattgctcaggataagcaggcagccgctgaaattttccgcacaaaaatagaagtgccgtttgataaccttccttcctggttacgtgcctgtttccgtgtaagcaagagacgtgccggtgcaagcggcggatatattgagtttgctcatggctcaaacatcatggttgcaacgtcattccgttccggtacggttcagcgtcttcatatctccgagcatggcaagatttgcgcgaagtatccggctaaggccaaagaggtacgaacggggacacttaacgctgttgctgatgagtgcattgtgttcattgaatccacagcagaaggcgttggcggcgacttttacaacatgagcaaccgggcacaggagataacctcttccgggctggaactgtcgttacaggattataagttccatttttacgcctggtggcaggaccccaaatacagcgcaaaaattccggcctccggtctgaggctgacacgcgaaaaagagaagtatttttccgctgttgaaaaagccatgaatatcacgctcaccgatgagcagaaacaatggtacgtcaacaaggaaacagaacagcgcgaggaaatgaagcaggagtttccttccacgccgcaggaagctttccttacgtccggacgcagggtatttaatgcggaaagtacgttgcttgctgaagccgggtgtatccctccactgattgtgtatgacattgagcctgtcacgggcaataaaacaaaggcgcaggctttacgtcgcggtaaaaaggatgaactccagcgtacgctgatgaattatctgctggtctgggagctgccggacccggatgagcagtataccatcggagctgacccggctgaggggctggagcacggcgaccgctcgtcactggatgtcgtcaaacaaagtaccggcgaacaggtcgcgcactggttcgggcatcttgacgctgagttatttgctcatctgctggcgcatgtgggacggctttataacaccgcctttattggtccggagcgcaataaccacggccatgcggtcattctcaaattgcgggagatttatccgccccgttttatctacaacgagcagcatattgaccaggacaacgacgatgatacgccgcgtctgggctggttaaccacgcgccagagcaagccgatcctgactgagggaatgaagaccctgctgaataacgggatttccggtatccgctggacaggcacgctgagcgagatgaacacctacgtttacaacgcgaaaggttcaatgaatgcacaggaaggctgcttcgatgaccaggtgatgagctactgcatcgcacaggaaatgcgggcgcgtatgcctgtacgcattaagtcgcaaccaactgaacgcaccaaaaaacactggatgactcactga

SEQ ID NO: 385491 - DNA, 2148 bp, Salmonella enterica
atgaacacagaacagatacagaccagcgcagcgggttcaccaggcgcagaagccccgcgtttttcacagcaaaaattactggctgtcagctccgatattgatcaccagccaaagtggcgtgacggtgcaaacaaggcttgcgcttattatgatggtgatcagctcgatcctgaagtcattaccgtactggaagaacgaggccagccgaagaccattcataatctgatagcaccaacgattgatggtgtgctcggtatggaagccaagacccgcactgatttgatggtggtgtccgatgatccggatgaagaagctgaaaaactggctgatgccatcaatgcggagtttgccgatgcgtgccgcctgagtaacctgaataaagcacgttcagatgcttacgcggaacaaattaaagccgggctgagctgggttgaagtccgtcgtaacagcgatccgtttggcccgaaatttaaagtctcaacggtaaaccggaatgaagtgtactgggactggctgagtcgggaggccgatttaagtgactgccgctggctgatgcgccgtcgctggatggacacggacgaggcgaaagtatcgtttccggggatgtcgcagattatcgattacgctgtccacgaatggcggggatttgttgataccacgctggctgaaggccaggacagtcagttaatgagcgcatgggaggagtaccagagctggagccgtgagcaaagcgaatggctacagagcgaccgcaaacgggtactgcttcaggttatctattaccgggtttaccagcggatgcccgttattgaactgaacaatggtcgtgtcgttgccttcgataaaaataacctgatgcaggccgtggcagtggcaaccgggcgagttcaggtcaccatcggacgggtaagtcgtatccgtgaagcctggtatgtcgggccgcattttattaccgacaggccgtgtactgcgccgcagggaatgtttccgctggtgcctttctggggttaccgcaaggataaaacgggcgagccatacggactggtgtcacgcgccattcccgctcaggatgaagtgaatttccggcgtcttaaactgacctggcagttgcaggccaaacgggttgtgatggacaacgatgccacggatatgtccgacgctgaggtaatggaacaggtagagcgcccggacggtgttattcgcctgaatgcgaaccggaaaaacaaaacctccatagcagaagtctttagtgttcaacaggactctcagatttctaaccagcagttcacggtaatgcaggagtcggagaaactcattcaggacacaatgggcgtgtatgcggcattcctggggcaaaactccaatgcgtcatcgggcgtggccatcagtaatctggtggagcagggcggcaccacgcttgccgagattaacgacaactatcagtttgcctgccagcaggtggggcgactgctgctgagttatctgctggaagacctgaaaaaacgccgcaattatgcggtggttatcaaccggaacgataagcgcaaacgtcagaccgttatgctgaatgaacagggtgacgacggcgaaatgaccaacgatatatcccggcttaacacctacattgctcttgcacctgttcagcaaacaccggcgtttaaagcgcaactcgcgcagcgtatgtctgaagttattcagggtctaccgcctgaggtacaggctgcggtactggatttgtgggtgaacctgctggatgtaccggacaaacaggagtttgttgagcgtatacgtaccgcgctgggaacaccgaaatccccggaggaaatgacgccggaagaacaacagcaggcacaacagcagcaggagatacagcagcaacagatggaacttcagatgcgcgaaatggccggaaaggtggcaaaactggaggcggatgcggcgaaagcacaggctgccgcgcagaaggacgccgcagcggcccagcttgataccgcgaaagcacagggacagcgctatgctgatgcactgaaccaggcgaacgccgccaaaattctcacggggatacagaactcggagcaggaatcagcacttttgcaacaacagatattacagacattgcagcagcggatagaagcgatgccgctttaa

SEQ ID NO: 385492 - DNA, 210 bp, Salmonella enterica
gtgaaaaaactcaacaaacgacgcagtaaaaaagcagaagtacaaaaagtgcgcgcaaaacagcgcatgcgcacactgagaaatgcattgttacttcaggacgacatgatcagggactttggacaagtcattaaagaagcctctaaagtaaaaatgattgcgccttcaggtatgttttctcatagcgctcctgtaattcaggggacatga

SEQ ID NO: 385493 - DNA, 228 bp, Salmonella enterica
atgaataatgatgacaatacccagccttattccctggaaaaaacaattgaactactggcggaacgacaggcagccctgattctgatcatccaggtcattaatgctgagtttaaaaaacacaacattgatttgtctgcgtccgtagactcgtttcataacctcatgtcccctgaattacaggagcgctatgagaaaacatacctgaaggcgcaatcatttttactttag

SEQ ID NO: 385494 - DNA, 987 bp, Salmonella enterica
atggactttgaaatcacgggtgaagaaacccaggaacagctcgaagaactcatggcaaaaatgggtgacattgaggtcgggggtgacgacgaggaatctgaagacaacgcggagcattccggcagcgggacttctgaaacagtacaaactgaaacgggcgataaacaggcaccgacgccgggggccggtactgaggaagagactcagcagcaggaaacagtgaaaggcattctcgccagggacgggaaacacgttatcccctatgacatccttgaagccgaacgtaccagcagacaacaggccgaacaggaatcccgcgaacttaaacaacaactggctgaacagcagcgtaggctggaagtactaacttcccagatcagccagcatggtatggaacctgacccgatgccggaagaatcccgcatcagcgacgagaagattgccgccattcgcgagctttatcctgatctggctgatgcggtgagtgtcatggcaaggaagtatgactacatccagtcacagattcaggcacaacagggtgctgccagcgctaatgatatcgtgcagcagaccatagctcttgtacctgacctcagccagtggcagtccactgacatcgaccgttttcagatggccggaattattgatgacagactccagagtgaccccgcatggaaagacaaacccctggtggagcgttatgccgaagctgcccgacgtacgcggatagcctacggtgaagcgccttccgatcctgtcgtggagcaggataagaaccagaaggttcttgccgttgccgcagataaggtcgctaaggcagatgctgcggcagcattacctgactcaccatctgatgtcggaaatacggcagcagtaccgcaggataaatttgaacagttacttggggcttcttatgcagatgcagaggccgtaatgagcggcatgagcgacgcggatattgacgcgatccttgagaagcttgggtaa

SEQ ID NO: 385495 - DNA, 1215 bp, Salmonella enterica
atgtcaacagtaactactgcccaggcgaataagctgtaccaggtggcactgttcaccgctgctaaccgcaatcgttcgatggtgaatatcctcactgagcaggaggaagcccccaaagctgtttcgccggacaagaagagtaccaaacagaccagcgcgggtgcgccggtcgttcgtatcactgatttgaagaaagagcgtggtgacgaagtcagcttcagcatcatgcacaaactgtccaaactgccgacgatgggcgatcagcgcattgagggacgcggagaagatttgagccgtgcagacttcaccctgcgtattgatcagggtcgccacctggtggatgcgggtggtcgtatgtcacaacaacgtaccaaatttaaccttgtcagttctgcaaaaacgttgctgggaacgtattttaacgatttgcaggaccagtgcgcagtggttcatctggcgggggctcgcggtgattttatggccgacgatgtaattgttccgctggcttcacatcctgagttcatgaaaatcatgattaacgatgtactgccgcctactcataaccaccatttcttcggtggcgatgccacatcccttgaggcagtggattcttccgacgtgttcactctcagcctcgttgataatatggcactgtacattgacgaaatggcgcatccgctacaaccggttcgtctgaaaggcgatgaattgtacggtgaagacccgtactacgtgctgtatgtcaccccgcgacagtggaatgactggtacaccagcacatccggcaaggactggaaccagatgatggttcgcgccgtcaaccgttccaaagggttcaaccatccgctgttcaagggcgaatgcgcgatgtggcgtaacattctggtacgtaaatatgccggaatacctattcgcttctataccggctctaaggtccaggtatcgaacaatgatcttgcagccaccacgcaacaaattgaagtgaaaaccaatatcgaccgcgcaatgttgctcggtgcccaggcgctggcaaatgcttatggtcagcgaaatggcgggcatttcaatctggttcagaagaaaacggatatggataaccgtaccgaaattgctatcgactggatcaacgggctgaaaaaaatccgtttcgaggataaaaccggacggatgcaggaccacggcgttattgctgttgatactgcggtacgcctgtaa

SEQ ID NO: 385496 - DNA, 414 bp, Salmonella enterica
atggccggacctgtggcagatagagcggaagcgggtgttatttacgcgccttctttccaggaaaacgtttatcagggggcacacggtaacgaatccgtcgtggaaggttttgctgacctgaatgctgttgctgcaaatacacaagtgcgtttgctgcgtcttccgattgggatgcgtatcaatgcggtgcagcttgttaccggagacctgggggcaggcgtcaccatcacggtaaaaagcggtgaccatgagctggtccatgcagacgatgcacatgcaaaagtggcacatcactttgtggttgaaccgtattccacgcaaaccgacggtgaactgcttaccgttgttactggcggtgctgcggcaaccgggaaactgagtgtactggttcgttattccgtggttggctactga

SEQ ID NO: 385497 - DNA, 453 bp, Salmonella enterica
atgagcgaaaaaattgccatcgtttatatcggtgaaaaaaatgtgaaacgcgacaccattaccggaagccgcgctgtttttccgcgtcttaaacctgtccatgtggatgatgatgtggcgtatcagttgctggaatttccggatgtttgggttcgccatgaacagatggaggcaacgcttcagcaacaggaagaagagaagcggcttaaagaagaggaactggcccggcagattgaggaagaagcccgcctggctgcggaaaacagctttgttgtcaacgttcagggtgatgaactggatatcagtaaatatacctcggcacatctgacaacgctgagtgaatcagaagagcttggtctgaaaaaaagggctaaagagagtaccgatgacttccgtattcgcgtgcgcgatgcgctgaaagcaaggagtgttcaggatggtttcgccgaatga

SEQ ID NO: 385498 - DNA, 564 bp, Salmonella enterica
atggtttcgccgaatgactttctgccttatgtcaggcggaatatcagcgggccgctgaatattatgatggctgatgctgtcttgcaggcggccattaccttctgccgtgaatcgttgtactgccgtcgtaccgtcacccttactccggatgctggggtgatatatccactggtgagtgatgatgccccggtttcctgcacccggattattcgtattgccacgccggagcgggagttatttgcggacattgacgttgatatttccacggataaatccctgcggtttacggtctctcatcacaaggtggaggtattgtacgcaatagctccacgggcagacgcgaagaccgtaccggatgaactgctggattatccggaagtgatcggcgatggggcggcctctcttttgtttatgcagcagggcaaaccgtggcaggacccgcaacggtcagaatattttcgcgagaaattcactgatggttatcgccgggcatatcgtgatgcgctggatatcagcccggtttcacccttccgtaatccggttcgcaggcaaaggttcttctga

SEQ ID NO: 385499 - DNA, 651 bp, Salmonella enterica
atgacaattgcagaaattatcgggcgcgtgaatacgcagcttctggatacgctgtggcttcgctggcctctttcggagttgtgcgactactacaatgacgctgtccgcgcggtcattctggcccgtcctgatgccggggcatcggttgagacactgaaatgtgttcccggctcgcggcaggcattacctgccggagcactgaggctcattgatgttatccgactgacggacggtaacgtgcttttacccgttccgcgtgatgttctcgatcatgattatccggactggcataccctgagtggtgtgcctgagcgttatgtgtacagcgaaattactccccgtgttttttaccttttcccggcaccggatgaaagtgtcagcattgatgctgttgtctgtcgtatccctgatgccataacgataagcagcatggaggacaaaaccgaaatacgaattgatgaagcatatgtgaatccgctggttgactggatgttgttccgggctttcagcaaggatgcggctggcggggcaaataccgggcaggccatgcagcattatcaggcttttgctgaccagatggggattaagcagaacacagaccgctttatggcacagatgaagcaggctcagtttgacggaggttcagcgtga

SEQ ID NO: 385500 - DNA, 216 bp, Salmonella enterica
atgaatgtgattctgtggatgtggattttagcgccctgttttctggcttttgtctgcgcgggtcttgtctttgggctggcggagatattgcggatgaggaaggtattgctgcgaatgtgcctggcgacggagcagttgctgtcaatgctgtgtgccgggctcatacaacactggttcccggtcagaccacaatgccgccaggagagcacccggtga

SEQ ID NO: 385501 - DNA, 192 bp, Salmonella enterica
atggcagttgctgaagatctgatgacagaaacggcattggtcgatttttatccgagtatggtggagttcgggttaacggtaaaacaaagccgtcagccagaaattgatgacctgcatgctgataactggctggacaatttgcgcgtcagtatgaaacttattcgttatgaactctatgacgggatgcagtga

SEQ ID NO: 385502 - DNA, 207 bp, Salmonella enterica
atggcggtaaaggttgaggcggtattcaaacgtgttaacgggcagacgttcgctgaggttagcgtgtccacggcgtcagtcgatttttgcagtgaagaaatgcagcaggcgacggcagcggctcagttgttaacggggcgctttgctaccgtcaccgggtttgacagtgttaattttatcaacggagaaggtcactatgtcaactga

SEQ ID NO: 385503 - DNA, 222 bp, Salmonella enterica
atggcaacagcattacagataatcatagaggataaaggtggtcgccttgatattcagattggcggagatgtaaaagagcctcttacaaagcgcgaggcggagtttacaaccaatcttgcgctgggtatcagaaaggcggttctggctatgggtggcaggaatgcaggcaccgaagctgatgtcgctgagatattaaaagcgacggtcacgaaaacacattaa

SEQ ID NO: 385504 - DNA, 222 bp, Salmonella enterica
atggcaatagatataaaaattgttatcaaagaaggaaataaccagatttccgctgatgtcctggggcgaccggatgcatatgttaccccggcagaaatgaagtatgccagcgatgttgtcggtcttctttcccggtggatggaagaaaacagtgacggggtgaaagtgtacgagtctgatatggataaggtttttaaaagagacggtcactcaatcaattaa

SEQ ID NO: 385505 - DNA, 282 bp, Salmonella enterica
atggctaatccagaaatgcttacgcagtccattgtgtcaggcgtctaccgcgctgagtgtctggtgtcgtcgctcgttgcgcgtggggctgatgtggtgagcgtgtccgttcgtggcggtatgcctgtcatttatattaaccgtagtttctttaccgagcaccttattcgtaccggtaaagcggcgtatgttttttgggggtgtggctcaagggggaaatataagcagggtgtgtttattcaggacggttgcaaagtcgtctggtcggaatccattcattaa

SEQ ID NO: 385506 - DNA, 936 bp, Salmonella enterica
atgcagaagttaattactcaggtaaatgaaatcagggaacgaaataaatattcgcagaatgaccttgcggcaaaaattggtcgcagtccggcggtgattaaccagttcttacagggtaaatacaaaggtaatgaggaagatgtggccgcccgtatccgtgagtttgtggaaactgagcaagcccgcttcaatgcccgttttagcgccccggcattcgtcgaaacgaaatcaacgctggatgcccaaaagctcatcgactttgccagaaagtaccggactatctgtgtcttaacggcagattcgggcctgggaaaatcgaccattctcagggagtacaaggcgcagcgtacagacacaatactgatagaagtgacgtccgggtttacgccgcgtgcgctgatgaaagccctgctgacggcaattaaaccggatgccaaaaaaaacgcaacaaccgcagatctgatgaaggactgtatcagagaactggagaagtccaagcgtctgatcctggtcgatgaggctgagttactgccctatcagacgcttgaagcgttacgccgtctctatgacatggctgaaacgggagttgtactggctggtctgcctcgtctgagtgacaaccttatcggtgaagatggtgagcatgtgcagttgtacagccgcatcgcgcagcatgtggatctgaataaccagttctcgcggcaggattttgacgctatcgcagtgaagatgatgcaggaagctgaggacaacgaaatccgggaactgctttacatctattccggtaacaatatccgacgcctgcttaacatcgttcgcggcgtgtacgacctgtgtgacgatctggatatcggggtaagtctcggtgcagtgaaaacctacaccgataagctggttggtaaatcaaggggtaaaaataaatcatctgttcattga

SEQ ID NO: 385507 - DNA, 2082 bp, Salmonella enterica
gtgttaaacctgaagatatatggccgtctcgttatggatattgaaaacaataactgggtaacttcaagtgagttaatcaaactgcctaatatgcctaattccttgcaagggatatctcaaaaagcgaagagagataactggatctcaagaagaaagtccgggattaaagggaaggtttacgagtacagcgtcaattctttgcctgaaagcataaggcaggctcttacagatcatcgtgcacagcagatggtaaacgtagaggctaaagaggttgcggtcactaccaagcaccgcgtcaccgcccgcgatgaagtcgggatcatggagcaatgccccgctgtggttgagcaggcgctgcaccagttgaccgatgcgcaaaaggcgattgccagtgcgcggatcctgcttgccgtcgaggttcacaccttgcgcgaacatgcaggcatgacacgcaccggggccattgactggatagtccagggttcccgtaccggcaatctgccgccccgcgttctggaagcggccagcgtcgctaacgctcgtcagggcaagcgcgtcggcgtcggcaagagttcgctgcaggactggtattcaacctggttgcttgctcagggcgatgctaaccggctgctggtgttgctgtcagccggtcatcataaagccgtgccgtggcagcaaataccctggctcgatgatttctttgtcttctatcgcgtatggcagcggccatcggttgccgaggcttaccgggactttgaaaagtggtggtgtgaggcttatgccggtaatagcgggatgctggcggcgataccgggaatacacacggtacgtcgcgaaatgcagaaagtgccgaagatagtgcgcgagcgttatcgcacgaccggttcagcctggcgttctcttaatccgtttaagcgtcgtgactggtcacaaatgccggttaatgccgtgtgggtcggggatggtcactgtatgaagatgcagacgtttaacccgctgacaaataatgtctttcaggcagaagtgacttttgtcatggatgcgggacagcgcttcattgtcggctggtcaatagcgttgtcggagaacaccatcgccgttgctgatgccctgcgtcatgcgatatcgcagcacggtgtgccgctgatttactactcggataacgggccgggtgagacaggtaaaaaccttgatgctgatgtggtcggtatgttgcctcgtctcggtatcgagcattttaccggtattcctggtaatccgcaggggcgcgggatcatagagcggtttaacaagaacgtgccgcgtgaagtggcccgccagtttgagagctactgccataaaggggcggacgaagagacggtcaagctgcaacagcgcatcgctgcttcggcgcttaaagctgcatacgagggtaaggaactgacgccccggcaggttaaggcgctggggaaaatccccacatgggaacagacggtatctgccatcgagcgtgaggtggagttgtacaacaaccgggatcatagctcactgcctcgtcgagagaacggcaggcactacagccctgcggcgtaccgtaggcacctgatacgcgaacaggggcaggatgtgatgattgaccatctcaccccggaagagttacacgagatgttcaggccggaagaaatacgaacaaccacgcggggcgagataagaatattcaataacatttatttttctaccgagcttaaattctttaccggggaaaaagtcagggttaattacgatatacacgatgctaattcaattattgttcgtcgcatggatggcacctttatttgtgatgccatatggaacggtaacaaggttgacgggttcgccaagccggttattcagaaacttaccgaagagcgggttaaaggtcgcatcgatcgcggtatgaagcgcgtcgaggatgcaaggcgcgagctgcggccagcgctggcacaccaggaggatgaggcgcgtatcgagctgctggcgcgggctgataaagaagccctcctgatttctcagcgtcaggctgagaaaagaaatgaagagttaaaaaccggcacacataattaa

SEQ ID NO: 385508 - DNA, 210 bp, Salmonella enterica
atgaagaaaagtgactggcacccagcggatattaagtcggccctagaaaaaaaggggactaatcttagtaagttatcgatcgaacataacttgagcgcacgtactttggggaatgctcttagatataagtacccgaaatctcaacggataatcgctgaggcgattggtgttaaacctgaagatatatggccgtctcgttatggatattga

SEQ ID NO: 385509 - DNA, 546 bp, Salmonella enterica
atgaaacaagaatggattttagttaaagacttgctgggcgtcggcgggctacctaagacagtgcagggcatacatcagaaagctaaggctgaaaactggcgtaaaaagtctgtcgctcaagaaggtgttcgcggtcgttcctatgcgtacaactttgaggatttaccaccacagacacaaagtgttttggctggcgatgaaccatcaacgcaaccagccttgatctcaagaggaagttcaggacaatctaaggataaatttatgactgttttcagtgctgtttgggaagggttggaaccaaaagaaatggatctactgtcaaagctccttgcccgcaagggtgctgaattgctcactctattgctgaacaaagataacatcgctctaatgctactaaccggggagcagagagaggcggctttaatgttgatgcaacttgatccaattcgcgtcagagagattttatccgaattacgagcaagtcatgatatgggtcgaacagcttctcagcaagctgtaggcgaccataagaaggatttagcttaa

SEQ ID NO: 385510 - DNA, 174 bp, Salmonella enterica
atgcgcgtcaatggcaatacggtgacggaagaagactgtattttgagtgacagaaagcaacgtatctacgatgtgcgtgtcggacctgacggctacttatatgtgttaaccgatgagtccgacgggcagttactcaaggtaagtccttcacttgaggccgcggctacgcgttag

SEQ ID NO: 385511 - DNA, 198 bp, Salmonella enterica
atgaacaccccagcgaagctatttatactccctctgttattcagcagtgagaatattcagactccgggcctgtacagactgataaacaggctaacgcctgcagaagaaaaaaatcaattgtctgtgatactgccgctggctgagcaacaacaaaaaagcctgacggatatttccgccaggcttttgtttttcagttaa

SEQ ID NO: 385512 - DNA, 189 bp, Salmonella enterica
gtgaagataaagtttctggaaattacccgacaggcagcagatctggagcgtcagagagcgtttcaggacgccggacagttatggaacaaagcactttttgtggccagacgtgacgcgaatgcggagtactgccgccgccgggcagatttttgtctgagcagcatgtttacgcgaagttcacagatataa

SEQ ID NO: 385513 - DNA, 162 bp, Salmonella enterica
atggcgaaaagagagaaatgcccggtaaaaaaaagaaactggatgactgcggatgacattcaggaaagggattatgcaagctgtaagctggcccgtcagttctggacgctgctttatggcgcccggatgaggaacggcccgcaggtgacgggagacaaatga

SEQ ID NO: 385514 - DNA, 1185 bp, Salmonella enterica
atgaaaaaattaacagtggcactatcagcagtggcagtaacggtcatgatggcaggaatggctgatgcggcagaggtttataacaaggacggcaataagctcgatctttatggtaaggtcgatggcctgcattatttctcaaaagataaaggcgacgatggcgatcagtcgtatgttcgttttggttttaaaggtgaaacccagattaatgaccagctgacggggtacggtcagtgggaatataacattcaggccaataatgacgaaggcagtacaaaaggaaatgccacccgcctggcgtttgccggtctgaagtttgcgaatctgggctctgttgattatggtcgtaataacggcgttatttatgatatcggggcgtggaccgatgtgctgcctgaatttggtaatgacacctatgaaggtacagataactttatgaccggacgggctaacggtctgctgacttatcacaacaccgatttctttggtctggttgacgggctgaatttcagtctgcagtaccagggtaaaaatggcggcgatggcgaaagtaataacggcaaaggacgtgaagccaaaagccagaacggtgatggctacggtatgtctgtcacctgggaaggcgatgccgggtttggtgtgggggcggcatacggcagttctcatcgtacgaaagctcaacgttcggttgatgtccccggaaatatggatggaaaacgggcagaagtctggacggcgggtctgaagtatgatgccaataatatttatcttgctgccacttatgcgcagacccggaatatgcagtgggttgatattaataaggacccggccagtaaattgtatactgccgcagtttgcggtgatgttaccactactgataaagaaggtaacacgccagactgtggtctctttacccgtaaaactgaaaactacgaaattgtggcgcagtatatgtttgatttcgggcttcagccgtcagttgcttatctccagtccaaagcgaaagatacgggtaaatacggggatgttgacctggtgaaatatgttgatgttggtgccacttataacttcaacaaaaatatgtccgcctatattgactataaaatcaatctgctgaaggacaataatccggcaggtctgagcacagataaccttgtggcgaccggtctggtgtatgagttctga

SEQ ID NO: 385515 - DNA, 375 bp, Salmonella enterica
atgggaaaaagttattttcagattgatccaaagatccagcgtctggttacctgcatgaacacctgcggcatgaagacgttcgcctcctgccagggacatggttttcccgttcgcaggctcctgccgtatgtggcattcacggcctcactgcatcaggcgcaacaactggccagacgggtcagggaagacgccgaatcgccctttccagatctgtactggggctgggaagtgaccgcccgttttaacaatcagttcatgttgtgctggcgtctcgcccccgtaaatccccaccatcactggtaccgttactggagtaaaacactggataaagattttcaacaactctgtctgttaatcaaatactctgtccagtaa

SEQ ID NO: 385516 - DNA, 219 bp, Salmonella enterica
ttgtttccagaatacagagagctgatttcgcgtcttaagaatgaggatgcgcatttctcggtgctgtttcagcggcacaatgagctggaccacgaggttatacgggaagaggcccgtccagcccctgacaatgtacggctgatgaagatgaaacgggaaaaactacatctgaaagatgagatacaccgtattcttcgctcttactcgccgggtgagtga

SEQ ID NO: 385517 - DNA, 474 bp, Salmonella enterica
atggaaaacacacagcagagttacgctcaggagctcccctgcagcagaaaaaaaacagcccagagcaaccacgacccgttcctgatccctccttcattacagcagtacgccagcgagcccctctacattctggtcgccctgtggtgccggaaacagaacgactgggtcagtcgcatggccatttccgaagccttcggtatcactgaccggcgcgcgtcattccaggtatcttatctttcccggaacaaaaaacgggttgactgcgaggttcgggtcgtcagaaccgaaaattcacagcgtttttaccatgaaatccgggtgaaagacgtggtactgacacgtgatgcaaaaaaagcagttccggcaccacccggaaacaagccagtgaaacgcagtaaagtcggtaatgccacaccggagctgcgcaatatgttccactccctgatgggttcgcgaagactctttgacaactga

SEQ ID NO: 385518 - DNA, 528 bp, Salmonella enterica
atggccttttcctggacggaagagcggatgaattacctgcgggagaatgccgggaaactgagtacccggaaaatcgcggacggactggggacgaatatcacggttattcgtaacatggcggcaagactgaagctgagtctgcgtatccggagcgtcacgggtgagcaggtggatgaggtatacagactgtatgagtcgccggagaacatcacggtcaggaatatcgccacgcagacggggctttcagcgggggctgtcagctatattctttattctgagtcggaaaagagaagcccccggtacaatcgtgtggagtatattgattttgaaacaacgaagggcagaagggtcagcgtcgagaaggcgctggttgacgtcagccggaccccgccggaaacgctggccgggaaaggagggaaagggacgtatgatatctggcttcaggacggcacgcactttacggccagaaacctgcacttcactgaacgtatcaccgggcgtgtgaggcgcggacgcagactggcgtaa

SEQ ID NO: 385519 - DNA, 1428 bp, Salmonella enterica
atgaaaaaattattttcccgccagacagtgcttcccggattatccgcattagccctggcccttgccgcctcccaggcttatgcctcggcgtccatccggcccgttctgacagatatgaccccgtcagaaaaaccctaccagatgacctgggtgggtgccgatgaaaacgtccggcctgaactgcggaattccgtttatatcgcttctttcggctcctcttcaggaaccgaaggggaaaacagactcaattctgataacccggacctgcccctgtcgcagcgattcgcggttgaaggttatccccgttttatccagattaaggataacggtgaagtaatccgctgggatgtaaaagattaccctgcctaccaggacagcggcgaaaacaaacacggcactcaggctgagtttgcaacgttccttgagcattacaattcaccggaagcaaaaccgctttccgtcctgaattatctgcagccactgcattccgttgactaccgtgacgggaaattactgggacagcagacgttcatcggtaaatatgttctatgggacatgagtaagcctgtaacagcaaaagacgggaaaggtcttttaggtaccgacagcgttcagataaataagggaaccgcttttgataactggaaggaagtcagggtccgtctctcccgcttcagcgccgacggaaaaaccgtttatggcgtggtgcgctctgaagccgaagacccggatgataaagagttcagcgttgatttaacctggttcggtaccagtgaccttcgtaacggtcacacgcttaaacgacagagcataaaaaatgcgtccagcggacacgcgttattcctgacaaaagacagcatttataccggcgggaaagatatccgtaagacagacataaaatcgggtaaagtcaccacatataaaattaatggtgacattgattatggtgaggcatcaccttcattcctcaacatgattgttgatgaaaaaaataaccgcatttacaccctgaacagccgggatattgacccggatgaaacagatgcaaaaacctacggagaatatctcgacaaatttaaggagtttgccggcgcacacaaacacggtttatacgtgtttgacataaacaaggatgacaccctgacattaaaaaactatgtgccgatggttcagcctgtggagctggttttgtccggggacggaaaaaccctcttcgccaatgaccgcatggagcgcaccgtcagtgcttatgacatcgccggcgacatgaaggtgaaagactccgtgacaacaacctgccataacagcaacctggtccgggacgggaacgataatgtatacgtcacgtccgtttacacctaccagctcagacttgccggggccggggataaaaactgcaacagtatcagcaaaatttcttttgaataa

SEQ ID NO: 385520 - DNA, 525 bp, Salmonella enterica
atggcatctgacagcattctgcaggatctgcaggaactggaggacacccgactggccgttgaactgatatcgcccggcgcacgaatgcagttactggaacacgccgtcagactcagccgggggaaaatgccccggctgtacagagagctgcggggaactccaccgcctaaagatatgcttcccttttcagccgactggtttatggtccgggagcacaatgttcactcatccctgttctgtaatatatttgactgcataaagaaagagacacccggtgagtcatcagtaaaaatacttatccaggcttatcgcgcatatttaaaatatgccggcaatacagagactctgtccctcacccgggcgtggatactgaggcggttcgttgattcgggaatgttgtgttataccccctgctgcaaatgtggcgggaaatttataccccatgccggtgaacccgcccgtggttaccactgcgtcatgtgccacccgccatcacgggcagtaaaaaaagccgtcgcggaatag

SEQ ID NO: 385521 - DNA, 1539 bp, Salmonella enterica
gtgaacgcactgacttctgtactgatgctggatgagtcggtgctggcctcgcccgactggacgttccgccagccggaagagggcatgctgtgcggtgagacgaatggcgtgaattacctgctggtcagcgacctgcgtatcgacaccctggcggccgttcaggtggactatgagtatctgacccgggtgaagaaggtgtcctgtcagggggcggcgctggtatcaggggagctgtattaccagatactggagaatctcacgctctcctccctgacagacaaccagagcaagtccacggagatacagcgtcaactggaggatttgctgacgcatgccacctcgctgggggccagtgatgtgcatatcacccgtcgggaagccattgccacggtggagttgcgtatcaacggggtgcttgttccggatgaacagatgctctccacccggtgcgatgaaatggtgtttgtgctctataacgtgcaggccagtaccaaggagaccacctggaacaggagcgtgccgcagagtgccaacattctgtacaccctggccgggaagaagtaccgcttccgttacgcccactttcccatctttggcgaaacggagggctgttatcacgcggtactgcgcattatcccgtcgggggtgcgcaaaagcagcctgatagacctgcgggaaatgggaatatcggatgcggaggcgctggatatgcgacggatgctgagtaatccctacggggcctacctggtctccggcactaccgggtcgggcaagtccaccaccctgaaggtgctgatggagtggatgcagcattaccgctatgacgacaagggcagtttcctgaccattgaggacccggtggaataccagatagccggtgcccggcagagttcggtactggatgcggatgacggcggatttcacatcgccattaagtccgccctgcggcgtgaccctgatgtgctgatggtgggggaaattcgtgaccccatttccgcgaatgcgctgtcaggcgcggtggagagtggtcactactgcttcaccactgtacatgcgggcaacattgtgacgctgctgcagcgcctgtcggcgctcgggatgaccagtgacaagctgtccacgccgggttttattgccggtctccagtgccagaaactgctgccggtgttgtgcgaccactgcaagaaaccgcaccccggtgcggtgctcggaggcaggacatttgatgtgtatgagcgcaaccgggcaggctgtgagaagtgtaattacagcgggatttcttcccgccagctggtgattgaatatatgcgcccgaccgacccggagctggaggctatttcccgccaggactggtacggggtgtacagtcagtggcgaaagaaaaggcagacggttgacacgctggcagaggggtttgacctgagggagaaggccgtggcctgtgtgctggccggacgggtatgcgtgtcctggttcagtctggagttcggggacgtggagccggaaaatctggaggtgttacttggcaaaattcactaa

SEQ ID NO: 385522 - DNA, 540 bp, Salmonella enterica
atgcaaaaaataaacgtttttcttcctttattgattctgacttctttttatctgcaggctgcgccacagacaccggtaaacaccgtacctggcgtacctgatgtaccccagccagcagcggtgacgccgcctgaggtagcggtcaccgccggacaggagcagatagtccgcgccctgcaggacgacatcacgtttgagcgtcagaaacgccagctcagtaacgagctggcgctggagaaactgcgggctgaactgcagaaggtgcggggtgagaatgcgcctgcggtaacgatgcctgcgacaccgccgccggtcgccataccggtacgtgacgaatcgtctgtaccggcaccggtgccacagtcagcccctccccgggtgatactggtttcacaggtggctggcgtatcgcgggtgggcgtatccgtcaacggacaactgcggtttgtcgggcgcaatgaaacgttcccggccaacggtaaaaagtaccgactggaggcagttaaaaataatctcctcgtagccagggaagtgaagtga

SEQ ID NO: 385523 - DNA, 822 bp, Salmonella enterica
atgagccgttcattatataactggttgtaccgggataccctgtcttcacgtggcaggacggctctgttgtttggtggagcggtggtactgctggccgccgtgggcagcggcacctggtattactttcacgcgaaagcggtggaaaaagaggagcaggagcgcctggcggccgcggccctgcagcagaagcggacgaatatccacaatttctacgccaccgcgctgaaaggtgcggacgcccgtggttttctcgcgctgtactcggaaattctgaacagccgccagccaatagtactggccgggttccgggaggacagttttagctgctcgacagacgactgcagcttttcctaccagaccggagagagcacggtgttcagcgtacaggacaagtggttccggggagagtcatatgcggcgtccttttcccaggactcggtggactataccggcattccgtcggatatgaacagtaacccggttctggaggtgtttaaccggcaggagaaaatcagtgagcctgcctgtaatgacgttctgaattacgtctacagctataactccctggtggatgccggtctgcgttttacgttgactgaacttccggcctcctccgtcagtgcggacgaagactcactgccggggaacccggataaccacggattactggccgggaagtggcaggtgtcactgccggatagctatgtcagcgttttctctttctggcagaacagaccgtattcctcctcttttatttttcagtcagtggccgggaaacagggcaatctggatatcagcgggacattcttatgcaaaaaataa

SEQ ID NO: 385524 - DNA, 603 bp, Salmonella enterica
atgctgacggagataatgaaggagcacagtctgtacacaggtactttatgggtgccccagccttccaccacgcatgctctgcgcacgcgggcggtcaggaatctgctggagcgccagtggcgaactgttacctacgaggcaggagaggtcacagcaccggcaggtaaagggggagtgcagaagccagatgcggtacatacgcccggaatgcgggagttcaggggagtgacggaacaccactcaacgacccgggagccgctggcgctgtatatccgcctgttatacggggatggaatattttatgcccggacagatgacggcatggtctggctgctgatagtcagtgacggtgtgattgtgccgggtactgactgtctgctcagtccgctggtgtttgactccctgatggaagaccggaagttcagtcagtacaaggccctgccggtcagggaactgtcggaggactgcgcagaagagattctgacgcactatcaggccaatcagcagcggctgaaaaaacggcgtcattttttttatggcgtactggcctgtatcggactggcattactggccattcccgcggcattcatactgatggggtag

SEQ ID NO: 385525 - DNA, 1500 bp, Salmonella enterica
atgaatgttaactataaactgtcctgcctggcagtagccctgctgctccagggatgtacgaccgcctttaatcataaatatacggataaggacctgctggacagcagccccggactgcagagtctggatgcgcagaagcaacaggctttcacaaaatataatacagcatttctgggcaagcctgttgcatacagtgcaaaacagcagcatctgctggcacagcatgtggaatttcactcggaaattccggtatcgctgaatacggtactggacactctgtctgagcagacgaaaagcagttaccgggttaatgagcagatacccggcaaaacaacgactcagtcggggatggaagggcaggttattcaggataacagcgtgaatttctcgggaacgtttgaagagttcatgcgctacctgtcggccctgtatgacgtcacggtcagtctgactgatgacaatattctgcaggtgaacgtttataacacgtatgccctgaaactggacttctttggtaaagacaatgcctgggattcaagcctggacctgtccggcaatgaggccatcggcggcggtgtgaagggtaaagctgagaccaaattccagagtactttctggacggatgtcaccgccatggcgcagaagtacgtctccagcggcgtgtacaacgtttttcaggacgtgggggtgctgaccttcagtggtcgtccgtctgaatatactgagctggccagaatactgaaggattacaaacaggctaacagcaagcagtttgttatcacctataaggtgttcattctcgacaagaaaaaactgcgcaatctggatggtgaactgggtgtgtcctttaagaaaggcggaacgtcattcagtatgaatggtggccttgtctccacgccatcaggtgatatttctcttggtcgtaatttctactccgatggccggctgggcgtggcggcgaagctggatgcactttaccagctgaccggcagcaaggtactgcagagcggtaccatggtgacccgaaataatactccggtacccctgaacctgaccgagtcgcagaactatgtgtccggcatcaccagtacactttctgacacgattggcggttctttcagttcagcggtcaccacttccactatcaccaccggtaccagtgtcattctgacgccgcgggtgttgtctgatggtcgggtggagcttacatcggcctacaccaagaaaaatcttaacgggattgacgtgttcccgcagggagccaccagtaaccagaatcaggtgcagttacccagtgtcagtaccactgaactgttcaacatagtggatgttacgccgggctccctgattattgtcgggaagtatgaaacgaaagccagcggggacggacaggggctcaaaattctgggcggaaacctgaacaggagtgattcgacttccacggtggtgatggtggtcggggtggattactacaacaaaccgttccaggaaggtcagtga

SEQ ID NO: 385526 - DNA, 540 bp, Salmonella enterica
atgaaagtgaaaataatttccgggattgtgctgatgacgttgtcatccctttctgtttctgtggcggcaggtagcgttagtaccagtcatgtcgtgagtgacccctcccgcagtccgtttcaggttgaccgggataaggtccgggcgcagacgggaaaagtggaacatctgaccccgtcagtctctgcctctcaggaactaaacccggctgtcattgtgccgtctgcggggcggtctgcggttactcctcctgttcaacagaaacagcccgtgtctggtgcgtataacccctggctgacgctgaacctgcaggaaagccatttactgagtcaggatattgagtcatgggctaaatcacagaacatgcgcctgctctggaacagtaaccgggattacctcatttacagtgccattcacctgaccggaaaaaatcgggatgagctcctgaaccagttgggggagttgttccgttcggagaactacggcctggtggtcaagctctatgaaaaaaacaatgtgctcgtcattgacggccagtaa

SEQ ID NO: 385527 - DNA, 1848 bp, Salmonella enterica
gtggtgggcaattccattatgaatatcaggatgatgaaatctcgggggttctcattgctggaagttatttttgttctggcttttcttggtattgtcctgctggctgtaggcaactatgtccgtaaattaattgatgaaaaaaaccgtcagacagttgcagatgcggtggtgcaggaaatttatggtgtacttcagtttgttaatactgacagtattgaaactttcaaaaataaaaattatgacccgaacgatgttgctaacagaggaatgaagaaagttacaaatccgctttaccagtcgccacatatagctgtttatcctgatgccaaaacaggcgctgatgctgcgctagaaggtttaacaaataacccaatctggcttgcacatccacataatcaggtatcactgattgccacgaaagacacggtttctccgtatattgcccggaattattcgacagacatcacaagccttataaataatgatattgccatcgttgatggcgggaagactcgttacagccattccctgaaatggagccaggctatctggggtaagggttctgttcgtagctatttcactgacagtggatgtcagtcccgtggggggggaaccagtaatgccatttattttagccagcagtttttaagctgtaacgaaaatccagtgctaagaaacagtgaaattggtatttcgcgaatcgacctcgttaataaaaagggttcatttaaccgtatcgctgctgattatcccgtttctgttgaccgggtggatgtgtatgtcagtttcagtccggtggacgggaattcagcacgggttgcgcagtttatcaccccgctgatggatgcgttcaggatccagaaaattatgcccaataccgataacatttttcttgtcaggagcaagacaggagcaaatgataacaaatggatgttattgaataaaaaaaatgggttaccttcagataaaaagacaccaccagtcgatctggccatgttaagtgacctgcctaacttagttggtaagttacagaagggttatatctatgcagtccgatttacctttgatggtagtggcgactatttgcgttctgatggattaaatgcagcgacgaaattatgctggaatgcctctgacggtaccgctggtccttgtctgacgtctccttcatcggattctctggtattaaaacgccgcgacaattcgcgggaatttgcgaatattcaggttggcaatattatttcaacaattaatggtgaatataatactgctccaaggatccagtataagacattcaacaatgatggtagggtgattccaccggtttacttgcataataaaggtaccaaggacacacctgattatgagctatgtgcagtttctggtgccgcttgtggtttggatgttaatgaaaataatattgccgaaactggtaatggagcgatttctgttaaattagaaacctgtcccgtagtggatggctttacgcggaaagggactgtgggtgatcatcgtttatatccccggattggtgcggcggtttcatccgttgtctccggtatatataagaatggtaaagctgttaatattactatgccagcgggaatattcagtaaccaggcggatactttaactaatatgaagaaagccccggatttatcaattaaccgacttgggggcgtggtattacaaatcagggaatttcaggattcatggcgaatttccggacttgtagcttctgaagatatgaatccggtcgctcagagtcctggtgcattgatgtattataatccatcctggctgtcagtaatgataacaacctggtgcagttcggttcctcagtcctga

SEQ ID NO: 385528 - DNA, 765 bp, Salmonella enterica
gtgaatctactcaagatggctgagacgcgtaagaaacttagcgagaaactgaaacattaccgtgcactgaaaaaacagcgtggtatgaccttactggaaatcattatcgtactggggattatcggtactattgccgcaggtgtggttgtcctggcgcagcgtgcttacgacaataaggctatgacagacctggttaccaacacaaatgtagtaagaactgcaattaaagaaacatggggacctacaggggtttatcctgatgaacaagtagctggaacattagctttaacagaagatacaatcaaaactgttaatggtgctaacacgcctgcaattgcaacattggttcagttaggtaaactttcaacctccgaggcaagaaataacatttccagtaacttctttaacgttggtaatgctcatgttggaaatctggcaggtggtgcaactggtacagccgcagcaaacagagcctatttcatagaagttaatggtctcgatcagaagcaatgtcgaaatattgtgttgcaggtcgggaatcaatgggattatgtgcaaataataaacgctgctggtggtacgggtaattatgcctcgcctgaccatatagatttggctgccgctacggcggctataacaacggcgggtgatggtggggttattcgttcccttgcaaatgccggtaacgtaacaatcactccggaaactatcgcaatggcttgttcggattcagcaaacaacagtcttgtactgggtagccgttaa

SEQ ID NO: 385529 - DNA, 633 bp, Salmonella enterica
atgaaagggatagagcaccgtatattagctttgtttaataaatcgaattttcaggagactggcggatctgatcgctacggttgtttcagcatcggctctccatggcaaagcaaaaagtttaaaatcaccaacaggtctgcctgcaacaacgcactcaggcaacgtggttcactgactgtctggcctgatgagtctgccattgccgcatggaccgacaacgcaccgtctgaaggttgtggccggccacttcactacactgatatggctattaccacggttctgatgatgaaatgcgtgttcaacctgccgctccgggctttacagggcttcgttgactcaatttttaaactgatggaactgccgctgtgttgcccggactactcactggtcagcaaatgggcaaagagcgtcaacatcaacataaaacgccaacccgtggtaaaatctcgcatctggtcatcgacagtaccggtcggcgaaggcgaatggaaggtcaggcagcacagggcagataagcgtagagtatggagaaaactccatctggcggcagacagtgtcaggcatgagattatctgtgccgatttatcgctcagtggaaccactgatgcgcaggcactgccgggggttgattaa

SEQ ID NO: 385530 - DNA, 1080 bp, Salmonella enterica
atgaaatttaagagaatggcggtgcttactttattcgtatccggagtgggtgtcgtcactgaaagtatggccgcaacggatattatatttaaacctctttccgaaatcactacagaggacgccctgagcgcggctaccggtggtgcgtttaagggggcattaccatcgtatgaaaatgacggtaatgaaaatacgaccaccagggcaggcctgcggatacgcaaaagttcggtcattgtggctctccagcataatctgggtattgatgttgccggtcacctgacggatgtcacaaaattcgtgacggcagtaaataaaattctgccggctgataaagcgctgaaagagagcgatcttgttaatctggataatgtggtgatttctgcccagccgggttcgcaggatgtactgaccgatctggtgcctgattcaaaacagtcccccgttgtcgatttgcaggttcgcttcacgctaacggcgaaacccggtaaaacgatgggggaacaggataccggccagcttgtactcgatgggatgacgaaagttaaactgacagactatcgccgcgtggatcagtccactattataccaacaaagtcaccagtacatatcactgtcaaagggagtaaacctgcgcatgtgactcccgaagcactggtaaaaatgctggataattattttgatattaccgcgccatcattcgccacgcccctgttccctgtctggaatatcgatccggccagtaacatccccttgtttactgacggatccactggcgagccggtgaagcattcgctgaaacgtgaccagattgacgcccttgcagcgatgtataccggcagtgacggaaaaggttacggagactttggcaaagcgcgaattgaaagagccgtacaaaaaatcagttttgcgtcggcatccggtcagaaaatcaggcctgtcgggaagggttacgaggggaattatgacgtgactatcacatttatccagcactggagctggaacagtgccccttatacagaacgggctgcagatttcacgctgaagaatgtccccgttatagttagttttaagaaatag

SEQ ID NO: 385531 - DNA, 159 bp, Salmonella enterica
atggatcggacatgtctaccgtatgaaggatcgtattctctcatcgatactattcttggagaatttcctgagaatgccagcataaaggtagtctggatgaacgccggtcgtcgcagttggtttttaccgcctgtcatgttgatcacaaaatgcgggtga

SEQ ID NO: 385532 - DNA, 189 bp, Salmonella enterica
atgagtacgaaaaaatacacttgcactctcctggctgcattcctcagaattctaactgccgagcctggttgtctgaatcaggttggttatagtccatttgtactcttttatccgatgttcattatgcccggtctgtgtgtgccgggttttttttgccccggaggggtttaccgcaatggcagcgcttga

SEQ ID NO: 385533 - DNA, 582 bp, Salmonella enterica
atgtccgtttttaacaggccgtataatcaggaaatacgtattacagatgtttgccgcttcgcggcgtcacttggtactcgtttcattcgtacacaagtgacgccgcgtgtgctcagactggtcgttatatggtccggaaggtgccccaaatgttgtggcgtacgtcaacgttttcgaacgttgaacgtaattcacaccaaatggcggcatatccgtacatgcgacggattgtctgaacaggcaactcaaaaagtaaaaaaggttatacggttaagaccgttactgaatgagggtggtcacaacattccggtaaaacaatatattaattacctgccggaaagactgctatctgtagattcaaggctccagaggttagtcatactgacctccggactgaagtcacaacggaacatcagcaaagtaaaactacgcccccgtcacaacagaaacttctgtcgcaacgtctgtttccaggggttaacagacgtaccgtccacagacgccacctctcaggcttcggtagcattggcttgggtcacccgaaggcgtcagtctcagacccgatatgactttggcttgtga

SEQ ID NO: 385534 - DNA, 273 bp, Salmonella enterica
atgattttctccggaaaaaaacggaaaaaacattcactggttgcaggaaaaaagtttccctgcaaaggcgtaagagtcaaaaagcgcctgaagtcacaatgcttcagtaatgtaatactacgcccccgttacaacagaaattcctgccgcaatgtctgtttccaggggttaacagacgtaccatccaaagacgccacctttcaggcttcggtagcattggcttgggtcgcccgagggcgtcagtctcagacccgatatgactttggcttgtga

SEQ ID NO: 385535 - DNA, 585 bp, Salmonella enterica
atgcgcactaaatcattattaacaattgcccttgctgctgctggtatgatgtatggagcttctgtatttgccgccggcacaacacctacaacaggcccgttcggtaccggtaaaattaccttcaccggcactatcaccaactctccctgtgatatcgcaccaggtgatgacgctattgccgtcccgcttgggcaaatttcttatcgccacctgaaggctgctgatgatgtttcagactcaaagccgttcactattcatcttcagaactgtgcatttgatccggatgattcaactaccaataaaaacccgattggcaaaatgtccaaagtcaccgtgtccttcttaggtaatgccgatgcaaataataaaggttatgttaatatcggcaatgctcaggacgtcgctgtccagttactgaaaagcgacaaccattcaattcttgttcccaacacagatgcagatactcagcaactgcagactggcaataacgagcttaatttcttcgcacgtgtggttgctcttggcaccaacgtttccccgggaactgttgagagtaccgttacctacaccctgaaatacctgtga

SEQ ID NO: 385536 - DNA, 1131 bp, Salmonella enterica
ttgaataaaaaagtgctgctcatatgcctgttactgtttacgacctcggtccgggcagcactaccacttccgttgatgctgaacggagatggtgacagtgttcaaacccatgcctggccagtgatgcccccgctaccggagcctgcagggttgcgtccctgttgcgcgtttggttataacctgcacgtgaaggtactgaatattccggtaccattctggcaactgaataatatcgtgatggcaggtaacctgggcggacaccattataatgacaattttctgtccggtctgagttctcttgtcgggtttggcagcgagcgtaatggcattatctatacgtcccatgggggatttatagataccgcacatgtgcgggacagtgccgatatgacggtctttttattcactcacctgttaccggaactggggcaggcatttatcctgagccctgaggacgagctggcacaacgccggattgtgttcagctcttttacgcctccctcaactcccggtgaacgttatgctctggcagcatggatggcagcacatattgcctttcaactggctgcatggcacgaaatagcccagtggtatggatatgaatcggttccgggttttccggaaggcatttccgcattctcaccggaggatctctattcaaacctgctgggtacgaggcttgccgtatcgctgattctcgatggacagacagctacgttgggtatgtataatgcggcaatgcagactgctctgaaccaggcattaaatcagttgggaggccgcccggagaacatcacccgttttcattttgacatgctggatgggatctggtggaacagtttgcgaagagtaccggaaaaatttctggtacttcgacgaaattatgatgtcagcgacagtcgtacacccacaagagttccgggagagcagacatcacaactgcgcctggctctgccacattactggaagacataccatcttgatatgctggaggaactacagctctggcccggacatgaaatggcacgtttgccggtaccatatgtctattatactgcaactgattttcccgctctggcagcatttgcttttgaacaggatgaggttagtcattacaacaaagaatggtga

SEQ ID NO: 385537 - DNA, 351 bp, Salmonella enterica
atgaacgccgataatggtttgaataatgctggtcatatggtcttcccgaaaaaatacgacattactgctggtaatacacaggatgtgaatgatcgtctactgacaggaggaagtatcagcggcaactgcatggatgcaattattaaaaacagcagcgcacagggtaccctacttaccattggtttgaatgattacggtgtatttgtaggtaaaagctatcaatacgatttttttctacagcgttacgtgacatgtgcagacgcattccttatctgctcattgggagacattactcctcctgactgtcgccagggaatattcgatttctgcttcatgctttgcctgcactga

SEQ ID NO: 385538 - DNA, 312 bp, Salmonella enterica
atgacaagactgaataacatatatttctcacttctggatatacaaaaaactcgctctgacgagagcaaaaaagaaaaaatatgttcgcttattaattatgtagaacaaataaacaaggatgtaaaaaatctacgtagtaatcttgaacatccatatctgaatgaaagtaagattattcatacgttgcttgaaattcagatacagaccagattaatgcaggtcggtgagggtaagagatttcaggaaattgccgtgcatctatttaatattcgagtgctggcagagaatgcattatcttctatgaacttctaa

SEQ ID NO: 385539 - DNA, 360 bp, Salmonella enterica
atgacaaggctaacagagatatacaaccgacttgacgtcatagacgaccttatagagctacaaaaaccgcatttttaccatggccaaattatcatcgatcaggttacggcactcattggctatgtggagcacctgaccgccgttatgtgggagcggcagcggcggcacagattaacggattttgaaacacggtatattcttcctgcacttgatgagatttttatcctgatgggcgaaagacttagcaagggggaaaagcccggcactcagttaagtaacaacatagtcgatttcatcggaattgttgcctggtggatgcttcatatagagaacagcagcacaggaagagttggttattga

SEQ ID NO: 385540 - DNA, 669 bp, Salmonella enterica
gtgacgaatagtaaaaatagccggttaatggcattcataaaatgccactggcgatggtgttgggtcccggttctcctggttctgggtttctataacgggtacacagcattgctggccggttgtgttagcctggcgatcattattgttcaatataaatccggtggcagtgagtggtacgggacgcctttattactggtgctcactgtgacttcttttttactcatcgtgaaacctgtttatgacgttttaccatttttcagtccaaacaaacatgctgcgctcaatgatctgtttatgactattcagaaagatgcagatcgctgttatccggctacggaagaagaccgcgtgcagtggctgaaaataaaggatagttcacccatgtcatgcatgaggcagattactgaggagccacgggaaggagtatacaggttacagcttctcttctggggggtggtatcaaacacattttctctggcctcgacagttttcccagaccccgcatatgaatccgagtgtttagcgttactggataattatcaaaggatttgtccagatatacctggctctgcgtttgatgagcagctaaaggaatttcaaaaacagtatggctcaatcaacgcagtccacccggggatgatagagcaaaagacaggcgacagtcagtaa

SEQ ID NO: 385541 - DNA, 171 bp, Salmonella enterica
atgtacaataagatgtgtcaggtcaaatctgatctaatacattttactattgtgttgacactaactatcagcaggcacgaaaagataatggctcgtactgcaaaagagcacctgcaggtgcctggtaacacctatcttattcaggggtttaacgacccctattttttttga

SEQ ID NO: 385542 - DNA, 183 bp, Salmonella enterica
atgactatgagggttgtaatggtcttttgccaaagtgttatatatattcagataaaaccggtaatctttggcctggatatcagtactatcgtaatcactacgaatcatgggatgaatatcaagaattggttgatggtatgcctgatttttatataccacagattacatctgttaataaaatga

SEQ ID NO: 385543 - DNA, 1761 bp, Salmonella enterica
atgacaatatataaatttttcacagaacaatcatcgttcgccaggctgagtaaactctttatttctccgctgttcctttctgcgtcgttactgactaccgccgttcaggcagcttcgtctgctcctctcgctgccattgagcgacagaatcagctcatccagaatcagcagcaggaacgattacgggaagaccagcaacgtgcgttaggtgaacgtcccgcgccgggaggcaccaacctgaataacattaaaccccgggtcgcctctcctgatattggtgtgcagtgccggaatatcagccggattgagatcaccggtgatgaaaaaatgataccggctaaactgctggcgaaagtccggcatgactacactggccgctgtatctccgtcagcgacattgaaagtctgctgggactgttgactaaagactttattgaccacggattcatcaccacccgggtctatttacccgtacaggatctgcggaccggtatccttaaactgactgtcgtcgccggaaaaatcgaaagttataaactggaaggggggcgtaaacacgccgtatggctgcgggctgcaatgcccggcagggaaggggatgtactgaatctccgcgatctggagcagggcattgatcagatgaacagcctctcatccaataatgcccgtctggatttacttcccggcgatctgccgggacagagtattgtggcgatacagaatgacagttcactgccggtacatctttttacgtccttcgataacctgggatctgatgccaccggacgtaatgccctgtctgccactgtaaccacggacagcctgctgggactgaatgagctgatcgccatcacgcggcgccagtctgcgttcccgttttcaggcgtgcaccgctctgactccaccgccgtactgatgcagttcccctggggctacaacaccttatccgttaactacagccagagtaactatatcaacgggctgtctcttcccggcggagtaaaaattaaaactaacggaaaaagtgataactggtatctgggggcaaatcatgtgctgttccgtaaccagtcatcccgggtggggctgtctgcacatcttaacacccaactgaaccagaactggttaggaggggaactgctgacaagcagcagccgcaggctgacgtatctggatgcgggcgctgatatgttcagtattttcgccgggggcatttttaacggcaatattgccgtggttcagggcgtgccgtggttcaacggcacgcgcgatcccggcgatctgcctgatgagtatccccatgcccagtccagaaagtttaccctggatatggtatataaccggactttttacaccggtaataccgggctgggcttttcgaccagcttcagcgggcagcttgctgccgacaccctctatggcactcagcaaatcctgattggcggcccctcttcggtgcgtggtttccagaatatgtcgctcagcggggacagcggttactacgtgcgcaatgatttttctgtttcgcgcgatcttcccggggggatcaatggccggctttacgccgcttttgactggggtgatgtcaccaaccgtgccaccggcgttccctccggttcactgtccggcacggcggcaggtctcggcctgtcgtggaaaaccgtcagcatcaatgccttcgtttcacatgcggttacagtaccttctcacgaataccgtgaaggtaccctgttcagcctgctgatgtctgcttctttgtga

SEQ ID NO: 385544 - DNA, 1374 bp, Salmonella enterica
atgaataaacaacttcacgcccgtcttgcagaactcgaaaaactgctcatcgggcaggctgaggcgctacgtcaaaaagagactcagctccgtcttatcgaagagacggaggccttcctgcgcacagcgctcgcccgtgccgaagacaaagttgaggaaagtgaacgcgaaatcgaacgccttcgtgcccagttggaaaaactgcgccggatgttgctcggtacccgttcagaaaaacttcgccgacaggttgaggaagccgaagccctgcttaaacagcaggagtacgaaagcgatcggtacagcgggcgggagacagatccacaggttccccgccagctcagacaatcccgacatcgtcgaccattcccggaacatcttccccgcgagataaaccggctggagcctgtcgaaacctgctgcccggagtgcggcggagagctggacttcctgggggaggtcagcgccgaacaactggagctggtcaccagcgccctgaaggttatccgtacagtgcgggtaaaaaaggcctgcacgaagtgtgactgtatcgtggaagcgccagccccgtctcgtcccatcgagggggggatcgccggtcagggactgctggcccgggttatggtagccaaattctgcgagcacacaccactttatcgtctgtccgaaatcctggaacgtcagcatggtgtggtgctgagccgggtactactctctaactggatcgatgcctgctgccgcctgctcagtgcggtggtggatgagctttatcagtatgtgatgaatggacgaaaggtttatgtggatgataccccagtgaaagttctggcgccgggaacgaaaaaaaccaaaaagggacatatatgggtctatgtacgtgatgaccggaatgccggttcatcagatccgccggcagtctggtacgcttattcgccggactggagcggtaaacatacccacgatcatctgcgtcacttccatggcgtgcttcagtgtgacggatataaaggttatgaagcgttgttcagtgcagaacgtgaaggtggtccgttaacggaagccgcctgtatggcgcatgcccgcagagggatcaacgacgtatgggaacccgcgcgaacttcggccacagccgaagaggcactgtcgcgcatcggtgaactgtatgccatagagaaagaaatacgcggtcttccggaagcggaacgactcagggtaaggcagaacagaagcaaaccgcttctgctggcgttatatgactggatggaggaaaaggtggctggtgcctcccgaaaagacagactacccacagcgttccagtatcttctgaaccgcaaaaccgggtacgcgatctgttgccctggaaagttgaactga

SEQ ID NO: 385545 - DNA, 174 bp, Salmonella enterica
atgcatgagggggcagagggagaattagaaagtctgtgtcatttcagtaaggggttctacgcaggaaccccggatttttctgttaccgaacgtagcgcccttacagaagagcatgaaaatctgtggggggctcctgccaggcagtcattttccaggttgattcttccattttaa

SEQ ID NO: 385546 - DNA, 816 bp, Salmonella enterica
atgaagcaaaaaatgaaattaagtattctggctggcgttgttcttctgtccgggtgtgtacactcttatactgaagagcaggcacaagatcgattgtcatctcagtccactctggcggtgaactggatgcaacagtcaggagaatacagagccttatcgtggcaggcatttaacacagctaaaaatatattcatgcatagccctgcttcgcctgaagagcgtaaagcggtcattgtggatattgatgaaacagtactgaataacattccctatgaagcatggctcattgaggaaagcaaaaattacagtgataaaacatggcaccagtgggtagcggcccggcaggcagcagctatgccaggagccgtgtcctttgctaattttgtgctggctcataaaggaagagtattttatatatctaaccgggatgcagttgattaccagtccacagtggataatttaattcagcagggttttcctgatataaacagggaaacggtgatactgaaaacggcagggaacacggataagacagcgagatttaaagatgtcatagctaaaggttatacgcctgttatttttatgggcgataatctgaacgactttaccggagaaacctggcataaagataacaaacaacggagacgttttgttgacgaaaaccatgagaagtttggcatgaaattcatcgtattaccaaatccatcttatggggactgggaggggggaatgagtcaacaatactggaagttatcccctgaacagaaaatgcagatccggaagaaaaaccttatctcctggaatgatgatgcatga

SEQ ID NO: 385547 - DNA, 699 bp, Salmonella enterica
atgaattttcgtatatcagcattgttaataacaggggctctgttcacgctcagttttcccattttttctgaagcccgggagggagcaacactggagcaactgacacatcaggcagcaattcactgggtatcggtacaacaactggaaacggtgctgaccgataaaaagcccgtcaacgtaggatttgacatagatgatacccttctgtattcaagtcctgcctttttttatggaaagagtagattctcccccgacagtatgaattttctaaaaaataaaatgttctggaatgaattaagtagtaaaggatgggatgaattttctgtaccaaagcagtccggacgagagttgattgaaatgcatctcaggcatggcgacaatatttattttattaccgggcgtccggcaccggaaggcgctaaagaagatctgacagaaatcattcagagggatttttctattcctgtggagaaactaaataaggttatctatgccggaacgagccggaacgcaaaagtggaatatatcaggaaaaatcatattactgttttctatggtgattcggacagtgacatactggatgcccgtaaagcaggggcaacaggtatcagagtattacgtcccttactctcaacaaataccccctttcctgtcaatggcagtctcggtgaagaagttgtggcgaactctcaatactga

SEQ ID NO: 385548 - DNA, 1125 bp, Salmonella enterica
atgagaataaatcatattaagctgttggtgctgagctcaagttttctgtgtagtacgatggcgggagcagcacaattatacagtaaagacgggacacatgtatcacttaacggtgaggttaaagggcgacattacttttccggagacaagactgttgatggagacaactctcaggtaaaactgatgcttagcggtgacaccaaaattaataatagactgaccgggtacagttattgggaatataatattcccgtcaacaataccgaaggtagtaattcgaaagccacaacgcgaattgcttacgctggtataaaaattgatgatgataactcgcttaactatggtcgtaactatggtatcatggatgacataagtggctggactggtattcctgtaccggaatgggggggggaaagttatgatggtatagataattttatgacctaccgcacaaataacttgttaacctacagaaataaaaatttattctcttttattcccggtctggaattaggtatacaggctcaggggaaaaatgatggctggaatgatactgagaatgaaacgggacctcgaagtaataatccaagaggagttgcccatcaaaacggaaatggtgtcgggtcgtctctgatttatcatatcaccgacgccctcagtgctggcgcatcatatgcaaactctgaccgcactcttgagcaaaaacaggatcgcagaggagatcgggcaacgggatggaatgcaggttttaaatatgatgcaagcagggtataccttgctgcatactatggtgctgttaataatatgcattatattggtagtgccgatggtttttcccataaggcaagagggtttgaagtacttgctcagtatcactttgattccgggtttactccttctgttttatatactcagggaactgccttaaatctgcataatgatgattacagtcataatatggattatataaaatttttcgatttggcagggatgtataactttaataaaaatcttgagttgattgttgaatacaagctcaatctgttaaacaggaacatgttcactgttgcaaaccatatcagtactgatgatattaccaatgtaacgctgaaatactccttctaa

SEQ ID NO: 385549 - DNA, 330 bp, Salmonella enterica
atggaggcagatagtgcactcgatattcatcactgtcgcccactcctgaaccagctccgcacggtgatagcctgcaccgtcgaggatgatatgcactttctgcgttatcgggtacgtttcccggatggctatgaagaaccgacagatattaagactgtcgatggtgtcatattccctgataaccgtactgccgatgtcgttcaggttcagggcacccatgatgttcagacgggtacgactgcctgtggtttccactacatgggctttcttcccggcaggcatccagccataagccagttttgttctctgtttcgggtgaaaacacgatga

SEQ ID NO: 385550 - DNA, 1332 bp, Salmonella enterica
atgaaaatatctgacgaggggggacttcggtcatatctggagtcccaaccattaaataagtttcatatcatattaaccataatatgtttgctaatcttaacattagacggatttgacatgaccattatgggatttgttgcaccgtccctgatggatgaatgggaaattggtcatgatgtgcttggggtagcgatgagctcggggctgttggggcttgcctgtggtgcgctggtcgggggaaccatcgccgatcaatttggtcgaaaaaatgtcatattttgtgccgtactgctttttggcgtcctatccattgcatcggcctggtctcctgatatcgaaacattaatcatcctgcggtttttgaccggtctgggtctgggggccgcacagcccaatgtcgcaactctgattgccgaatatgcaccggtaaaatataagtccacattaatttgtattatctattgcggaataacattaggaagcgcattagtcggttttattgccaaagaagtggttcctgcctttggttgggagggcgtatttatcgtcggcgggatattgccgatcatatccctcattctgattgcaatatatcttcccgaatctattctatatctgctggcaaaacaaaaaaacgccaattatgtcgataaagtaatgaagcggatcaccacggctaatgattatacgattgaatttaatccagccaggtcagacgacactgttgcacatcagcaggctaaatttacgccgattgaaatattaaaacagccctatttactttgcacacttagtttgtggctcggcttgtttatgaatctgatgtgtgtgaattttctaagtaattggatgccattactgatcagagagagtggatttacccttacggatgcggcacttattggtgctatcgcgcaggtaggcggcacgttgggcaatatttttatcggggtagtaatggatcgctggggttaccataaaaccatgtttctgggtatggccagcgccgttgttttctcattattgctgacacagtaccacagcactctgatgattatcggtattctggcctttttccttggtaccgtggttaattcagtcaacacaggctggacgtcgttatcagcgatctactatccaactaaaatcagagcgacaggaaccagcaccatgaccgccattggtagaacaggggctattctgggtgcctttatcggtgggttaatactggcaaccgggattcaggctattaatatgttttatttcctcgcgcttccgctctttatttgtgctatcgccgtgctgttaaacaagaaattgattacgcaataa

SEQ ID NO: 385551 - DNA, 2076 bp, Salmonella enterica
atggcagaaattaataaaactatattagatagcttaattcatgtcaaacttcctaaagggttcaccagcccgaaagaaacagaacatcgtataattaacggattatctgtcccgatatataaatatgatgcgttagtcatcggcactggcgctgcaggattacgtgcagccgttgaattaaagagacgtaatgtcgatgtgctgctggcaaccgccggattgtataaaggtgcttcggcctgttcaggttctgataaacaaacgttatttacggcttcaacatcaaagggcggcgataattttttaaaactcgccgctgacttaagtatcggcggatgtatggataaagatgtggcctatgttgagtccgttgggtcggtaaatacgttggccgggctgcaatttttgggactaaatttgcccgaggatcaatacggttccgtgttacgttatcaaacggatcatgatgaaacaggtagagcaacaagctgtgggccaagaacatcaaggttaatggtaaaagtattactggaagaggtgcaacgtcttgagatccctgttctggagaatacaacggcgttaaaactattagtcagtactttcagcggctcagaggataaatgtgctggtgccattgtaagtattaatcagcccacggtacagaataaatttaaattgggtatcctcctctctgcaaacgtagttctggcaaccggcgggccagggagcatgtatcgcgatagcgcttatccccgcggttgttatggttcgctgggtctggcgcttgacgcaggaataatgctgacgaatattattgaaagtcagtttggcattagtacggctcgttcgacgtttccatggaatctatcgggtagttacgtccaggttatcccttatatttattctgtagattctgttggtaatgaaataaattttctcgcggattactaccggacaactcaggagctggcatcaaatatattcagaaagggatatcagtggccttttcagtcttcccgtacgctgtcgtatggctccagtctgatcgatatggcgatttttaatgaaatacataatgggcattgtgtctatatggattttaatcgtaacccgcagcccgtgccgggtgacgcccctttttctttagaacgtcttgatgttgatgttaaacaatacctgagcaacaataaatgcgatcagccgttaccgattcagcgactaaatcacattaatccgctatctattgagctgtacagaatgcatgggcatgatatttctacaacgccattatcattttccataaataatcagcatatgaatggtggtattgagatagatatctggggagagagtagcctgaaaggctgtttcgccgttggcgaagttgccggaacccacggtgttacccgtccaggaggggcagcattaaattcgggtcaggtttttggcgtccgggttgcacagaagataacgaataaccttaagttaaatacacaacaggctgaactcgccaacgaatatatttcctccgtttttggtgaaataatatcttattgtgaaaaaagtattacttctgcaaaaatatcactatctgaaattcaggatataatcagaaaaagaatgtcggataaagccggttttattgttgcagcgaaggatattaaggatgaactatccgccgcattacaactgttttcggaaattgaaaaaaatgggatgaaaattaatgatgcaaaccaactaacgaacctgcttttgtggaaacattttgcgctgacctcctcggcagtattaagtatgttgcattattatatttcggccggtggcggtagccgtggtgcgcgtattgtactggatgaacagggggatgccgtgccatccgatcgttatggcattatcaataagtggcgtttcagaagcgagaaaatgcaggatcgagagaaaaaatatctcatcacctggtcaaatggcacgtttcacaacaggacgcgattaattaatccggcagtgaatctggacggggttttctttgaaaaaaactggcctgactttttgctcgggaaaatctatttgtaa

SEQ ID NO: 385552 - DNA, 846 bp, Salmonella enterica
atgagcaatgtaactcaacgacctcactcatattgtattaatacggcgacggcaggattcaggatttcacttcctgaacttattgacgcttgtgcagcgagagggatcacgaccattagtccgtggcgaaaagagttcaaaaaaacgcctgtacaggcaatatcgaggcaacttaaaagctgccatatgtcggctgcaggtctctgtcgtagcacctattatacggcgcagaatctgtcagacaggaatgcggcaatcgatgataaccgtaaagctctagatttggccgcggaactgcaatgtgcacattatgttcaggtcgtgggtggtttgcccggaggtttaaaacagctggcgcaggccaggcaccaggctaaaaacggtattcagcagttactggaacactcgcgtcaggttggcgtccgtatcgcattagaaccattacacccaatgatgaccggcgatcgttcctgcctgaataccttatcaatggcactggactggtgtgatgagctggatcctgaggggacttacgggctgggcgtgattgtggatgtttatcatgtctggtgggatccggacttatacaaccaaattaagcgcgcgggtcatcgcattcttgcttttcacgtttccgactggctaatgccgacgaccgatcttgtgaacgatcgtggtatgcctggagatgggataattgatattccgttaattcggcaatgggtgacagcagccggatataccggtgtcactgaactggaagtcttttcagaaaataattggtggagacaaccgctggaatatacattagagatcgcgctggcacgtttatccacaagctgttaa

SEQ ID NO: 385553 - DNA, 783 bp, Salmonella enterica
atgagctccaagcctgtaacaattattaccggggccgcaagggggatcggacagagttgtgccatcgccctagcgaacgccggttttaacctgttaattaatgatctgccggataaagaaagtcgcgaaaaattgtctcaggtaaagacagaacttgagatgtcaggtgccgaagttgaatgtttttgcgccgatattgccgatattactctacatgaagtattactggatatcatagaaaaaagatggggccgttttgattgcctggtcaataatgcaggtattacggtaaaaaaaagaggggatttactggatatcacaccagaaagtttcgatcggaatattcaggtcaatacccgtgcgccgttctttttatcccaggccttcagtcggcggttgattaaacaaaaagaggatccgcggcagcatcggtcaatcatttttattacctcaattaatgcagtcatgctggcgatgaaccggggagaatacacactggcaaaaacagcatcttcagcgtccgttaaactatttgccacacgtctgagccctttatccattggcgtgtatgaggtacggccgggtctgataaaaaccgatatgaccatccccgcaacacaatattatgatcaactgatcgccaaaggacttgttcctcaggggcgctggggagagccggaagatgtggcctccactgtcagggccatggcggaaggtaaattacgctatacctgcggtctgtccgtcctgattgatggcggactgagtatgccgcggttttag

SEQ ID NO: 385554 - DNA, 603 bp, Salmonella enterica
atgcctggattcagttatggtggtaaaggtgatggtacaaactggagttcagaacggggaagtggtccggagcctggtggtggttctacggggaacagcggaaacaacgacagagccaccgccacagctcccgacagtcagattcaggctatccggaacgataagaccgcgatggcaaaaatctcggatgtgctgaaggcggcgcgcaaaatcaatccaaatgtccaggtcaccgtgatgaggttgacgccggatggtattatggtcgttagtctggaggggctgaatgcagaccaggctaaacaggcgggtctcaccgggctggtgatgggtatcaccgtgcctggctatgtcggtgctgtaggctatattgataccggtcataagttcccggttaaaaataccgaaaaaaaatatgcgacggaaaatgactcttcactggattacttcgtctcaagaggatatttaaccaatacaatacggacctataaggactggcaatccggtgatgagagaacttactattatgcagccaagaaggcgcctttacgattactccatcatcttacggtggtgacaaaaggaaacgtggaaacctactga

SEQ ID NO: 385555 - DNA, 678 bp, Salmonella enterica
atggaggcgcttaagcgtaacaccgctctgatccatgatggcgtcgagcgcgagttaacaattgcggtgaacaatattattcccgcccctttgttggtggcgtttatccacgatttcgaacgacaattctcctcgactactctgacggtctgccttgaggtatacaacggttgttgggacgcgctctacagcagacgtgccgatctggtgattggcgcgccacatgccgtccccagtactgaaggtattgtcagtgaacctgttggtcagcttgaatgggattttgtcgtcagcccgcgacatccgctcgccagtgagcgtcatccgctggaaaacgctgaacttcgccagtacaccgcagtgtgtattcgtgatacatccgtaaattttacgccgttacaggcatggttactggagggacaaaaaccgctgttcgtaccagactttgctacagccattgcgcttattgaacgaaatgtgggtattggctatatcccgcaccatttagcgctcccgctattaaacaatggcaaactgttgaaaaaaccgatgcgcgagcataaacatgccaccagattatttctggcagcgcgttcagacggaatggggaaagtatgcagttggtgcatggaatacctgcaacatccggttttacgggaactgttaaacaaagggtaa

SEQ ID NO: 385556 - DNA, 141 bp, Salmonella enterica
atgttcatctctgacgaaacccttcgtgttattcatctggtcgccaggcatcagagcatcagcatcgccgcagaacaattaaataaggtgccttcagctatcagttacaccattaaaaaagcggaagaaagcctggggtag

SEQ ID NO: 385557 - DNA, 1224 bp, Salmonella enterica
atgcctaaaacagaagagagtatgaatactgcatcaggcttgagaattgccatgattctgttggggatcgcagtgacaccggttttgctgtcgtcctcaagtcttggcaatcaactctccagtagctgtctggttactgtggtgctgttgggggggttaatccttaccatccttgcagccatcacgatcagcgttggcgaaaaagcccgtctgccgacatacggtattgttaagtacgctttcggtgaaaaaggggccattgctatcaatatcctgatggcaatcagtctttttggctggattgccgtgactgcaaatatgtttggtcactctgtccatgacttactgttacagcacggcataacgcttcctgtccctctgctggtgatagcgggttgcgtggtattcgtcgcatctacggcatttggctttgccgtactgggtaaagtcgcacaggtcgcggtaccgatcatcgccttagtactgtgctatatcctctatattgcgacacacagcgaagtcaccgcgccagcggaagttgtcagcatgaatacaggtgtcgctgtctcgaccgtcgtcggcaccatcatcgtgcttgtcgctacgctacctgatttcggcagctttgtgcataatcgcaaacatgctctcatctctgcggctgtgacgttcctaattgcctatccgctactttactgggctggcgcaacgcccagcgccctcagcggtcagggttctctgttgggagccatgacaatatttggcgccgtattgccaggcgcgctgctgctgatctttgcctgtgtaacagggaatgcaggaaatatgtttcagggtacgttagtggtttcaacactgttaacccggttccctaaatggcaaattactatcgccctgggtgtactctctgcgatagtcggaagtctggatattatggcgtggttcattcccttcctactgttcctcggtatcgcgacgccgcctgtagcaggtatttatattgccgactttttcctctatcgccgaaatggttatcaggaattggtcctgacgcaagagccacagattaaggtactgacgtttgctgcatggatccttggcgcggctgtaggctttatgacgataaaaggtctcttcactctaaccagtattccttcggtggattcgattgttgtagcttgtatcgcttatatactgttaagtcgactgggccaacatcattag

SEQ ID NO: 385558 - DNA, 393 bp, Salmonella enterica
atgactacgacaaccctactggccgtcaacggaaccctgatgcgcggcctggaactcaataaaaatatgcaaaaagcaggcggtgtctttatccgcgaagaccgcactgatgcgcactaccgtttgtggagcattaacgaccaacatccggggatgatccgcgttacccaaggtggtactcacgtggctctggagatttggcaattaccactggccagttttgctgaactgctgatgagtgagccagccggactggcaataggcaaagtcaaactcgaagatggcagtgaagtattgggtgtactggcggaaaactggctgacagaagggcaacgggaaattaccgaattaggaaactggcgcaaatacaccggtcattttcataccgtgtaa

SEQ ID NO: 385559 - DNA, 960 bp, Salmonella enterica
atgaataaacctctggctgtcgttgccgttggtggcaacgcgctgattcaggacgatcggcgtaatagtatctccgatcagtacgatgccgtcatggaaagcgtgaagcacattaccgatatggtcgaagctggttgggacctggtactgactcatggcaatggcccacaagtgggctttattttacgtcgatccgagttagctagcagtgaagtctcgccggtcccgctggattatgcagtcggctatacccagggcgcgatcggctatatgtttcagaaagcgctgcataacgaacttgcgcgccgcagcctccataagccggttgtggcactcattacgcaaacacgggtcagccagcacgacgacgcttttgctaacccgagtaaacccatcggtgcatttctggacgaaaacactgcacgtgaacgccagcaacagcctggctggacgatgatggaggatgccggacgcggctggcgacgtaccgtaccgtcgccaaggcctctggaaatcattgaacgagacactatcgcgcaattagtgaggctgggttatatcgttatcgcctgcggcggtggcgggatccctgtcatacgcgatgcgcatcaccagttgcagggggttgaggcggtgatagataaagatctcgcttccgcgctgcttgccagccaactgggagcggacttgctggttatcccgacaggcgtggaaaaagtggcgattaacttcggtacaccacagcagcaatggctggaaacgctcagcatcgcgcaagccgaaatgctcctgcaggaaggtcagtttggcatcggcagtatgcagcccaaagtcgaagcaattctcgatttcatcaatgccagccgacaacagggcaagaacgccagcggtctgatcaccagcccgcaagggatcaaatatgcactggaccatcaaaacggcacatggataaccctttag

SEQ ID NO: 385560 - DNA, 1422 bp, Salmonella enterica
atgaatactttgtttaatcagccgctgaaagtggtaaacgccggattacagagtttcgccaacaatattcagaaagtcggcggtgaagcaatagcgttgagctggcagccgccctcacagggagatgtgaatgccggactggagctggcctctttaatacaccatccgctggttgaacaggcgaataaaatcgctatggagcgctatctcagcgcccaaccggtactgatcgatgttatgcaggctcatgaagcaattccagaaatggctaaaagtaaacgtattcttcactccggtccccccattagctgggaaaacatgtgtgggccggtaaaaggcgcaatcatcggcgcaatgctctttgaaggatgggccaccagccatgaagaagcggagtgtcagattctggcgggagatatcgaacttgaaccgtgccaccattatcacgctgttgggccgatggcgggaattatcagtccgtcgatgccgctgtgggtcatcgagaacaagactaacggtcagcgtacgtttagcaattttaatgaagggctgggtaaggttttacgcttcggagcaaacaatgatgaggtactcaatcgcttgtactggatgcgtgacgagctggcgccagcactgaaagcggctgtcattcgtcttggcgaactggagctaaaaccactcatggcccaggcgctgcatatgggcgacgaggttcacaaccgtaacgccgccgcgaccggcctgctcatcaaacgcctactgcctgcgctgttgtccagtaatttacctgcagaacagctgcagcgaacggtcaccttcattaccagcaatgatcacttctttcttaatctctcgatggcggcctgcaaagcaatgatggacgcggcaaccaatgttcctttcagttccatggttaccgttatggcccgcaatggcgtgaattttggtattcgtctttcgggtactggcgaccagtggttccatgctccggccaatgcggttgaaggtttatttttccccggctatggagtagacgatgccgccgccgatcttggcgacagcgccattaccgaaaccgcgggcgtgggtggttttgcaatggcttcttccccagcaattgtgaaatttgttggcggaacacctgcagatgccaccaacaacagcagacgcatgcaggcaatcaccctgggcggcaatccggcatttactctgccagcactcaattttgccccgacggcggcgggaatcgatgcacgtaaggtagccgacaggggtattttaccggtcatcaatacggggatcgcccataaacaggcaggtgtcggtcagattggcgcagggatcacgaccgcgccaatgcgctgttttgttgatgccattgccgcgctggcgcggatcgtcgcacaaggagaaaaaccatga

SEQ ID NO: 385561 - DNA, 1560 bp, Salmonella enterica
atgaaagtaaagcataaagttttcagtaatctctatcaagattccgtatccctgatgcagatttccgcccaaattagcgcgttaccaggcattaagcaggcttccgtggtgatgggaacatcaacaaatcttgagcagcttagtaacgccgggcttggcgacaacgtcaaagcagggccaaacgacctggtcatagcggtaatgggagaagaggatatctgcgccgaagcgctggatatcgcggagcaacgcctgaccagtaaacgggaagatgaaggtgacgagggtgtaaaaacaccggatatagtgagtatagaaatggcgctggagaaagtgcctgatgccagtctggcgctgatttcggtccctggtgactacgccgcggcggaagccattaaggcgctgaaccttggtctgaatgtgatgatgttcagcgataatgtcagcattgttcaagaaaaagcgataaaaaacctcgcacgtgatcgtaaccgtatcgtcatggggcccgattgcggaaccgccattattaacggcattccattgggtttcgctaatgtagtaaaccgcggtcatatcggcgtggtaggggcctccggcacgggattacaggaagtcacctgtcgtattgaccaactgggggcgggtatctctcaggcgctcggtactggtggccacgatctgagcgaagacatcggcgggatttcgatgctgtttgggctgcaagcactcatggatgatgacgccacccacgtcatcgtattgatctccaaaccaccttcatcagtggtagctgaacgtattctgcaactggcgcagtctgccggtaagccggttgtcgtcaatttcctgggagccgacccacaaaccgttacgcgaccaaacgtaaccgcagcgacaacccttgctggcgcagcagaccttgccgtcgcgttgctaaacaaacgcccactaacggaaactcgctatcagccttcaccgtcagaccttactgcactgcaacaagcctgccagcgtttggcgccaactcgtcaggctatccgcggtgtttttgcaggaggaacattctgctacgaagcgcagctcatctgtcagcaaaacggttttaccgccgcatcaaacacaccggtgtcgggtaaccaaacgcttgtcaatatctggcaaagccataaccacacgctgatagatatgggcgatgacgattttacccgaggtaaaccacatcccatgatcgacccgacattacgcaatcaacgtctgctcgctgaacttaacgatccgcagaccgccgccgttctgttcgatttggtgctgggatacggtgcgtctgaagcgcctgctgctgaattactcgaacaactcacacagattgatcaacagcaggcaccactgatgattgctcacgtttgcggtaccgaaagcgatccccagcaaagaagccgccaggtcagcgctttgcgtgatgctggcgtcattatcgctgactgtaatgcccaggcggcgcaatgggccagcatcgtggcgcagattcagattgagaagaaggaagtaattgcatga

SEQ ID NO: 385562 - DNA, 813 bp, Salmonella enterica
gtgaaaggacgacacattctgcgggttcacagtgcatttccgcatgctctgaatctgcgttcagaagaagggcagcacctcacgctgctgtgtgcagagaagtatcaaaatctggcggatgcggcacggatcatgctgccagaatggtgggaatggcggcgtgagacagcaggatccgggacaattcggttagccgatggcgtattaatagcccagcgttttcgtgtagacctgaacgtggccacggtgtggcaaccccaactccgtcgtgagtcgctggctccggaaacctgtttgtggtcccaacggcactacaggacgctggattctcaactgctgctgttttgcctggaatataaggtagaaagtgcactgcaatggcagggaaatattctccagcgagggttaagtccacaggagtcgccggagcaacttgaagaacaggtaccccggttaatcggttacggcaaagggctaacgccggatggcgatgactatctactgggttatctggcggcgctttggcagtggaaactctctcccggtcttgaggctcactacatcaggttacaacaggctattgaacggcaactgccgcacacaacggacattagcaagcattatttgcagggcgcgctacaaggtcatttttcgcaaccgatttgcgagttgctcactcagcttaatgctgacgcacctacaacaacgattatcgcctgtgcagaacaggtcatgcagtttggtgcgacatcaggcgtcgactgcctggccggtttacttcacggcatgagaacgctgaacgcacaccattga

SEQ ID NO: 385563 - DNA, 669 bp, Salmonella enterica
atgacgcaacagactttccaggcccaaccttttgctctgccttttgatccgcataccaccgcactggtgatgatcgatatgcaacgtgactttgttgaggctggtggttttggtgaagcattaggtaacgatgtctcgttggttcgaagcgcaattgagccatgtaaaaaggtattagcggctgcgcgcgataacggcttacttgtgattcatactcgcgaagggcaccgcgccgatcttagcgattgcccggcagcgaaactcacccgcggtggtaaaactttcattggcgaaacaggccctatgggacgcattttggttcggggcgaagccggtcacgacattatccctgaattgtacccggtcccgggtgaaccggttatcgataagcctggtaaaggtgcgttctaccagactgatttacatctgattttgcaaaatcacgggatcaaaacgttaattgtctgcggcgtcacgactgaagtatgcgtgacgacgacggtacgagaagccaacgatcggggctatgaatgcatcattcctgaagattgtgtgggttcctactttccagagttccagaaatatgcgctggagatgatcaaagcccagggtgcgatttttggctgggccagtcacgctgatgccattattgcagggctgaaaggctaa

SEQ ID NO: 385564 - DNA, 264 bp, Salmonella enterica
atgatatctctttatagcgattttctttcggtttataccctatatatcatcttacccaaagtagtaaaaaaaggggcactatccagtgcccctgagcgtccaaaaaatgaaccaaaaataataacagatattcagatcgagggtaatgacctgaatatctttccgggtatcagttttcagaactcatacaccagaccggttgccacaatgttttcagtgctcagacctgccgggttatcgtctttcagcaggttgattttatag

SEQ ID NO: 385565 - DNA, 633 bp, Salmonella enterica
atgacgggatgtaacctgataccggcccgggagatcattattcacggtgactgctggccggtggtgaatgctgtggcacatctgagccgggcagttctgccctggagtgaatgtgaaaccacgtacacactgccagaactactgcagcagctgcaccgaaagccggaggcgacgctggtgctgtgcctgcgtccccgtgaacatatttttttgttctatgcccttaaagaggtactgctgtatcacccggcactggttatcagcgatgaaatgctgttcagtgaccaggtggttctccaccactggggaaaactgccggtggtgatgcaccaggagctcaccgccatggtgacacgaataaagcgccacgaagaactctcctgccgggttgaaagcagactgatcagttttctggcggacccgaaacctgccactggattattcacggttccactgatttttaataacccgaagcgtctgatgaatcacatggcattattgatgaaccgggcaatgataaactgtggcgtcactcccgagcagcagaagttgctgggagaggcttacaaatggcgatattcattggccggactgaaaaacagactgcacaaaaacgagaagcaaatatggtag

SEQ ID NO: 385566 - DNA, 510 bp, Salmonella enterica
gtgtgcccccataatactcacgaaaaaaagaagcagtatattattacgggtaatgatattcattatccttcccagacaaatcatgatacctgctttattccggagaatgtgcgccagtacaccggtgaacctctgtacatcatcgtggcgcactggtgtcagcagcagcaggactgggttcagcgcgggcagatatcagaggcctttcacattaccgcgaggcgtgccagctatctgatttcctaccttagaaataaagcttcgcgggtggtctgtgtctgtcgccgccggacgttgtccaataaagcgcaacgctgtgaaatttatgtcgtgcgtgttcttgaaagtcctgagcctgccccgcgagaacgtaccgtaacgccaccactctcacgccggcgggtgggaaacgggagcagtgcgcaggcgaatgaactgtggaaccggctgcgcagcaacaggagtgcgggaaaaatactgaaaaaggaggatgaagatgacgggatgtaa

SEQ ID NO: 385567 - DNA, 1059 bp, Salmonella enterica
atgaacaggccatgtttgtggggaataccggctgtgctgcttattctgctcagtctcgtcagcttaccggcccgggcattagatgatggttgtacaacgttatcaggttcagtccagttgagtaatgttaactcaaatataagtacagcaacatctggccagatactgtactccagcagtcacactataagttacgaatgcaccagaggtggcataagcgctggtgactttcagactcatatgatttttacgactgattttcgtaatttgatagatttattcagacaactggggttgggcctgaacctccacatcacagaaacagattcaaagggtacatccggtacggttgatataacgtgggcgcagattctgaagaatatagcaacccctggcaaggcagttaaatttggcccggtaaggaacagtcaataccaggccggtgaaactgccacattatcagcagtcatatccctggagttatttgttgataataattttaagaataccatgctggttaaaccgatatccgggatgcagattatggatttagtcagtggttcttctggttcggcgaaaagggctgcaatatctactagtgggtttaacctcaggctacttccggataaccttggtacagtagatatttcacctgggctggtcagtctggggcatttttatataacagatgcagaaaagaaaagcgggtcgtttacagtaactgcccgtcagcagaatgctgctaacagtgccttcagtgttgcactgaggataaagtttaatgcaccagtgggaatgtccctgacgtcagatggtacagctgtattactcaaaaatacgggagattccggcaataatggtctgcagctctcgatagtggaggatgagagcgggaagaaggtgatatttgataaagatgaggagatgggaagtataaatatagggacatcctcttcaggacgaacacagaaaacatatcatgcagtgctggataaaactggggttccggtaaccggaaacttccaggtttcaagcaccgttactgttacatataactga

SEQ ID NO: 385568 - DNA, 744 bp, Salmonella enterica
gtgaaaaacagcagattaacaggtacggcgatattcgtactggcggtagcgtggagccagagtagccatgcaaccatcagcgttgaccggacgcgtgtcatcatggacagcagagacaggagtgtttctgtcaccctgagcaatgaaagtaaacattccccgtttctggctcagtcctgggtggaggatgctgatggtgtacggacggatgcgctggtcgttttgccccctctgcagcgtattgacagtggacaaaaatctcaggtccgtatcactcaggtcaggagcattacgaaccgtctgccgaaggacagggaaaccctgttctggttcaacgtcaggagcattccgccgaaaccggatacaactaacgtgctgcagctgaccctgcagagccagctgaaactgttttaccgtccggctgccatcgcccggggggataacgaccagccggagaaaaaactggtggcggagcgcaatggtagtgagctgacattaaagaaccccacgccatattatatttctgtggtctggctgggtactgaccgccgccaccacctcagcggattcgggggcgggacaatggttgcaccgtttggaagcctgccactgaaggcccgcctgccggaggggagtcgtcagttgtgggtgggctatgtcgatgactatggcggactgcagatgaaccgctatacctgtgatgtccggcgttgtgcactgaaaggtgaaggagatgcctcatga

SEQ ID NO: 385569 - DNA, 1464 bp, Salmonella enterica
atggcccgtcagggacaggttcgctacaaggtggcggccggccggccgctgtacggcggacgctataacaacaacacggtcagtcctgattttctgctgggggaggccacctggggcgcattcaataacacctccctgtacggcggggccattgcctccaccggcgactaccggtctgctgccctggggattgcggagaacctgggcatactgggagccctgtcggctgacgtcacccgctcagatgcccgtctgacgaagggacagaaccagtccggctacagttaccggattaactatgccaaaacgtttgataaaaccggcagcacgctggcctttgtcggttaccggttttccgatcgtcactacctttccctgccggagtatctgcagcgccggtcggcggagagcggtgatttctggcatgaaaaacagagctacaccatcacatacagtcagtccattccgcaactgaacatgagtgctgcgttgtcggtcagccggctgaattactggaatgcagcatcgaacaacaactatatgctcagtctgaacaaatccttcagtctcggcagtatccggggcatttcagcctccgtttctctcgcccgaaatcagtatacgggcggaggaacgcagaaccaggtgtatgcctcatttagtgtcccgtggggtgacagccggcaggtcagttacagcgtgcagaaggataaccggggcaacatgcagcagtacatgaacttcagcgatttccacagtcccgatacaagctggaacatcagtgccggtcacagccggagtgaaaccggcagcaacagcaccttcagcggcggtatccggagaagcctgccgtggggacaggtcagtgcagacgcgtcattacaaccggggcagtaccgcagtctgggcctgaactggtacggctcggccaccgccacgtcccacggtgccgccttcagtcagtcaatggccgggaatgaaccccgcatgatgatagacaccggcgacatctccggtgtcccggtctccggaggcagcggcctgaccaaccgctttggcctcgcggtggtaaggagcggcggaagctaccggcacagcgatatttcagtcgacgtcgccagcctgccggaggatgtggaagtcagcgactctgtcatcacccaggtactgacggaaggagccatcggttaccggcagattggtgccgtccgtggagagcaggtgctcgggagcctgcggctggccgacggtaaagccccgccgttcggtgcactggtggtatcggaacgcaccggccacacgctgggtatggtgggtgatgacgggcggacgtatctggcgggtatcagcggggaagaccgtcaggcactgaccgtgtcgtggaacggccgggtacagtgccgtctggaccttccggagaaggtgacgctcagccaggggccgcttctgctgccctgcaggtaa

SEQ ID NO: 385570 - DNA, 753 bp, Salmonella enterica
atggcacctgaaagtacagaaaaagaaaagctgcagcacgtttaccgactgcagcaaagtaagctggtcagtatcagtaacctgaccgaaaccctcggtaatatccgggaaaatctggaggttttcagcgctgagcagaacacgctgaccggagagctggaaaattgtaccaacaggagcaggctgaccatcaggcgccttgagcggaaaggtaataaagaagaaaacgaagaaaacatcgaaaatgatgattacaggttactttccccgtccagaaagaaatcgtttttacacaccctgcaggaagttcatgatgttacttcatcagttgccggcaggctttaccgtctttcctcctgccagaaatattcagcagaattactggacctgtcagtaattacggtgaaacactttctctggcgtgagcgggtgttcatggccattattctgggtggtcatgaccgtgcggagctgaaacaggtcagcgtaagaagctgtgcactgggcaggtggtatgacggcaggggtaaaaaagcatattctcatttaccggcgtaccgttcgctcggggaggctcacacccgttaccatgaagtattaaatgaacttattgaccgtggtgtggaaggcatgacgtttcatgagatgtctgaggaactggcaaaacttgaaatgctgagtcagcaaatagtggggttcactggtcagatacggcatcatatatctttactgcaaaatgcgcagtcttcataa

SEQ ID NO: 385571 - DNA, 1737 bp, Salmonella enterica
atgctggcgccactcgctgtactggtggtcagttcgatggtgcaggctgccgccccgggagccggctccctgggtaaccagcttcgtcaggagaaaatgaccccaccggcacccccggtcagtgcgccgctggtattacctgagacggagcaggtccgtaaagacctgttgccggacagtcataccaccctggtggtgaagaaagtggtgtttaccggtgtgcctgcgggtgtccgcggggtggatgaaccggaactgcagaagcaggtggcaggcgacctgaaccggccgctgacgttcgccggtctcgaagccatggcgcagaaagttaccgggctgtaccgtcataacggcctgctggttgcccgggccatactgcctccgcagacggtgaaggacggtgtgctgaccattcagattatccccggacgttacgatgaggcgcagataaccaacagttcgtctctgcgcactgtcgtggcacagcatcttgtccggagcaccaccccggagggtgacgtacttacccgaagacagctggaacgtgaggctctgctgctcagcgaaattcccggcgtgacggcgcaggtggcgatgaaggccggcagcagacagggaaccaccacaccggatatcacgcttacacagggaaaagctttcggggcttatgccgggctggataatcagggggacccgaccaccggacgcagccgggtgatgttgggcggatatgcgaataacctgctggggctgggcgaccagttgcgccttgatgtcctggatgcgtatgagaagagtgacctttttaatggctcgctggactacagtcttctgacaggggggggatacggtacccgtgtcggcgtgaactacagccatctgaactaccggtataacctcagcaaactgggatttaatggttactccgataactggggactgtatgtcactcagccgtggatacgaaccgggcgtgcacgcgtggatgttcgtctggatgcgggacagcagttcctgacggataaatatccggatgcgtttgcgacggtaacgggaagtacccgggggcgtaaacaggttaatttcggcacgttatccgtgaacggttctgttgctgacctgccgggcgggctgaccgggtttgtcctcagcggcacgaccggtaatgtgaacctgcgcagtgatatttcccgcagcttttcgcaacccgccggctccggtggtcagtttacgcgttttaacgggcagcttaatcacgaccagcagatatgggggccgttctcggcgtatgccggcgttaacggacaactggctgacggcaatctggacccgtcacagaaattcctgatggggggaccatccgcagtacgtgcctatgatatcggggatggctccgtggaccagggtgtggtgggtacggcggaaatccgcagccgctggaatattccggtgcagggctggatggggaatgaccctcaactgacggtggccaccttttacgaccagggctgggggcagcagtaccgtaataaccgcggtacaggcgggagtcctcttgcctccggtgacaatcacaaccgtctgaatctggccggtgccgggctgtatgccactgtggcggacgcaggcaattacgccctgacgatgacctgggctcaccgtaccggaaatgcggacccgaacgcggtacatgacgaccatgaccggttctgggtgtcggcggtgaaaaccttctga

SEQ ID NO: 385572 - DNA, 1269 bp, Salmonella enterica
atgaccgtccttaccctgccagccaccacccacatacacctcaccaccaccggctttaccggtcgccgaggtccggctgttcgccgccagatggatgttctgaccttcaacagtaatttttccgcccggccctgcgtgactgtcagccagcaactgtccggcctggttcaccaccccgctgtcgccgccgttaagcacgatttcaccaccacggctctccagcccttttgcttcaatggtgccactgttattcaccaccgtgttcagcagcatgtccttaccccgggccgtcaggaatacctgcccgttggtggccgatatcagtccccggttatccaccagggcattcaccacgctgccatccaccgacaccgacgtcaggccgccgttatccagttgcagggtgaccgttttgccggccgccagtactgttttgcccgatggcgtggttatcgttccgctgtttttcacctggtctgccgccaggacgatatatccgcccttcgtggtggtcaggctgccctggtttatcacctgcgcgcccggattaccctcaccactcagcgtgtactgccctttcataaagtccgcggtgttaatgttcttcgtggaggccaccagacccgccacgctcacccgggcatccttaccaaacagcaccccgttgggattaaggataaagacctgtccattggctttcagcgtccccataatctgcgaaccactggcaccggtgacacgattgagcgcaaccgaactgctgtcgggttgcacgaactgaacggtgttgttctgaccgatatcaaaactgtgccagttggtggccatgttctgcgtctgctgatgaatggtcatctggttaccggaggtgctgatactcccctgaccgcccacaatctgaccgccggtcggcaggtccggatttgccagcgccaccaccgggaacaggctgataatcagcccggtcagaaacgccagcggcgtcagggtgcccaccagttttctgaaggtggaaacatcacacaggtctgcaatatgacccgtgttttttttcttacccgtgcccgccgtaatttcgctgaccaccaccagttcgttacggcgcctgtcgaatttgagtctgtagattttgttcattgtctgcactctctgtcagagggtgcaggaacagaaaacaggcctgtgaatacaggctctggtgaggctgctgtaccacagaccgttgtgtcttctgctcctgcaatactggtattaagaaataagaaataa

SEQ ID NO: 385573 - DNA, 183 bp, Salmonella enterica
atggccttcagaatctttgtcacctccagtgacacccgtattcgcgtcaccgctgactattgtcacattcagcgggtcaagcagccactcaccaccgtgcccggcagatgccgacgtatccacatcaccaaatgcctgaagattattatgagacgacgtttccacccggccaccgtcacctga

SEQ ID NO: 385574 - DNA, 813 bp, Salmonella enterica
gtgacagataatattatgcgtaagatttatatttatggtgagaacccgcaggttattgctgtgatacgtgaaggaattaaagattttatggaggagtcaccgtatggctgtgaaaatactgaagcggcatttggttatgccggtgtgattcaggatgcgggggagctgattgagcgggtgcagaaatccattctgccaccggtggtgttgcttaatgttcagccctgcagaaatattctgttgctgcaggctctcagggaaatccgggaaggtgtgggtattgccgttttcagccctgaggttatgtatccggaccgggtggtatcccggtggtttaactgcacgctggacgaggacacggatgtggctgaccaggatatgggacgttatctttaccgtgccgtcaggaaagggctgctgaaataccgacggcagacggactgtgtcaggcaggaatcactgataccggagcttacccggcgacttggtgatacggtgaaggcgctggattacacgcttcatatctcactgttgtcggaatcgttgaccagaaaagagaagacgatgctgtcatatctccgggaaggccgctctgttgagcagacggctgccctgacgaaggcgggcaggagtgctgtggggctgtggtacagaaatttgtgtgaccggctgaccctggaccatggacgtgatgaactggcagcaaatttcacgctgtcagcagaaagacaggataacccgttcaggaacagtgcctcgttccggagacggggactgcaacagccagaaggtatactgaatgaaacagaatga

SEQ ID NO: 385575 - DNA, 4935 bp, Salmonella enterica
atggcagtggaaaataagttcaaacttaatgttattgccgcatcggtgctgatggggctgagtctgtcagcagtggcagcaggtggcgctgcaaatgcaactcagccggcagcagaaagtaaacctgccggagggcaggtgactgttccggctaagtctaaaactctcgcggaagttgtgggtacagtaaaacctgaagatatcagtgttactgtcgattcggctcaaaagaaacttgatgctgcactcaaggctgctgttgggtctgaagagagtgctcaaaaaagctataccgatgcggtgacggattatggaaagcttaaacctgaagaattacagaaagccacagatttaaccagtaaggattctgcgtttaaagcaactgaagcaaactttaaggcatttgatgttaaatcaaaagctgttaaagacgtgtatgacagtaagctacagagtctgtatggctcaacaggtcaaactgcaaatcatgcctggacaatcactgaaggtagtgatggtgccgggagtgatgcaaccattgctctgaatgctgagaaaaataccgtttttgatggtctggtcagcagtattaaggcgacaaaaaatgcagttgctgcccttgaagtacaggcgagagcatcagcaggtggtgacagtgcatcggatgatgccaaaaaagctgatgcagcggttaaagcttatgctacctatctggatgcctcctacaaagttctgcaggaacaacaaaaacaggcagccgctgaaaattatattcaggaaaaacttccgggttttctgacgctggttgagaaatataaaaaagccgacggtaataccgatgctgataaaagtacaaatgcaggcaaacttgatggtaaatatcaatcatacatccaggctgtaaaagattacagggatgccagtgacaacgataaaccaggcaagaaagcggctgtctatactgcccttaatgaactggtgactgctgcaggtactgcaaccattgatgctggtgataaaacggcggtggccgcgtttagcaaatccctgagggcggcccatacaatatgggatgctgcaagccagcagttgggcaaaacaggtaacttgttgactgcgcttgacaaagcgaaagatttgacttctggaaaagatggtctgccggctgatatcagcctgaccatcgctgataatcaggccgcatttaatggtattgataagtacattaaagaactgattgcagatgccgaagcaaaaggtactgatagagaaaaattgactgccgccattgctgatgcccaaaaggcgaataaggcattcacagaaaaacaggagaagtataccgctgcgcttgctgaactgaatgctgcctcagatgcacgtattgctcttgttccggaatggcagagtctgaaccaggcttacactgaagctgctgatgcgtataatgctgcgaaaaccgcttatgccgcgagtgatgtaaagtccagggctgataaacttaacaccactaaggctgcatacatcaagtctcttaccgatacttccgcggggatcgggagtgcaattagtggcgcagttaaaacttatactgacgctgtgaaagaaagcggtacagcgacaacccagcaggaaaagaatgcagcgctctataccctgattggtcagaagaaagtccttattcctgcaaaactgcagatggataaagacttacttgcacttaaggcgggagaccttgccggtctgcagagcgaattaagttcagcggagaaagtccgggatgacgcagcaaaagcctggaatacagcggttcaggaataccttgcggcaaaggaaacctttggtaagactgacgctgttgctgatgaagttgctgtgtcagttgccgaacataaactgctgagtatttccggggcgactcaggtgtctgacctttatgttgtcagtggaaaagaaaaaagtggttttaaagcgtttgatgagctgaaagcatctgcgacagcctggaaggacttaaaaacggccagtgacaaactgtttaccaacagcgatattcagacgtcccgtaagaatgttgccgagggtctccatagtctcgccagtctgatgcccctttcaactgccgatgagcaaaaagcattacgtcagaattacctggatgctctgaaaacaatcagtacgcccgcaactgatgcggatgcccagagtaaggttgcgaatgctgaaagtatcacccactatcttggagggttaagtacagatgagattacgcagtatgacccggcttccggtaactataaatccatcattgttaacgttgatgataaaggtaacgtcactggtgtgaaggataacttcaccgggaaagacctgtataccggcagccaggacaaaccatttaccaccactgttctcgatatccgtgccccggaactgggtaacggtgcgcttgctgataccaacacaatcacagtgggggaagccggtaccaaagacaagaaagtcacaccggttgaggtctgggctaaaacggcgggtgcaaaatggaatagtagtcagtcttcgtatgataaatcaggtaatggtccggcggtaaaactgtccggagaactgagaaccgccaccgcacagctggatgagaacggcaaggcggtggacgggcagattgttcgtggtgctgaccagattcatctgcagaacgtcaatatccacaacagcttcacgcttgacgataaagtgaagatgctggctgatgatgttgctgcgctgaaccagcaggctgcggataaaattgcgttgggtcagcctactgatactgttaataagtggctgaaagacgagagtgacaagcttgaaggtcctttctatacccgttttgacagagatgttcgcggtccagccaaatatgatggtctgatattgactggtctgaatattgacaccagcacagtcaatcctgagtttaatctggccagtggtgactggggaaatgcagcgaaaactgtaattccgacagatgccagcatcctgctggataatctgaatatcaccctgcagaacgacagtgtgggcggcacatcaactgcgattgacctgtccggagccagcaaccacattctggctaatggtggcgtgtttgatgcaggcggtgtaacgggtaacggcgctcaggcaaacgtccttgatatcactggtgaacataacctcattgattttaatggttccgttctgaaaggcgatattcgctctgataatgccgctaaatcaggcactctgctggataacaccgttaatctgaataatggcagcctgaccggtaatgtcattgccggcacaggtaacctctcgctgaatctggacggcagtacctggactggtggtgcaggtccgcacagcccggatgtcagcctgagcaacaactccgtctggaatgttaaaggttattatactgtcggttatgatgatttccctgcgtcttcggtcaacagtctgacgctgaatggcagtaacacgctgaacctggttaacgctgaaggtcaggcgcaactgggtggccgtggtgttgtcggcagtaaatatggcacagtcctcagtgttgaccatgacctggtcagtgatggtaagggcgtgacttctgttctggccggaacttactcaccgggtaatgctcacagactgacagacatcgggctggcaaatgatggctatggtggttatcggtttggtgcaattaatgtggacggtctggcgactggcggtaagtacgccctgtccgtggaaagttccggtgctgagccgtacaccattggtggtcggctggctgatggggctgacgcagtcaaagcacacgaatttgtgtcatacaaaacgtctgaaagtcgtccggatgatacgaatccttcagcacttaaactgaagtcatcaacggctgactttaccagtctgagcgcaccggctgaactgggcgtgtaccagtatgccgctgagaaggtgatggacggggtgaacaaccgtacgagtatctactacagcagcacaggtaagctgtccaacagtgccgctactgttgtttctctggctgctgccccggttgatgtggcgaacctggagtcggataccctggcgaagcacatgaacagcgtgcgccatggtaaggattccggcgtgtgggtgtcctacttcggcggggagaaccgtaactccacggcagcaggtccggagtacaccctgaagaccaatggcgtgatgctgggcgttgacaccctgacagagaacgactggctggccggtgtggctgtttcttcagcccgctcagacatgagtgtgatgaacagcagcggtgacctgaacagctacggtgcgcagttctacatgtcccgtcgttatgacagcggtgtgtttgtggacagtgcgctgcagtttaaccacttcagcaatacagccaaagcccgcatgactgatggtcagcaggcgaaggccgacttcagtggtaacagctacggtctggaagctaaggtgggctatgcctggaacagcgaaggattctttgctgaaccgtatgtccgtgctgcggctcgtgcctttgacggtgagcattatgccctgtctaacggtatgaccgtgaacagcaacgactataagtccatgctgggtgaaatcggtgctgacctcgggtaccggtatgacatcagtggcggttacgtgaagccttacctgcacctggctgcgctgaatgagtttgctgacggtaactccgttcgcgtgaacaacgtttcgctggacaacagcgtgaaaggcgccgctttccaggcgggtctgggtgctgaagtgaaggtaacggataacctgggtggatatgcagcctttgattacacgaagggcgataacaccgagcgtccgtggcaggcaacggtgggtgtgaactacacctggtaa

SEQ ID NO: 385576 - DNA, 168 bp, Salmonella enterica
atgcaggaattaattcagaccgataacaaggggatatcaatacaaccaaataaaaagatgttagctgtaattaccatcccgacagttacagattcaagtaaagcaattcctgatctgacatccttatcggagttaaacaacactgacgtaaatttcaatggcaaataa

SEQ ID NO: 385577 - DNA, 243 bp, Salmonella enterica
atgaaacgttatactaccgctttacttttttgtaccctatcccttgccggccagttggcgcacgccgatgtgatcgacgacgatgactatgatgggcgctatcagggcagccgtcagcaaagcgccgatcggcagtggcagtatgatgacagacggcgacagcctgacgagcgtcagcgtaagctggacaacgatcgtcggcagttagaaaacgacttgcgtcgtctggatgatgattactga

SEQ ID NO: 385578 - DNA, 1005 bp, Salmonella enterica
gtgaagaaatacggtttcagtatcgtcctgagcttgcttgatgagatagacgagctacaggaattccgccgctcctgtctggcgttgcgtggcgaaatagaggacgtacaagagcaactatatgaggccgaaaaccgtaacaatgctgacgatgaggagctacaggaacgccgcaaggctgatagcgcggagcctgtttatcaataccgaatcagaaatggttataacgggcaggttacagagtggcaaaccatccggcgcgatcaggttgattttgtgttgaaagcgcagccattaaacgctgaacttcggattatcgccgccccgccagcgtcagaacgcgaacagattcgccgggagcacactgaatggtctgagtccacgttcggaaatgtcggtccggtcggtccgctggaacacctctcgaaagaggcgctggaagcagcagccgaacccggcgacctgagcgaatgggctgacatgcaattcctgctttgggatgcgcaatgtcgtgccggtatcagtgacgaacagattacccgggcgatggctgaaaagctggcagtgaacaaacagcgcgagtggccggcgccgaaagatagcgagccgcgactacacatcaaagagcagccagcgccagtagtgccagcggaactgcaccctgatacgcaaaagctggtgactgaattctgcacagcactggccgagaagttgtacaaggctcaattaaaatacggctacgacgctgactggaaacaggacggatggcatacacagtgcctggcgcattttcatcagcacatcgccaaaggcgatccacgcgacgtcgcggcttactgcgcgtttatgtggtatcacggctggaaatcaggcccggtagtgccggaggaaataacctcagccagtgctccggtgatattcgagatagctgcagatgccgccatgcttcaggggaaaaccagtgcggttcgtgcgccaaagagcggggaggtgtcctgtggctaa

SEQ ID NO: 385579 - DNA, 1824 bp, Salmonella enterica
gtggctaaagtgaacatgttgaaccttggggacgcactgctgcagggggccagagagccgctgtcagcaccatcagtgccgataatgccgaccagtgaaatgccgatgatacttacgctggatgaggtggcacctaaccccgataacccgcgtaccacgcgtaacccgaagtacgatgagataaaggactccatccgcgcccgtggactgggtacggtgccaaagatcactaaaaatccggatttaccgggttcgccctatattttcagtgacgggggtaatacccgctacgccattttgcgggaactgtttgccgaaactcaggatgagcgtttttatcgtttccatgtactgttcaagccctggccgggacggctgaaatgtctcgtggggcatctggctgaaaacgatgtccgtggcgacctgacctttattgacaaggcgctggggattcgtaaagcccgtgccattcatgaggaaacgctgggtcggtcggtcacgctgcgcgagttgtctgatttgctgcgggaagagggatatccgatacataactccctgattagccggatggaacatacggtggagtatctgtatccgtatatgccggaattgctggactctggcctgggcagacctcagattatttctcttcttaatatgcggtcagatgcgctggacgtctggcagaaatacagtgttggtacagaaccaaagaacagtttcgataacgtttttggtctgacgtgtgaacagttcgacgatccggaactgtactcccccggcgtgttccgggatgagctgattggtaatctgattcaggcgttgccccatccgtcgctgaactatgaccgctggctaattgaactggaccccaaaacgcagaaccagagggcgctgtttggtgatcctgagccggtgcccgcacacctgattctggcagaccatcaggcctggcagaccgtggatatacagaataaggaagccgcttcccgggagcagacgctaatatctgcacaggataacggcgatggtgaggaacttcccggacagggtggcaacgcagtctcactgtcgtcagatctctcctccggcaggactgaaatccagtctgatatatcgggtggcccggaagtgctgtccggtgaggtcatgccggaggatgacgacagggatgatacgccatttttaccttcatatgcgcacggtgccgccacaggcgcggtgacagcgggcgccggtgttactgcattctcacaggctgcctgttcggctgccggtgctgttattgcaggggatggtgctgattttacccccggcagtaatattttcccgttccagggcggtaaccgtgacagtggcgctggtgcagcccctcttttatctgccattccgccgtcttccgttgcgttcgcggacacgggtctggagccggtcagtgatatctgggcgatatccgccctgcaggatgatatcgagcatcttcaggatatggcctaccggctggtttttgagacagcggaagcgatggggtgtgaagacagtatccgggaagataacagcccggattccgccggtttcgctgtttctccccacggcaatgagtttgttctcttcctggcggggctgtcagggcagttacccaacaggcagttcaatatgtttatgttctgtctgaatttctttggttcgcagtcccccggcgacatccccgtgtttgacgatattcacgttgtaaaaatcatgcgacttatccgtgtgatacgtcgtctgcgggagctgcagcgccaggcggtcacgggtggagaggaggtggttctgcaatga

SEQ ID NO: 385580 - DNA, 228 bp, Salmonella enterica
atgagtgtggatgctgatgatgcgatggcgcagcgggagaccctgctgcataccgacctgcagatagcggcgattcgtcaggcgctgaaaacgggagggccggtatcccgccggcactgtgtggactgcggggaggaaatccctgagaaacggcgggcgtcactgccgggtgtcagacggtgtgcggactgccaggcctggcatgaggcgcgggaggcaaaggcatga

SEQ ID NO: 385581 - DNA, 675 bp, Salmonella enterica
atgagcaggcttttatccgttatcaggcgcatggtgcagtctgcggaccacagtggaaatctgagtgacgtcgtggatgttctgtgccgtacgcaccgcctgattaaagagctcggggaggctgaatgcgtccggggcgcggagcgggagttcacctgttcccggagtccctgcaatacgcgggttgttccggcgtggttcagcgcactgactgccgtagtgtgtcaggcagccggttgccgctggtattttggtcgtctgccgggactgaggtttcgccgcagtgtgacattctgtggtaccggtgaacggccggagatggcagggcgtctgttcgtcctgctgtgccgccggatggagcgggacctggaggtgtggagggcgtccggaaacagggagcgcctgaaaacggtacagacccgcagtcgtgaagatgactggcgcatcagctggaccgccggtctctggtcagccctgctggagtacaacttcccgtctgctgaacaacaactgtctgaaattcaggcgcagtgctgccatcagcgtcagcgccggcgttacggcgggggcctcctgtcatcagagggtgatgccggtaaagaatacagcagcctgctttacggggagtttcccgtcagtggcctgcgctatatgcatataaaggaggagcgatga

SEQ ID NO: 385582 - DNA, 576 bp, Salmonella enterica
atgagttattcactgtcacagtccaccaaccagctgctgctcaccctggtgatggagctgaaatccgggaacctccggcgctgtgaagcgctggggctcaccgctgaagaaatgcgtatgctgcgggagctgtcggcggatgacctgttgtatctgtctgaaagccgggtgagtctgctggatttgcgtattcatcatgaaaatctggggttgctgctggcgcaggcgaggcgggagcagaaacggatggagcggatagaccgggcgctggcgctgggcgcgtcaattgagatgatgcagcggtattttgggctggactcgtcagaggtctcaggacgccggcggctgggggggattcgtacacgtaaggggcgcagcagcgcggcggacgcagagctggagtcagcgctctgggcacagtggcaggaatctgcaaccgacaacccggacccggacagcatggagtcgctggatgtgatgatgctgatggcggaaacccacggtgtgaatctgaccacggtatggacgctggtgaaatcctggtgtgctgctgaaaaacaggaggcatccgtatga

SEQ ID NO: 385583 - DNA, 267 bp, Salmonella enterica
atgaatatgcctgtgaaaaatgatggtcaggatgtgtcgtttcgttactggcggactgacccgcgccgggtggggccggccgcagtcagaaaagcccgccggctgctgtcgcagtaccgtcaggggagaagggtttacagcgaggtggggtgtaccggatacctgaagatagatgtgggtatccgctggcgtctgctgagtaaaaaccggggtggcgactggctgtttatgtcccatcagtcttatgaccgcgagatgaagcgatga

SEQ ID NO: 385584 - DNA, 1350 bp, Salmonella enterica
atgcaaacggaatctcaggctcaggtacagatgcaggcagaccccgtaagagccggtcaccgtttacctgcagatgacattattgactacacgctgtcgaagatgcaggcgcggcttgacggcgctgccggccagtcgggtcaggagcgtaacgggctgttgttcacgggcaacattcacgacgcttatccccgggcgctgatactggatatgcggctttctcctctggacaggatgtgctggataatgatacggcagtatgcccttcagaacgacggcgccattttcccttcctatgatgaacttcagaaattactgtcttcccccggttcagggcttgcctcccgggatacggtgagccgggcgctgacaatgctgcgtctgacgggctggctgagtctgtgcaaacgggtacgcgatacggggggacgtgtccgggggaatatttatgcccagcatgatgaaccgctgagcgcgaaggacgcagaggtatttgaccccggctggctggacatgctgggtaaggcctgtgggcacaaataccgggaggtcagtgaaaccgcctggcgggtactggagggaatactggatgacccgatgatgcggcaccggcattcgcgtctgacggagatagcggagcggctgacccgaccgtcgacggcccgtgatgtcgcccgtattcagcagagtccggcaagcggactgagtcctggtagtgcaaaaaatgcgcaaaaatcactgggtccggataacagactcagtggtgacaggggggatgaaaccccgcgtccggataacagactcagtcataaatcagacacttatgacagagtccggcaaacggactgcaataacgtacgttcttttacacaggaagtgattaaaaaaacgtacgtggactctgcgggaacaacgacgccatccggtggtgctatcccggccgggtttgtctggcctgagggtctgcagtgccttctgcctgaaaacgagcaggcgatgctggcggctcagttgcatcacctgcgccagaagaacgctgagctggctgatagcgtggtcgtgacggtggtcagcggagtccgggaggggaaaatcaataacccggtggcttatctgctggtcctgctgcgccaggcgcgggaaggccggttccgtctgccagaggggggcgtgaaatccggtacagtaccgccatcatccccgtcagcagaggcatcccgcccggtacagtccgggggcctgaatgaccatcaggggcgttatccggaggaggaattcgtgccggcgccgaaggacgtgctggctgcgaagctggcagaagcccgtgcggcgctgcaggtgaaccggtga

SEQ ID NO: 385585 - DNA, 945 bp, Salmonella enterica
atgagtgatgaacagaccccggagccgggaaaagccggcgccctgcgttcagcaatgaatgtatcgctgaatacacattacgcaatacgtttatgggaaggacgtcatcctgaatacagatctaaaaaacagggtggacgtaaaaaggaaaattcacgtcagcgcagtcttattttcagtatgcccggatttattcagaaagccggacggattaaccaggattccgcaaatgataacccctgggcagatgccaaaatgtgggagctggaaaacctgattaataccgcaatgggaaaaatgcaggaagaactggacgggctgaaaaaggtgatgtcaatggtgccggctcaggtgactatttccgatattaccagcgtatcacctcttaatatcggggttttcagtcggacgccagtggggtaccgctgtgtctggttactggtgggatttgaccaactggctatgcaggcgtttcaggctgcgcattatggttttatttcccgccgggaactgaacagttgcctcgggcgtggagggtacctggtacggcaaatctatggagctgcacaaaagtaccgttatttaccggtaacccgtgaagacattgccatgaataatgacagggccagggaagcgataaaacttttcggtaatgtggagcctgatattttgtcggggaaggttcgttcatctttttctccgccggttaacaggcgcagtattgatgctttgaatagagggactgcagatgagaacccgccggaaggtcatattaccgcagtggaaggtaatgatgactcttctgaattcggggatgtaccggcacagtcgcagacgcagacagaagaagccaccgcgccggaggcgaacgaactgatggatgacatcgatattgatatggatgatttatccacgttgttgcccctgtctccggagccggagtaa

SEQ ID NO: 385586 - DNA, 456 bp, Salmonella enterica
atggtaagaattcgtcagtccgctgtccacaacgtcagctgcggtgaaaatgtggtgatttatgaacccgtaaatatctacgactgcagactgggcgacaacgtttttgtcggccccttcgttgagatccagggcaacacacatattggtacagacagcaaaattcagtcgcacaccttcatctgccaatatgtcaccatcggctcccgctgttttatcggtcacggggtgatgtttgccaacgatatgtttcgggaaggaaaaccctgtgccgaccacgacagttggggacgcattacgattggcaacgatgtctcgatcggcagcggggcgaccattctggcagtcactatctgcgatggcgcagttatcggtgcgggaagcgtggtgacaaaatcgattactgaaaaaggtgtgtacgcgggaaatccggcaaaattattgcgccgtttataa

SEQ ID NO: 385587 - DNA, 510 bp, Salmonella enterica
atgcttaagattcaaatggcaacctacgacgatgccagcctgttaagctcaatgggatataccagctatcggcatcactttgcgcatctgtggaaaaatccgcacgagctggacacttatcttgaacaggagtattccctgccagcgatcgcccgcagtctggccaggacaggaaccttctggcttattgcctttgccgacgctccggttggttttgcgaaatacagtctacggcaatctattgaaccagaaggccattccgggacattactgcataagatctacttaatgccaggtgaaaccggcaagaagttcggtgagcaactctttgccgaagttatccgccaggccaaagcacaggatgagagacggctctggctggaagtactggcggataatcccggggcccggctgttctatgagcatcaaggaatgacgtttgtgaaggaaatcgctttcactaccgccacccagaccagcgttttgtatatcatggaaaaacagctttaa

SEQ ID NO: 385588 - DNA, 360 bp, Salmonella enterica
atgcgcaacgtgctgagccgcgtcagcagggccaaccagtctgtggtgcgtgccgccctgcagcaggtgttcgtgcagaccgacgagaaaagcgcccatgccacctggcgtgaggttgccggtcaactggagaagagcaatcaggcagtcacggagatgatggacgaggcagaagcagacgtgctggcttacttcagcttcccgaaagcacacagggtaaagctccactcaaccaacacgctggagcgcctgaacaaagaagtgaagcggcgtgcagatgtggtgggcatcttccccaacgaagtgaaccgccccggttttcctggagagtttttagtccggaacctcaggccgccatag

SEQ ID NO: 385589 - DNA, 459 bp, Salmonella enterica
atggctgacaacagcatgacattcagcgacaccctgatgcaagcctgtggtgaagactttctgcgtgaactcaccgaatttatgctcaaccgtatcatggaggccgatgtcactcagcgcatcaatgcagaacgtcatgagcgcagcaatgaacgtgagacttaccggaacggctaccgtgaccgccagtacaacacccgacccggcacactggacctgcgtatcccgaagcttcgtgaaggctcgtacttcccgtcgttccttgaggcccgtaggctgtcggagaaggcattgaatgcggttatccaggaagcgtggataaacggcgtctccactcgcaaggtggataccttgatccagtcgatgggaatgaccggcatctcccgaagccaggtattgtccatctgtcgtggcatcgatgagcgtgtacaggcgttcctgcagcggccgctggggtga

SEQ ID NO: 385590 - DNA, 1212 bp, Salmonella enterica
gtgaaaaaatggatcattgaatttgttttgtatgccgtttacatggtgttcggcgcagcctgggccactacaggttcagtcatgccacaaattatgaccgattttaacgttgatgtatcgcatgcggcgttgatgtcaaacgtgattctgtgggccaagattgtgggagcggtctgtactgcggtgcttgttacgcgtctggggacgcgaaaatcctacctgctgggatgcactatgataggtgtgtcggtatttattccatttactgataatttcatgctgctgctggttatccgtttcgtcggcggtctggggggagcggtgtgtctggtatcactggtgccgacggtggcccgtttcttcgacaacaggatggcctcgaccttaaacagtattaactgcacctcaaatatcgtcgggactattatcgctctgacgcttgcgggttatctgtcaacactgtttggtggctggcgtaatctgctggcgggctacggcgctgtcacgttagtgctgggtgtggtctggatattgtgtttcagtgatgaagatagcccgcgtcaggctgatgttaacatcagacacgaggataaactgcacgtactgaaagaggttattttcagccgtatcgtctggggaatgattgcccagtacgctggtgcgatgatcatgatggtttttatgtttacgttcctgccgctttactatacgaaatatgccagcctgtcagcagattcacacgcacatctgagcgggaccgtgaatcaggttgggatcatgctgggcgcactggtcggaccatattttaaaaaccggaagtaccactataaatcctggctgtttgtttccagcatttttatggctgtgacgacctttgcgatgttgtttgccacaaatgattttgtaattctggcctgctcattcctgactggcggtatcttcgcaacctggtttgcctttatattctcgatcccgaaagaagaactaaaagaggctaccacgcaaatagttacctgggcgatgtcgacgttctgggtctgtacctttgtgctggcgaccatcaatagtcaactcatcggctggtcagttgatcttaccggcggatttacagtgggttttacctacgtttttgcacttatggtcgtttctcccgtcgtcgcactgattatttttccgaaagaaatagttaaggaagaattaagaacgaaatga

SEQ ID NO: 385591 - DNA, 1248 bp, Salmonella enterica
atgaaaaaccgtattgatatagaaaaaataacaaacacgtttcttgaatatactttaatcaacaccacttccgatccctccagccagaatttaccgagtaacgataatcaatataagctggcacagtatgtagctaaccaattctcagaacttgctggtgtgaccattgatgtaaaaagtaatgccattacgacaattaccttgcccgctaatacggcaggtgttccttccatcgttttcttcgcccatctggatactgcccccgaccataccggcgatactcacgccatttgcatcacacagtatgacggcaaagcgatcgttttgtcgggcactggcgagaaattatcccctgaagaacatccggaactactggattatgtgggacaggatatcattgttaccgacgggaccagcctgctgggtgcagatgataaagcggccatcgccgccggagtggaagccatgcaatatctggtctctaaccctgatgtgccgcatggcgatattcgcctggtactgctaccggatgaagagacgggcattcgcggtgctaaagtgctggacgttgccgcgctgaacgccgattacggtatctgtctggattgttgtggcatcggtgagtatgtgactgaaaactggtatgccggaagtgcccggataacggttaaaggcgttaccgctcacccgatgagtgccagggggaaactgatcaatgccctgagtatcgcagccggggtaatcgccgacctgcctgagaaagaacgcccggaatacactgaaggccgggaaggctactactggccacataaactgaacggtgatactgccagcgccatgctggatatcgcgattcgcgactttgatatcgtgggctatcagcaacgcaaaatcactctgcaggctatcgtcgataaactcagacagcgctggggcgatgagcgcatatccatcactctcagtgatatttatgacaacgtgaaaccggctcttgataactatccggggattatgaaaaacgtggtacaggcaatgcgcaacctcggcattacgccaaaacctttgattatgcgcggcggttatgacggcagtgtgataacaccaaaaggactgccgaccgtcaatatttttaccggggcccataattttcactcaaccagagagtttttacccgttgaatccctgcggctggccagtgaaatgctgctggagatggttgaactgagtactcgtgaggtgctggtgtga

SEQ ID NO: 385592 - DNA, 351 bp, Salmonella enterica
atggggctggtgtggtgcagatcggcctccactctgtatatacgcgatccgcacaaaactgaaaaaatggtggtcattcgcaaggctctggctgaattctgcattgagcatccggtgttttacgaagatgaggtggatattcatctcaatcccaaaatcggtgctgactggcaggtatgtgggcaacaaaaacgcgtggtcacgcccggacagaatgaaaaatattatctggcagacacgttgcacagcagtacaggaaaagtcagctgcggcggcaaagcttcgtctttgtttatcagccggcttcaacacttgaaagcgacgtaccataatcacgcttatcgtggataa

SEQ ID NO: 385593 - DNA, 480 bp, Salmonella enterica
atgattaccaagcattactgctccccgcctcccccaaatggtatccacccgcagcgacatctggcggaatacaacggtatttataacgccctctatgaaagtgggcgggtaaccgaagcggcctgtatggcacatgcacgacgtaagatccacgatgtacatgtccgccatccaacggcggtaacagcagaagcgctgaaccgtattggggagctgtacgccatcgaatcgaagatccgtggcagtccggcagaagaactactgacctccaggaaagccataagcgttccgctgatgcagtcgctgtacgactggatacaacagcagatgcgaacgttgtcgcgtcactctgatacggcgaaagtgttcgcatacctgctcaagcaatgggatgccctgaacgaatactgccgcaatggctgggtggaaatcgacaataacctgtgtgaaaacgcgctccgggtggttgcgctggattaa

SEQ ID NO: 385594 - DNA, 294 bp, Salmonella enterica
atggaaaggatgatgaaaaaaaatctgaaagaccagcttatcagctatgccgcccgttatacccttctgtatgtcatcaatgaagagcctcttccgtgggttgtcctgagaaatatctttatcatgcagcaatgttcatccacagaaatgtttctgtctgagcggggatggaagatactggtcagccataataaggactcaggatttccggtatacatagccttaagtaaatacggcaggaagctgatagtgaactacagtaactatcagaaagaaatggcaaagattagatag

SEQ ID NO: 385595 - DNA, 450 bp, Salmonella enterica
atgtcaaaaatccccgaagaaactggaccaacagggctggcattaataaaggccagtgaaggattaagtcttcgaatgtattatgatcctgtaggattgcggactattggttatggtcatctgataaaaccggatgaaaaccttggccatgaaataaaaactgaagaagctgaagaattattaaaaaaagatttgaaacaggctgagaaaatcattcagtctattgttgccgtggaactgaatcaaaatcagtttgatgcactggttgcgctcgtctttaatataggctccagtaattttggaaaatccactttgttaaaataccttaatcagggagattacagtaaagctgcggatcagtttttagtatgggacaaagcaggtgggcgtaaattacccggtcttacacatcgcagagaggttgagagaagtatctttttgcatccgtag

SEQ ID NO: 385596 - DNA, 390 bp, Salmonella enterica
atgaaactggaactgactcaactggttgatagcttacaccaggaacttcagaaatctcaatcagcactggataaatacatagttcatgcttatgttcagaaactaatattttttagcagggaccagcatctgtcttctttctcactaaaaaacatgataccttttcattattataaaacttcactgaaggtttctttctgtgtatatagtctgaagcaacatcccgagttaataacaacaaggaaaccatgcataattatgaggttattcaaaacatgggagagaaaattagttaccattaacatattcactgctggctctccctcccttcataaatgcactttattcattaatggaaagccggttgaaaattatttttatgataaataa

SEQ ID NO: 385597 - DNA, 267 bp, Salmonella enterica
atggccgcaaagatattctcactttctggtgttgggtttgttaaaaggataactattggtaaccctacgccatcagtcccatactctgaagaagaagtcacacaggcaaccagtttactgaataaatgtttatctgaaccaccgaaggggcatatcatagggattgaaaaaaactttatcctgcttaatatgggtgaacatcaggttattcaacaatggattgtttatcatattggttttgaaagaaaaccgttatggattgactga

SEQ ID NO: 385598 - DNA, 624 bp, Salmonella enterica
atggcaggagaaatagctaatcaattcaacggacttcccatcaactcgcttattggtgccccgctgatggcaagctgtgaagctcaggaaatgatggcaaaatcaaccgctgagtttatccaaagagtcggttttgaaaacaaccaggtcagaaacgtaaaatttcagtatactcaaaagacaccagaaaaagacggtaatatcatcacaataaaaaaagaagaaatggaaattaacgttccacttctttccattgtaaatattccttccctgttagtcaaaaaggtggatattacctttgatatggaagtgaaatcagcaatggacgaaaaaagctcgtcggatacttctgcagaggccagtgccggcggtggtctttttggctggggggttaaaataaaaggaaatgtaagtacccataaggaaagcacaagaaaaacagataactcagcgaaatatcatattgaagtacatgcagcagacgagggaatgcctgaaggtctttcccgtgttcttgatattctgcagacatccattcagcctgttcctgttcaggctcaggagtctcaaaataacagtggcggtacagatactggcgggaataccggtggtgcagtaacataa

SEQ ID NO: 385599 - DNA, 660 bp, Salmonella enterica
atgtccagaaatagttccctgagcagcattattacggcgctggcaaaatcaatggcagtggcgcaaaatgatgtggctgaagcgcagtcattgaattttcttcgttatttcaaaaaaaaacgtaaaaaagatccgactccgacctcgtctgctgacgataaagaaaatttattacccggtgtttttcccaggagattaaaaatcggcctgccttcacgcagggatggtgccacagatgatgatatcgattactactgtgttccatacattaacatggtcccgctaagtagcgtccgtatagaaaaggcatctgctgagtttgaggtgggattgctcaaccttgatgaattctccggtaactccgatgaagatataaagacttttgcagttgatgttcagaacaatccagagatactgaataatcaaccctgtcttaaagtggacattggcagtggcattctgacaaaaagtaacaagttattggcaaccataaagctagaaatagcacaccaggaaccaccagaaggggtttcacggatggtgaatgagctcatcaacaatgctcaggggtacttttacactggtaagaaaaaaggtgaaaacctgcgtcaggatgatctttcttcattattttctgaaaaaaaagatgaaaaagagtga

SEQ ID NO: 385600 - DNA, 630 bp, Salmonella enterica
atgataaatttatcagttaaaaaatatgttcttgctgttgttgtgtgctcctcttttgtcggtgtctcgtctgtaatggctgatgtcggcaatccaacagtgaccgcagggaaagtgtccgcgcttacgatgcacataatcggcaatatcaccaaaagcacctgtgatatccgcccttacacgacggcaggcgcggatgcgacaacgctgaatatggggaccatgaccccaggcaaagaatccaccccggtatctttctttctgaagcctgtcgatggttgcaatgacggaattgcatcaggcgattccgcagaaatcacatgggaaagtaatggcctgaccagtcatggcatttcaaatatgtatggtaccgccaaaaatgtccatatcgaattaagtcctgttgatgtgactgatgtggcggcggcaattgatggtagtggtaacactgttcacaataagggtgtaataaagaccgggttccagactgttgcatatagtaaggttgcctctgatgccgctccattgccctttaaatatgaagtgaaattcgtatcggatgatagcaatgtgagcatgggtgccggtactgttgatactgatatgagctacacggtggcttataagtaa

SEQ ID NO: 385601 - DNA, 459 bp, Salmonella enterica
atgcgcctgctgtatccagtccggcgacaggcacagggattttacatcgtcaggagtaatggtcagcacctgacgggcggttttctgacggttcagcaccacatccaccacgtattgtccgggagggaaggacgctccgtctttcagaatggccggcgcatggctcttgtccacgccgtgaatgaaattaagattcagctcacccgcaacggaagcggcggaccacatcacaccaccagagagcacggacagcatcaccagttttgccagcgcacgcatgcgaaatcctcccggacggaccgcgaaagcagactgccctcccgcacaccccgcagtacaactcctgagcatcgttcctgtcacagcattccctttgatgttatccgcacttcgttgcgtcatcctgcccggccacccgaattaaccatatttgcgccagtccgctttcagtcaacgtaa

SEQ ID NO: 385602 - DNA, 696 bp, Salmonella enterica
atgaatttcagaaaactgagcctcctgctggcaggcctgctcatcagcagccagtccatggcggcattcaccctgaacggtacccgctttatctatgaaggcggaagtaagaacatttcgtttgaggtcaccaaccatgcgccggatacgtggggtggtcaggtctggattgacaacgagtccatgtcatctgacagcgtttccctgatacccgccccgactttttttaaggtggatggtaatcagaaacaggtgatacgcattctggatgtgaatgacgccctgctgccgaaggacagggaaagtctgttccgtctgaacgtccaggaaattcccccggccccgaaatccggggggaatgtgttgtccatggccatgaacacacaggtgaagctgatttaccgtccgaagtcgctgtccgccggccgtcaggatgcggaaaagcagctgcggattgaacagcgtggcggcgtgagtgttctggttaacccgacgccgtattattttgcggtggtggcgctgcacaacggtgcgacggacaagggcccggtgatttctgttccgaagtcatctccgtccccctccaccctggccccgcatgcagaagtatcgctgggtaaagtggtgagcctgcccgtgacggtggaggccattgatgattacggtgccacccgcagttacaccctgagcaggtga

SEQ ID NO: 385603 - DNA, 675 bp, Salmonella enterica
atgaaacacgcggagaaggccgggaataataacgccgggagagtaaacgttgcccgccggcatcatccgtcccggctgtctgtgataagcggtctggcattactcctgtcctgcggggtctgtggaagcgccagtgcgctgacgttcacctttgactacacctacactattgtggccaatacctgcacgctgaacagtaccggagcgaaagttgacaaagagctggtcgtgaccgggaacaacgatactgtgcaggggaattttgatgtcgactggggaatggtcacaaaagctcaactgacagtccccgaaaaagccagtaaaaaaacgttcggtctggtgatggattgccagggcgatatatataaaccgacgctggcggtcacaggaaagaacgggagcgttccgcccggtaacacactttacgtcgcggactccccggattctgtcgcaggttttgcagtaaaggcttcagatgcgtccgacgcgacggagacagaaaaaacacagaacgctctgacaggtcagggacaacagacactgagcgaaaccggacaccagaaaaagatgttgctggaagcctggcctgtcatcctgcccgaaaagagtgtcaataacctgaagtcagggactgagataaaaggaacggtcaccattaaggtcgtttataactga

SEQ ID NO: 385604 - DNA, 648 bp, Salmonella enterica
atgaaaacaaccttattcactgccggtcaggttatagcatgtctgatgctgttgggtctgagtacaggcgaatctgctgatgcctcaacaacggttgaagccgtttttaatctgaaggccatgtacaaaaatgtcacctgtaaccagacactggaagccagtggtgatatcagtggcacaatcattgatttcgggactttctcctctgactcagtggacataacaaaaaaagttgcgttgacactggactgtgctaacggcacagacctgccggatacggtgaaggtcagtttttcggtggtgagcccggcaacggttgacaccagcataaccaacagactgtacccgtcatacggaaacatacaacagacgaacctgtactacgactgggtatgggatgaagacattaatgacactgtgaaaaagtcagtcggcgatagtgcgcacaagactctgggacccagtgacaaggttgacctgagcggtgcttcaggggcggacgtttatgaagtggtttctgagggacacacgtcgaagctactgaaattcccgctgaaaatcacccgtaatgtggacccgggcaaaattggtcaactggctgccggggattacacggctgatgtgacagtgacagtcagctatgactga

SEQ ID NO: 385605 - DNA, 495 bp, Salmonella enterica
atggacgctaaactactgttactcgggctggctatcgcccacagctctgctgccaataacgtacattacgggagccgcgccaccgtcgaaattacagttgcgtgcccagctatcttgaagtcccgccctgatgggatcggctggtaccgcggcactataactgccaacggcaacacattatcatcgactagacactcggcggatggtcggcaatgggaggggactgaaacatatccggctatactcgacgccgctcagcgcagcactacgggaaaaaacctgaagcatgtcgccggcttcgacatttttagcctgataaacaacgggtgggtagggggatccgctggtctcgattccgccgctctggaccaattggctatgcgtgtgacgtgtgacggcgattgcgaccagccgggcaaggctgtgcttcacataactgtgaccatgccagactatgactccaaaaacggttgcggcgtctgggcttcgcaatag

SEQ ID NO: 385606 - DNA, 303 bp, Salmonella enterica
atggccgcagggtctcagaaatcgtactcagatcctgtcaacgccacgatctttgaccatgccacttggcgtaaggttgccggtcaactggagaagggcaatccggcggtcacggagatgatggacgagacagaagcagacgtgctggcttacttcagcttcccgaaagcacacagggcgaagttccactcaaccaacacgcaggaacgtctgaacaaagaagtgaagcggcatgcagatgtggtgggtgcgtattaccatgaaggagatcggtcagtaacggttaaatcacgtgctacatga

SEQ ID NO: 385607 - DNA, 273 bp, Salmonella enterica
atgcaccttgcctgcttccagtacatagctgttcagggcgacatacagcgggctgagcgtgaccgcctgctgctgcaggagcaggggctgcgggagcacatgattatgctgcgcgaggaggtggtgcgccagcagacgcggaacgaacatctgaccacgcagctgcaggagagcagggaggaggtgaaaaccctgcgggccggtgaaaaggcgctgcagcaggagctgctgctcctggcgcgcggcgaagcaaaaaaagaaagtaaaacctga

SEQ ID NO: 385608 - DNA, 786 bp, Salmonella enterica
gtgaaggtactggccccgggtagtgggaagacgaaaaccggtcgcctgtgggtatacgtcagggatgatcgcaacgcgggttcatccctgccggctgcagtctggttcgcttattcgcccgatcgtaaaggagaacacccgcaacgacacctggcagaataccggggagtgctgcaggcggatgcgtactcagcttaccatgtgctgtacgaaacaggacgggtgaaggaagccgcctgtctggcccatgcccgtcgaaaaatccacgacgagcatgtacgtcgtccgacggaagtgacacacgaagccctgagacggatagcggagttgtacgccatcgaagcggagatacgcggcagtccggcagacgaacggcttgtggtcaggaaagccagaagcgtcccgttgatgcggtcattatacgactggatacagctacagaggaaaacgctgtcgaaacatgcggagatggcgaaggcgttcgactatctcctgaaccagtgggatgcgctgaatgaatactgtcgtgacggctgggtggagatcgacaataacctcagcgaaaacgcactacgctcagtggcagtaggcagaaaaaattttttgttcttcggctctgacaatggtggagaaaacgcggcgataatctacagtctgcttggcacctgcaaactgaacggggtggagccggagagctggttgcgcgaagtgatcgggcaaatcaacgactggccatcaaatcgggtgcacgaactgctgccctggaacttctcacctgtaaaataa

SEQ ID NO: 385609 - DNA, 132 bp, Salmonella enterica
atgctggtccgggcgtgcgacaacgtcaaaatacctgataccgtcacttgtgttcatataatggagaaaacatgtctcaacaaaacgaatttactgaagcaacgtaagcgcaccaagaagtacgttgtgtaa

SEQ ID NO: 385610 - DNA, 534 bp, Salmonella enterica
atggtcacgtcagcttccggccatgcctccccctcacggttaaacagctcaccttcaaacccttcggtcatcagctccagcgccagcgccatctccgacgccctggactgcatcttcgtgtgccagcggggaccgccgccgggcttctctgagctgtccgtggctatcgtttccagcgtcgccttcagatccgacggcagcatctgccgtttttccccgtacacacgctcagccgtcatgaccagcgcccggcgcagcagtccccggtcagcacggctcagcttttcatccttctccccgcccgtgatcatcaggatggctgcaatctccatttcacccagtacatcacgctcatcattattatcatcatcagtatcaacatcaccgatgtccttcagctggttttcgtccacaaccagcttatccggcgcaagcgtcatgataagatgcgaatcagggaataccggcagacaggtgccacgtccggggttgatgctgaccttattcaccgtcaggcccaggctccggcagtag

SEQ ID NO: 385611 - DNA, 804 bp, Salmonella enterica
atgctgcacaaaagtcagccacgtataccaccggttcctgtccagctccgggttaaagcacatcggcagggcgcgcaggtaggtattcagcggcgaaaggtcatattccggattcagcggtttcagcccggcgttcaccaggacggtactcagcgacaaatgatggtggtccagcgtcttcatgtccggtgccttcagcagaaaggtcagggcaccacgatacagtttgtgcttttccttcagccaggcccgggcctcttccacctggtcgcgggtacgctcagactccacgttatccccgagggcccgcttacccagccgggcaaattcctcttccagctcatgttgcggctgtatgagcagggtcagacaggccaccgtgcccggcggcatcatgtccatcagcgcgttaatacgttcaccacgctcccgctctgcggtcagcaggcccggctccggcggtttcgtcagattttccaccgacacggcacggtgtgccacattatcaaaccaccacaccccttttttcgcttcactgcgcgggcgggtgaagaacagcgattcactgaaatccgtgtccacgggcagcttatcctggcggctgtcacgccaggcggccgtcctgtacagcgtctggcggtcaatccacgacggggcggggttaaacagccgcagcagccaggcatggatttgttccccgttctgccggcggcacaccacaccggcctggctcagcgccgcagacagccggtcgcaggtctgacgaagctgaaccaccgggggataagactcccgctgtcgtga

SEQ ID NO: 385612 - DNA, 606 bp, Salmonella enterica
atgatgctgacggagacgatgaaggagcaccggctggataccggtacctggtggatgccgttgccgtccaccacgcatgaacaacgcacccgggcggtgcgaaatctgctggagcgccagtggcgggggggcacttatgatgtggcaacggacggtgaagcgggtggcagacaggaaaagcggggacagcgtgatgcccgggctccggggctccgggagttccgggggctgacgaagcatcattcctcggcccgggagccgctggcgctgtacatccgactgttgtatggcaacgggatattttactcccggaccggagaaggcatggtctggctgctgatagtcagtgacggtgtgattgtgccgggcactgactgtctgctcagtccgctggtgtttgactccctgatggaagaccggaagttcagtcagtacaaggccctgccggtcagggaactgtcggaggactgcgaagaagagattctgacgcactatcaggccaatcagcagcggctgaaaaagcggcgttatttcttttatggggcactggtctgtctgggactggttttgcttgccattccggcggtattcatcctgatggggtag

SEQ ID NO: 385613 - DNA, 1500 bp, Salmonella enterica
atgaatgttaactataaactgtcctgtctggcagtagctctgctgcttcaggggtgtactgctgaatttaatcataagtacacggataaggatttgctcgacagcagccccggtctgcagagtctggatgcgcagaaacagcaggctttcatgaagtataacacggccttcctcgggaaacccgttgcctacagcgcaaagcagcagcaactgctggcgaagcatgtggagtttcactcggaaattccggtatcactggacacggtactgaacaccctgtctgagcagacgaaaagcagctaccgggtgaatgaccaggttcccggtaaagccacagcacagccggatatggcgtcgggcccccttatccgcgacaacagcgtgaacttctccggaacgtttgaagagttcatgcgctatctgtcggccctgtatgacgtcacggtcagcctgaccgacgacaatattctgcaggtgaacgtttataacacctgggccctgaaactggacttctttggtaaagacaatacctgggattccagtcttgacctgtcgggaaatgaagccatcagcggcggcgtgaagggcaagtccgagaccaagttccagagtactttctgggatgatgtcaccagcatggcgcagaaatacgtttccagcggggtgtacaacgtcttcaaggatgtgggggtgctgaccttcagcggtcgcccgtctgaatatgcggagctttccagaatacttaaggattacaagcaggctaacagcaagcagtttgtcattacctacaaggtgttcattcttgacaagaagaaactgcgtaacctcgatggtgaactggggctcaagttcaaaagtggcggaacgtcacttaacctcaactccggcctgattggcacaccttccggcgacatctatttcggtcgggacttctacgctgacggtcgtctgggcgtggcggcgaagctggatgcactctaccaactgaccggcagcaaggtactgcagagcggtaccatggtgacccgtaataacaccccggccccgctgaacctgaccgagtcgcagaactatgtgtccggcatcaccagcacgctttcagacacgattgggggttctttcagttcgtcggttaccaccgccaccgtcaccaccgggaccagcgtcattctgacgccgcgggtgttgtctgacggccgggtggagctcacatcggcctacaccaagaaaaatctcaacgggatcgaggtctttccgcagggggcgactgctgaccagaaccaggtgcagttacccaatatcagcaccaccgaactgttcaacaccgtggatgtcaccccgggctccctgattattgtcggaaaatatgagacgaaagtggatgctgatgaccaggggctcaagattctgggcggcaacctgaaccggaatgactcgacctccaccgtggtgatggtggtcggggtggattattacaacaagccgttccaggaaggatga

SEQ ID NO: 385614 - DNA, 522 bp, Salmonella enterica
atgaaagtaaaaataattaccgggattgcgctgatgacattgtcatctctttctgtggcagcggggcactccggtgcttccgtgagtgacctgtcccgtagtccgtttcaggctgaccgggataaggccagaatgcagactgagcatctgaccccgtcggtatctgctccggtgtccggggggagcggggcggtcgtcagtcctgctgcaatgtcgtcaacgctcacgtcccctgtgcagcagaagcagcccaccgccggggcatacaccccctggctgacgatgaacctgcaggataatcatctgctgagtcaggacattgatgcctgggccaaatcacaggggatgcgcctgctctggaacagtaaccgggattacctcatttacagtgccattcacctgaccggaaaaaatcgggatgagctcctgaaccagctgggggagttgttccgttcggagaactacggcctggtggtcaagctctatgaaaaaaacaatgtgctcgtcattgacggtcagtaa

SEQ ID NO: 385615 - DNA, 1809 bp, Salmonella enterica
gtggtgaatgggaccgtaatgaaaaaaaggataataaagtcccggggcttttcactgctggagataattttcgttctggcttttctgggtattattttactggctgccggtaactatgcccgtaaattaattgatcagaaaacccgccagactgctgctgatgctgtggcacaggaagtttatggcgcactgcagtttattaatgcgggcagcattaccgcgaccgttaataacgtcacgaaaaaagtcatcaatcccttataccagcaaccggctgaccccatctctgaagacccggcagatattaacacactgggcatacagaagaatcctctctggctggctcatcccggtgataccacgaatgcaggcagtgcttcagtatcgccttatattgccagaacgtggtcgaagagtatcaccacaccggtttcaaacgaattgcaggtcactgaccctgacacaggaacaacctattacagccattccctgaaatggagtcaggcagtatggggcccggattcggtccggggatattttacagacagtggatgcgccggagcctccggtaatatctatttcaaccagcagtttttaagttgtaatgaaaacccggtactgagaggcagtgagattgccatttcacgtctggatctggtcagcgaccaggggactgtcagtcgtccggccggtacaactgccggcgttcccgtcggaattgaccgggtggatgtgtacgtcagtttctcaccggtggataacaatcccgcgcggattgagcagttcatcacgccgttaatgacggcgttcaggctgaagaaaatcacacccaatacgaatggtgtttatctggtcagggaactgaatcatgccggtaacacctggacgttactggacaaaaccagcgggcaaccggcgacggcaaccactccggatagccacctggctctgttctctgatctgccggacatgattgacaaattacagcacggacagacgtacgccctccgcttcagttttgacgggaagggggattatctcagaacagacggcctcaactcagcagataaagtctgctggaatacaaccactggtgccgccggtccctgcctgacctcgcctgcgcaggactcgctggtattaaagcagcgtcagaatattcatgagttcgcaaatctgcaggtgggggatgtggtttccaggggaaaccgtctgctggctgacgggaagaccgctgaggaatattacacttccccacaaatcagctatgcagcgttcggcaataccggacaaatcgttccttatttccgaaatccggctgatggcgcgacagacttatgtacggcagataatgcctgtggtcagccgggaccgaatgtcgatgaagtaacggatacccataatggtgccattgcggttccggtacagacctgtccccggaatgttgtggatggtgatggtaggcatgtggatatgtttccccggctcagcgcgtcggtatcctccgtcgtttccggtatgagaaagagagatgacggaacaattcttcccggtaatcctggccactattttgataaccagtccaggaatcttgtggccctgagccagagtgatgtttccatcaaccggctgggggggagtgtactgcagattaggcaggcggccgatggcgccacatggcgaattgccgctatggtggggactgaagataccggcgttgccggtcatccctggcagtattataacccgccctggctttccgtcatgataacgacctggtgcagttctgttgaacagccccagccctga

SEQ ID NO: 385616 - DNA, 783 bp, Salmonella enterica
atgaaagctattagcttgcgtgacatcaggaagcgttttatggcgcagccggaaaaatacctgaatctaaaaaaacaacgcggtatgacgttgctggaaatcattattgtactgggtattatcggtacaattgcagcaggtgtggttattctggcacaacgtgcttatgacgccaaggcaatgactgacctgacaactaatatcaatactattcgtacagcaatgaaagatgcttatggttcaactgggatttacccgattccggcagggacggccacggcagcattgaatgaccagacaataaatgaggcggctggtcaggcaacgcctatcgggaaactgattgcactcggaaaattatctacggatgaagctaagaataatatctcaaatgattacattagtgcaggtgccggtaatatcagtgccaatggtgttcagaaggggtacttccttgaagttaatggcctgaatgcacagcagtgccgtaatatcttactccaggcaggaaacagcttcgattatgttgaggtaaccaataacgctccggcaggtgcgtatcactatgataaagatgcagttgatcttgctcacgcgctttctggtgtcactgccgccgtgccgggagcagacaccgctcaccctggaacaccagcactcttaaccggttccggtattttccgctcactggcgactgatggtaacacactgattactgctgatggtgtaattactgcatgtaatgacgattcggataacagcgtagttctcggcagtcgttga

SEQ ID NO: 385617 - DNA, 417 bp, Salmonella enterica
atgggattttctatcgccgcttctgttgttacgggcaaacaggttattgccattgaaggggattctgctttcggttttagtggaatggaagtagaaactatctgtcgataccagctgccagtgtgcatcgttgtatttaataacaacggtgtttacaaaggaacggataaaaatctctcgggtggcaccgatttggcacctactgtgtttgtcaaaaatgcgcgttacgaaatgatgatgcaggcttttggtggcgttggtatatatgtgacaacggctgacgatctgaacaaagccataaatgaagctattgcctccggaaaacccactcttattaatgccgtgattgacgaaactgcgggtactgaaagtggacgtattacaaaccttaaccctgcaaaagcaatcaagaaataa

SEQ ID NO: 385618 - DNA, 1278 bp, Salmonella enterica
atgaataacgaaaaattattacctttatctggtattaaaattatcgatttcacccatgttcaggccggtccggcatgtacacaaatgctggcgtggtttggcgctgatgttatcaaaatagaacgtcctggttctggcgatattacacgtaaccagctacgagatattccggacgccgatgcgctttatttcacaatgctcaacagtaataaacgttcgctgacgctagatacaaagacgtcagagggtaaagaaatattaacacggcttattaaagagagtgatgtgatggttgaaaatttcggccctggagcacttgatcggatgggatttacgtgggaatacatccaggaattaaacccctgtatgatccttgcgtctgttaaaggatttagtgaaggacaccattatgagcatctgagagcttatgagaatgttgcgcaatgtgccgggggggctgcgtcaacaactggctggtggaaaggtgagaactcaggcccaaccatttcagctgcagctttaggtgacagcaatacgggtatgcatctggcaattggtatccttactgcttatattggtctccagaaaacgggaaaaggccagaaggtcgcctgttcaatgcaggatgcagtactcaatctgtgtagggtgaagatgcgtgaccagcttcgtctggacagagtaggttatctggaagagtatccgcaataccctaatgaacccttcacggatgtagtaccacgaggagggaatgccggtggtggtggtcagcctggctggatccttaagtgcaagggatgggaaaccgatcctaatgcttatatttattttacggtacaagatttggtgtggactcctatttgtgacgcaattgagcgccctgaatggagagaagatccggcttacaccacacctaaagctcgtcagccacatatcatggatatctttggcgctattgagcactttattcttgctgcaggcaaggataaatacgaagcagtggattattttggtaagttcgggattccctgtgcaccagtgatgtcgatgaaagaattgctacatgatgagtcgctactcaagagtggctctatcgttgaggtaccacataaagttcgcggtagttactggactgtaggttgtccaattaagttttcagatcttaaacctgaagtcacggcctcgccgctgctgggtgaacatactgacgaagttctggcagaactaggttattcatcagaacagatttcgcatattcatctttctaaagctgtttag

SEQ ID NO: 385619 - DNA, 432 bp, Salmonella enterica
atggataaatttcagcaatttctgacaatggctggtgatgcaatagttatctccgatatatcaggggttattaccggttggaatccagctgctgaacgtttatttggttatacgtcaacagaagcactgggttcctcacttgatatcattattcctgaaagataccgtgagcggcactgggatggttattgtcatacaatgcaaacgggccagactaagtatggcacatcgattctccgcgtaccgtcactaaagcaagggggagacattttatctatcgcgtttactgtcgcgttattatttgatgaattcggtaatcctgaatttatagtagctgttattcgggatgaaacctcgcggtttaatgaggagagattattgcgaaagaggctggcagcagtccagattgacctggataaattgatggaataa

SEQ ID NO: 385620 - DNA, 1245 bp, Salmonella enterica
atgaaagcattagagggaatacgaattatcgattttacacatgtacagtctggaccaagctgtactcagctgcttgcatggctgggagcagatgttattaagattgaacgtgttggtgagggagacgcgacacgtaaacagttatgtgatattcctgatacagacagtttatactttacaatgctgaatcataataaacgttccatcacattaaatactaaaacccctgaaggactggaaatcctgaacaatcttatcagatgcagtgatgtcattgttgagaactttgcgccaggggctctggatcgaatgggagtcacgtgggaacatatccattccatcaatcctcgcacgatccttgcttccgtaaaagggtttgggccaggtaaatatgagagttgtaaatcctatgaaaatgttgcgcaatgcgccggaggtgcagcatcaacaacaggtttcgatgatggcccgccggtagtgacaggggcgcagattggtgattccggctctggtctgcaccttgctctgggtatcgtttctgccctttttcagcgatatacaacgggatatggtcagaaagtgtcagtatcaatgcaggattcagttcttaatttatgccgtgttaaactgcgggatcaacaaaggttggaacggacaggtacactggaagagtatccgcaatacacagagggtcagtttggtgaagttgtaccacgtgcgggaaatgcctctggcggaggtcagccgggctggatcctcaaatgtaagggctgggaaacggatcctaatgcttacatttattttattattcaggcagctgtctggcctgctgtatgtaaggtgattggcgaagacggttgggctgaggatgataaatttaaaacgccatctgctcgtttgccaaaactaaatttaattttccggcgtattgaagagtggaccatatccagaacaaagtttgaggctatggatattctcaatcaatataatattccctgtgctcctgttctttcaatgaaggaaattgctgaagatgagtcgcttcgtataagtgggacgattgttgatgttgaacattctttacgcgggcggtacacgacggtaggtatgccaataaagatgtcagataatttagtggaaataactgcatccccgttacagggggaacatactgacgaaattttgtatagtttaggttatgatgataaggatattattacttttcgtaatcagaaggttatctga

SEQ ID NO: 385621 - DNA, 858 bp, Salmonella enterica
gtgaaaggtaacaaattcaacaatattttacctcctgttgaaatggcaaaagcagctgaagagacaggtgtatacaaaagtactaaacatccgctaaaaaccttttatctgtctgttacggccggtatgtttatctcaattgcgtttgttttttatatcagctccacggttggcactgcagaaatgccttatggaattgtaaaactgactggtgggatttgtttttcacttggtctgattttatgtattatctgtggagctgatttgtttacatcgacagtacttatcgtagtggcgaaagcctgtggtcatattacctggcggcaattgctatggaattgggtgaatgtttatattggaaatttaattggagcactcttttttgttctactgatatggttatcaggtgagtatatgatagcgaacggtggttgggggctgaatgttttgcagacagcggaccataaaatgcatcatacatttatcgaagctgttactctaggtattcttgctaacttattggtttgtcttgctgtctggatgagttatgctggccgtacattggttgataaatcaatgattatgattcttccagtagcaatgtttgttgcaagtggttttgaacacagtattgcaaatatgttcatgatcccgatggggattgttattcgttattttgcaactccggaattctgggcggcagttaatttaagtcctgcagattttaatcaacttactgtaatgaattttattactgacaatctcttgccggttactattggaaatataattggaggtggggtatttgtcggattgacgtactggtttatatacctgcgtgatattgaccatcactga

SEQ ID NO: 385622 - DNA, 795 bp, Salmonella enterica
atggatacagaattgttagatacttttgtacatatatctaaaacccgcagtttcacaaaaaccgcagaggctatgtgcttaacacaagctgcagtcagtgccagaataaaacaacttgagaatctggttggacaccctgtttttattcgctgtaaaaatagccatgcagttcatttaactaaatccggatatgctctattaccattcgcttcagattttataaatagctgggctatgattcgaaaggaaataaacaatattcatgacaagccaattctgaatatttctgtatatcctgctctggctaatttcttttttgagaaggtaaccattttatttgatattgaaagatttcagttaaacatacatcaaagtaataatatgggtcttactgagtcagtttcagatcttgatacagacgtatacatatcgctgacaaaaccgaaatcatctcaatacgagcatgtgcatttgggaattaacaggattggcatgttatataatcaccttattgagggctcaacactttttgtcgactggggaagtgatgcaaataaaaaaatacatatgtattgctcaggcggcttttcatttaaaagtgattctccagactttgctattaattatattctaaaaaatggtggcagatgttaccttcctttaggtatgaaaatgaaacagataaaacaagatttgagttacccattaataaatattccaatctatgcgatctttgataaaaaaaagacaaaccctgcaattaatcctttgcatgatgtttttcacgtgaaataa

SEQ ID NO: 385623 - DNA, 585 bp, Salmonella enterica
atgggggttatagttgctgtagtttttcagggagcaaatattactggtattttcgatattatgagtaatggatacagagttgctgatggtcctggaataattaaaataatgttagaccaggggggtgtccaacccatgatgtggactttttcgttatcctttatcggcttcagtcttggaggagttctcgataaagtcggatatcttaatgctgttttatcaagggccaccgcaagggcacaaggatgccgtaaattatcgctgataacatatgttaccggatggttgggctgtgctgttacctcagaggtttatgtcgcccaaatgctaaatggtagaatctacaaggatgtctatgaacgcgagggaatagataacgccatgttaagccgatatattgaagagagtacaacagtatttgatatgtttttaccctggactacagggggggcttttatggctacagtgctcggtgtagcaaatttacattatttaccattttcctttttctgtttacttacacctgtggtatcaatggtgctgacaatcttcggtattggtataataagaaaacggagtatttga

SEQ ID NO: 385624 - DNA, 453 bp, Salmonella enterica
atggcacttacagccaggcaggtcgagactgccagaccaaaagagaaagattataaactcagtgatgaacgcgggttattcctgctggtcaaaaccagcggtgcccgttactggcgtatgaaataccgcatcgctggaaaagagaaaaagttatctattggcgtttaccctgatgtttcacttgcggaagctcgtgccagacgtgacgaagccagaaaggtcattgctgaaggcggagatcccagcgagaagaaacaactcgaaaaacggacccaaaagatattcacagtaaacacctttcatgccctcgccactgagtggcataagcacaaatgtaactcatggtcggaaagctatgcggaaagcgttctggaggctctggaaaaggatatattcccttatgtgggaaaacgtcccgtcgcagaaatactgccgcttatgagacgacaataa

SEQ ID NO: 385625 - DNA, 1209 bp, Salmonella enterica
atgcaaaacttaactggttcctctgatttctgttcgattccgtctgataaagcatccggatcactttcttctgtccggatcgaaagtgatcgccccgatactctattatttccgctgtcaaaagtcgcggcacaaatcctttccatcatttccaccaaaggtggcgagggcaaaagcacccagggcgcttaccttgccggtttcactgccgatgccggtctgaaaacccttctgattgacggtgactactcccagccgacttcctgcagtatctatcatctggactacgaggcaccctgcggtctgtatgaactgctgacacagacggtcgaccttaacagtcctgataaaattatttcccgcacctgtattccgaatctggatgtgattgtctccaacgaccctgatgaacggctcccgggcgagatattacacatcgcggatggccgcatgcgtctgcgcaatgtgctccagcatccgttgttccgccagtatgacgtcatcattatcgattcgaaaggggctgccggggttatgactgaaattgtcgtcctggccgccgacagtgtggtcggggtgataaaacccattctgcctgacgttcgtgaattcctccgcggaacggtcagactggtgaaccgcctgctgcctctcagaatgtacggtatcacaattcctgatatccatatcctgattaaccattttgaaaacaccgtcctggaccgtcagaccctgcgtgaactgaccggcattgttgagcagaagaaatataccggctccgctgacatcagcatatcgatgcttaacaccacgattgaaaagctggaggtttacaagcgcggtcacgccacaggccagcccgttcaccggctggagtacacaactgaccgcaagtctctgccggcggccgagacgattcaccatctggcctgtgagctgttcccgcagtggaaggcgctgtttgatgatgtgctgcgccgaagacccggtgtttctgacagttctgatgccgtttccggtgcgaacgaagggggatctggtgttgcggaagcggtctgcgtcgggtgtggctgtaccgacaataatgcctgcgtgaatgaatttcgcgagccctgccgctggctgaaagttaatcgtcagacagggctgggcgtgtgttcgtcatgcccgtcttttctgagtcatccgctgactgatgatgctgagtga

SEQ ID NO: 385626 - DNA, 444 bp, Salmonella enterica
atgaataccaatgaaaactggcgggatgaacacgaacgtaaatatcaacagtgggagtccgacaaagcggttctcagtgacaaaagtcgtaagttctatgcttttgttgctgagaaatataaaggggtataccccggcccggtatttgcacagcaatattttcgtatgctctggctgggagaataccttcgccagaaatacaactggcatcatcagttccacgaaatcagcccacaaatggcactgaaatacgcgctgattaagcagtatggggaaaaatttacagacattgatgcgcttacacaggaggaaatgtccctggccctgactgattactggagcgaatacatggctgacgagacctggaaatggaaacgttatgctatcgagaaggccctggactctctcgatttctggtcgcccggtttcgattccgcagcctga

SEQ ID NO: 385627 - DNA, 438 bp, Salmonella enterica
atgagaattctttatcgtgcagcctgttcctgcgctgcctccctgcaccgtggttttgatgaaaaactggtgttttttgaggctgaccataacgacgacgccggtacgcgcctggtcactttgctggctgatatctggggtgtaccagaatccacggtgatttattacaacctgttgtcggagtatgactatcaccgtcatctggatgaacttgccggaaccccggggcatcagtccccggagcctgacggactccgggacgacatgcggctgtttgaggccatgtggacgtataaccatggctgctgtgaaggtgtgacatacctgccgttgtctgatatgccgctgtttctggtttctccccgtacattccggcgtctgtcggatgccttcttcgcctgcccccggggagcgaaagcggaggtggttaatgggtga

SEQ ID NO: 385628 - DNA, 1413 bp, Salmonella enterica
atgggtgacctcaaaaaatccggggcgcgtgagacgcgtcgtgatgtgccgtatcacccggctgctgaaaccagcgttctcggcggactgatgctggacaacgaccgctgggatgagattgcgcctctcctgaagccgaccgatttttatctttcggtcaatcagacgattttcagtgaaacagaacgtctggtcagcgccgggatgcccattgacccgattacactttcggagtcgctggagcggcggggcatgctggagcggtgtggtggttttgcctatctggctgaactgtccaaaaacacgcccagtgccgccaatatcgtggcctacgctgaaatagtccgggaatgcagccgggcccgtcagctgatgaagctgggaagcggtatttatcagcaggcctctcagttgcagccgtcagacggcagggggatttccacgctgcggcaggtgacggacgcgctggttgaacagagtgagaaagaactgtttgaactggcgctgcagaacacgccgcaggcctgcctcagcatcaccgcgcaggcatcagacgtgttgctctggctggagtctgtatccggcggaaccggcgtgacgggcgttcccacaggatttgcggagctggatgccagaacctgtggctggcaggacggtgacctgatactgattggcgcccgtccgtccctggggaaaaccgccctggcggtggcacatgcgctggcagcgctgtacggatgtccggcggagaaaacggtccagttctacagtattgaaatgcctgcccagcagctgatgctgcgtctgatgtccatcctggcgagggtgccactcacccgtctgcgcagcggtaacctgaccagttatgaccttgaactggtctgtggcgcggcgggaacggtgtcgcagtgggaaaaccgcttccttatagatgattccacttatcagaccccggccacattgcgaacctccgtccggcgtaatgcccgtaaatacgggaagcccgccctgattctggtggactacctgcaactgatggtctgtccggagaaaaaggagaaccgtacccaggaaatccaggagatttcccgctccctcaaggcgctggccaaagagatgaaatgtccggttattgccctctcccagttaaaccgtgcgcttgaacagcgggctgacaaacgccccaactgcggtgacctccgtgactccggctccctggagcaggacgctgacgtcattctctttctgtatcgcgatgaagcttatcacgagaacaccccggaccggggtgtggctgagctcattctgggcaaacagcgtcaggggccgctgggcacagtgaaagcccgctatgaaggcgaatacacccgtttttctgaatatcatctgggatacggagggacgacagcgtga

SEQ ID NO: 385629 - DNA, 351 bp, Salmonella enterica
gtgagtctgaaaaaagagcgaaataaggcctgcggccgggggcaactgtcccctgagattgaacgcaaatcccgtgaactgctggggtatgccatctcacagcaggaactgcgcctgatgccgtatgtgcagcactgcgccatgaatgacggttatatcaaccagacgcgggtcaatccacaggagcgggaaattctgcgccagtgggagtaccgcggatttggcgggttctgcggaccccgtcttgatatcgaaaaatccttctggttcgccataaacgaaattctgtggccgggctatgtcatgcccgtctgcggcggtatctgttatgcaggagagtcttccatatga

SEQ ID NO: 385630 - DNA, 462 bp, Salmonella enterica
atgaaaaaaatcaatacagaaacagcggcatacagcgtgagtgagaaaggggaaaaagacggactgaccctgaatcagcctgcggaacgtaatgctgagtatgtaacagaaatttccagacttaaggccaggtgcgctgcgctggcttcggataatgcggcgctgaaataccaggagccaacgctgacggcgatgatggcgtgtcttgaggcgttctacgctgacgaggacgtgcctgaacgggcaatgatggggggctataacattcttcgcaagtcggtaaataccccagccaccgacgcgtttctggatgaggtgcggactcaggcacgaaatgagctgattactgaactcgaatcacggtttaaccaaatgactgaaacgttgccggttgagctaagaagtggtgctgccggagccgctgcatttgtgtcggcgtttcgcaaaggagccgcgctatga

SEQ ID NO: 385631 - DNA, 393 bp, Salmonella enterica
atgagcacacaaaatacgataacgagcgaaatactgcaacagcacggaattgatgaagctacctggagcgcgctcaaaagcagtatctatcccggtgccagagatgagtcagtactcatggccgtggattactgccgggcacgacagcttgatccgctgatgaagcccgtccatctggtccccatgctcgttaaggatgcaaaaaccggaaaaagcgaatggcgcgatgtcgtcatgcccggcgttgggttgtaccgtatccaggccgatcgctcagaaaattacgctggttcaggagaacccgtgtttggtgatgtgattgagggagagtttaacggtgtcagagtgagatacccggaatggtgtatacccatcgtcattgaagatgcttga

SEQ ID NO: 385632 - DNA, 2520 bp, Salmonella enterica
atgagtgaaaataaagaagattttgcgctgcactgtcctgttaaaaatgaagaagccagaaagcggcttggaataaaagcaggcttcttctggaccacagcgaaaaaattatccgtagccgtttcgcgctgtattgctgctatggatgataagggatatgacgaggacgattttaaaaaacccgttcgtgtcaatcttcctgccattggcgaccttccccctgaaggcgtgtttgatactgaattctgcaaccgttacgaacaaggcggtgaagacggaaaaaccatgatgctgatccccggcgcggtccctgctgaccagtttcacggagaatcagtggagaatactgccgtcaccagtgatacgccagcaaacgacaccgtaactgacagtgacgacactgccggtaatcccctccccgcttacgcttataacgttaacggcgaactgatgtcagacgttgagaaagaaatgcttcaaccggttgcctcaatgagcgaacgtcatcgtattctctctcagtttatccttgagggtgaattctcgcatcgcattaccccagaacaattatccgaagtaaatcgtatggaactggatatggatgacacctacatccaggacatgctgctggcctgccataacgtacccggaatacaaaagctggataacccgaatctgtggaaattcactgacgcctttaaaaggattttcccacaggacaaacgtcacaccctgcatatgatgatgaatttcgcgcaggcatacgcagacgcccacccaattgatcgtgctttgctggctaaagaatggcaaaaaggcaatcgcgtatcgtgtatcaaccgtactccatcaggcgctaacgctggcggcggcatacagtcagatcgcaaaatgccacaaacaattcttggtcttgaatttgaaatagctcttggacttcttgcgcgtaagtacgagttcgatatttactcgctgccgctggaaatcgagttgaaagcaaacgccatcatgaacgcagttgacgatcctgagtggctggcaacgcgcgaattgttcgtatcgatgcctggcggccttgattattcccgcgcctgcgttattgcaacggtaaaaaccacgccggaaaacctatacgagtcacctttccgtcaccgtgagcatctgaataaagtattgacggaaactgatcacgctaccccagatccgctggtagtgaatatcgcctgcggtcgctcatcactgcccatgccaatgaaggggagtacaaacgatgatgaagaaaaaccgcaatcagcaggcgcaatggcagatgaaccggcagcgtctgaagcagtggaacaggacacaactgaacatcatccggacccacagcaggtggagactgaatcatctgtagctgtagcggatgatagcgagcaagcccttcgcgaaaaattcggcgagcaactcgcggccgaacgtggtgatttcgtaccaggcatcagcgacccgaacgatccgaagtgggttcataacgattacagcgcctcaaatgagggcgaaaaaacggaagtggcgactgatgctactgattcagttgaccattctgaagcgttttcgaaccagcacgagccagaatccaaccactctaagccagtagcagaccagaacgaaccggaaacgccacaaacggaaccagtaccacgcgtaccggatgatattcagcctggtatctactttgatatcgctaacgaggcgtatcacgctggccccggcgtcagtaaatcacagcttgatgatattgccgtttgtcctgccttctaccagtggcgcaaggctgcgcctgtcgataccgaaaaaacaaaggcgctggatatgggaaccgccctgcactgccgcctgctggagccggatgaatttaaaaaccgctttattattgcgccggaatttaatcgccggacaacggcgggtaaagaagaagaaaaagcgtttattgaaagctgcaccagtaccgacaaaacggtcatgaccgccgaagaggggcgaatactggatttcatgtttgacagcacgatggcacatccctttgcccgaatgttactggagcatgaaggcgtcagtgaagcctcccactactggattgacgaagaaaccggggaactttgccgcattcgtccggataagcgtctcgttaaccttccagtcattcttgatgtaaaaaaagtcggtgatatggctcatttctcccgccacgttgaggaattccgctaccacgtccaggacgcgatgtatcgtgagggcgtactcagaacgctgggcgaagaacataaatttgccttcatcgccgtcagtggaagcattgactgtgggcggtatccggtccatgtgtttgaacttgatcccgatgatgtcgatacgggataccgcttattccgccgggatctcagtacctggcacaaatgccggacatccggtgaatggtacggcgtggagacaatcagccgccctgtatgggcccgtaaacaggacatgtactcatga

SEQ ID NO: 385633 - DNA, 501 bp, Salmonella enterica
atggtcgtgaccgtggcgaacaaaacacactggctcgcaattactatcttttcaccgaagtccttaaaaaagaaaaacaggaatataactacttatttgatggtaaagaatggttatgtgttgagtgtccccttactgaatattgctgtgaagaggaatttttcatcacggaatccagtgaataaattaggcaccctggcaccacagcagaactccgtaaatgtaagaagctgctgctcttgcaaccaacggttcgattggttggacaatcagccccggaagcaaccgggaacatcctgtcccgataagcgcttacagaacgtttatcaaggctggatggcttaccacttcaagacggccttaataaatgtctaccaagtggcggcaccgctccgacaacggcggcagacgttcaactgtgaaaacggtgagatgccagcacgctcgacggcagtgacggcgggaagtagaccgcaagatgccaggcgcttatatggataa

SEQ ID NO: 385634 - DNA, 141 bp, Salmonella enterica
atgtcgcaaaaaccgttattcgtcatcacaatttttgtggtgataatcctcacattctccatgctgcatggatcgttatgtgaagtgcgtatgaagttttggggagcggagtttgcggcgttcttacagtgtaagcagtaa

SEQ ID NO: 385635 - DNA, 1689 bp, Salmonella enterica
atgaaaccaattcgtgatctcagaattaacggcaagccttaccccgtcgtggaagaaaatattgtgctgcgtctcaatggcgcgggaacgggctttatcaccatcaacgacaccgacgacaaaaccccgctgcgtggcaggtcagtagaactttccatcggctacaacgatcagccggtcagatggttttcaggctacgtggaaaacgacagccgcaccggaaaggggctgcgtaaactgatggtgcgcgaagccgccgccattctgcaatacccgctcaacgtctcgatgcagcacccgacgctaaagcaggtcgcaaaacacatcgaagacaacaccgggctgcgcgtgcagctaccggacgcggactacaccaccacgccgatccctcatatgacccataacggcaacggctatcaactgatgaccctgattggccgcgcattcaatatcccggattacgtctggtatccgtcagtcgacggcatcgtctatgtcggcagttttgccgattgccgctttgcaaaacgcccggtacaactgccggtcgaaataaccaaagacgaccacggggccaacggctggactgtgcagactatccccatgattcgccctggtgtggtcatgaacggccaccgcataagccaggtacagctacagggcgacagcatgataattagctggagtgatggccgtcagtctcccatgcagcgccaggttgaaaccctctaccccgaactgggcaacaaaacccacctcccacgcatgggccgcgtcattgccccgaccgaaaacaccactcagggcgatttgcacgatgaatttcgcccgcgctacgccgtcaacgtgcagccgctcgacgagaacggcaacccggagaaagacacgccggtttataacgccgtaccggttcccgtaccgatggccggtagtgaatccggcctgttccagtacccgccagcgggaacgctggttacactggcccacgttgacggcagaccggataaacccgtcatcaccggcacccacgcccacggtcagagcctcccggacattaagccaggcgaacagctacagcagcaacgcgcggaggtattccagcgcgtacacacggacggtagctggcaacgggaaaccgatcaggctattcgcgagaagtccaccgaccgcaccatagagaacaccacggagacgcgcaccagtaccacgcgtaatgtcaccgtaaaggccaacagcaccatgacggtactcggcactcataagctgatgagcggtcatatccagcacatagcagacggagattacgccgtcgccgccacgaagaaactgctacagcacgccgacagcgccgaactggacgttaccaaaacctggacgacaacagcacagaacgccacccacaatgtggcgcaggtgctggaagaaaagattggccagattaaaaaatccgtcgctggccagatgcaacaaatcattgccccgcaggtctggttcggcagcagcaccatcaacacgcttaacctcatgctggatctttgcgacaccgttcagcaactggcgcagctcaccgcacagcacacgcacaccaacaacggcagttcacagcctaccaacagcggcagcataagcgccacggcgtcaaaggctggcgacctgaaagcgaagtacagcgccgtgattaagcagtga

SEQ ID NO: 385636 - DNA, 567 bp, Salmonella enterica
atgagccagaacacaacaaccccattactggcccttaacggtcagataatcccgctaaagcgtttaagcgtcagtgtgaaactgaatatcagggacaaggacgcgtccggcaagtcatccagcaccgccagttctgaacaaggggtgaaggccaaagaactacaggtatcaggacttatcccctttgaacaacccgaagccctgaccctgttatttcgcctggcggaagccaaagcggccagcggcgcacagcaggtttaccgtatcggcaatatggacgccaaagcggtcaatatgcagcaggggatcttttccggcgcagtgggcgcagtccctgaaataggcctgatggcctggaaagtcgattttaccctgaaagaaaaactcagcagcgccgaaaaggccatcggacgcggcccggctggtagtcagagtgccgaacagcacgcacaggccgccaaagcaggcaccaaagacggcaagccggaagaacacggctggttctgggagttttcttcctggttaaataaaaaaataggcccggcaggcaatgaaaccaattcgtga

SEQ ID NO: 385637 - DNA, 744 bp, Salmonella enterica
atgtggtttccggcaaaactggcacttccggcaggaaatattaaacccgtaacatgttcagcgatggccgtacacccgtgggacgaggaagcgggacacgtcacgcctgacggcgcgtatttaagcccggtcaacgcaataacccacctcaacagcaaactttcaggtctgaccggaaacaacgacattgccatcgtaatgataacaggcagcgataataacggttttattcgtcagttatccgcgctggcagacgcactcccattacccacactaacgcagacgttaagacgtgccagaacgcagctcactcaggccatcaccagaatgcagatcccagccacaccgcaaaacggacttcctgcaccacaacagcttatcgtcagtacgctacagaacgccgtcagtaacagcgccacgcttgacgccgtaaaagcggaaggtctggcctccctgaacgacctgaagggcgcgttatccggttttcaggcgcagcgccagcagttgcaacagcagataactgacgaactggcgggcatgggtgataagctggcgaaagtgttcgctttcgtacataccggcgacgccgttttagcccgcgtggagatgatgaaaaatattccgcaccccaccgcatcactgacgtatgcacatatgttcgtgggcgatctttccggtatgaagaactggataacgaaggtagaaaatgagccagaacacaacaaccccattactggcccttaa

SEQ ID NO: 385638 - DNA, 381 bp, Salmonella enterica
atgagtaaattcacaacccccgcaattcttgaaatgctcgatcactatctttggcgtgtgcatgaaccctttgagttttacctcagcgacgacaacagtgacgtaatcagcgtgccagccggattcgttaccgatctcgccaccgttccgcgcgtattctggtcagtcatgccgccagacggtaagtacgccaaagcggcgataatccacgactacctctacgataatgcgttacgcacgaagaaagaggccgatttaatattccttgacggaatggcagtgcttggcgtgcctaagtggaaacggattgtgatgtatctggccgtgcgcatttttggccggggtaattattccaaagaccagcaggcaagagaggcgtag

SEQ ID NO: 385639 - DNA, 726 bp, Salmonella enterica
gtgggttatatcgataacgccgggctgcacatgctcgcgggcattgctactaacggtaacgttgtcctgcaaaacgacgcacgggaacacatcattatccagaatgcagacggaacgccccgtatgttgatctacaaggataaaggcggtgatggtgttcacctcaacaatggtaatgacgcctccacagaataccttttccacaaagacggcagtttttatgcaccattcgcaatccgtgcaggcggcagtaaaaaacttgctgttcaggccaatgacaattcaacactgagcgcaatgttcaatttatggggcagcgcaaacagacccacagtgattgaactggacgatgaccagggctggcacctgtacagccagcgaaatactgacggttcaattctgtttacggttaatggcgatattatggctaaccgtaaactgaatgtgggcgacgctacgttctccagcgacggtaatgttaacggttcgatatggggcggctggctgaatgactggcttaataataattttgtaagagcggtcaggcttgggcccgtagctctttctggcggtctgtggcgtgattttcagcttggcggcggacaggtagtgacggggttccatactgatggtgactgggaaatgcagggcggcgacgacaaagtctactatcgcccgattcagtatcttattggtactcagtgggtaactgcgccaagtgtgtaa

SEQ ID NO: 385640 - DNA, 339 bp, Salmonella enterica
atgtgttttatcgaccacttcagtgcgctggatgacccacgcaaagtcattaatatcaggtacgacttcctggacattgtttttcttaccgtttgtgctgtggtatctggcgctgaaggctggaaagatatcaagcagtttggcgatgagaaaatcgagtggttacgccagtacagggcttaccagcacggtataccggtcgatgacacaatagcccgactcatcagagcgatagaaccggaaaaaatgaaccaggcgtttattgactgggtgaatgaggcttgccaggaacaaggccatgagcagattgccattgatggcaagacgctgcgccattaa

SEQ ID NO: 385641 - DNA, 648 bp, Salmonella enterica
atgccagcagtttcaatctctatgagaaaactcaaggagatacttagacttaaatatggcctcggtttaagccaccggctgatagcccggagcctggtaatctctccatccgtcgtatcccggtaccgcagcagcaggggcctggataaggccctgatccgttcactcggacagggaaactggctgaagcttaaacaaaacctgttactgaccggcgcgacaggcagcggtaaaacgtacctggcgtgtgcgctcggccataatgcctgtcggcagggatacaaggtctactactaccgactgaaagcgctgatggatctgtgctatcaggggcatgccgacggaagatacagcaaactgctgacgaaactgaatcacagcgatctgctgcttctggatgactgggggctggagcctctgtcgtcagaacagcgcagcgatctactggaaatagtggatctgatgtaccagcgaggctccgtcatcgtcgtgagccagttgccagtggaaagctggtacaagatgatcggggactcaacgcatgctgatgcgatcctggatcgcctggttcatgggagcatcaagatagaacttaaaggagaatcaatgcgaaaaatgcaaacctcattgaccgaaggagatcagtga

SEQ ID NO: 385642 - DNA, 153 bp, Salmonella enterica
atgctgacgttcactggcggaaagaccactatcgccaccattgatgccccgttcatgctgacagtgccaagcgtgaagagtatcgggactacatcctgttttggggcaatagatttaacgtgtgtttccgggcagggcaagatcgtactttga

SEQ ID NO: 385643 - DNA, 468 bp, Salmonella enterica
atgagtagcgtcaataagttcagagaacatcgccttgcccacgcctggtcacaggagcagcttgcagaaatgacagggttaagcgtacgtaccattcagcggatagaaaacggtgagcgtccgggactggaaacattgagtgcactggcagcggtatttgaggtaaacgtagccgaactcaccggtgcggcaatcagtggagacgaggcgctggatgagcgtattgcctatgtcagaaagcaactcgatgaagagatacatttttaccgctcaggtatcacggcaatagtctgttgtactctgctgtttgtgattaattatgctacttcgccggacagcaagtggtcagcatggatggctgtgatttggggaaccctgctcgtaatccgtggagtgaaaacatttgtcatgggcggaattatcggcagatggcaacggaaacgattccagaaattgctgcgccgctaa

SEQ ID NO: 385644 - DNA, 777 bp, Salmonella enterica
atgacgaagcataatccgataccggcccggcaggtcatcattcacggtgactgctggccggtgacgacaactgtggtgcatctggtcaggtcagttctgccgggctgtgaatgtgaggcaacatatatattgccagtccttttacagcaactgtcccggaagccggaagcggcgttaatattatgcctgcgcccccgtgaacatctttttttgttctatgcccttaaacaggccctgctgaatcacccggctctggtcatcagcgatgaactgtttttcagtgacaggctggtcctgaaggtctacggggatatccctgtgcagcagcaacaggagctgacagctctgctcacccgggttcagcaggtagagctgtggcctgacggagtgcgcccccgggtgacaggaaggctggctgattttttatcctcactggccccggcaacggggtttccggaagtaccgcagatatttaccagccccaggcggctgatgaactatatggccctgctgatgcacagggaaatgctggcgtgcggggtgagcccggctcagcagcgtctgcttgaggaggtataccggggacgggaaaggctgtcagggctctccggccggctgaatgtaggggaaagacaaatctggcaggacaagtaccggctgctggtcaaaatgggaatgaataaccggctgcgtgaactgctttacgggacacgattctgccaggatatacagcgaactccgtttatgccgccggaagatgttgaacagttcaggtaa

SEQ ID NO: 385645 - DNA, 507 bp, Salmonella enterica
atgtgccctgacagtacacacaaaaagaagccatatacacgggcaggtaatgatattcattatcccgggcagacaaaccatgatgcctgttttattccggagaacgtccgccagtatgccggtgagcccctgtatatcattgtggcgcactggtgtgtgcagcaacaggactgggtccggcgcaaccagatatcggaggcgtttcatattactgccagacgggccagctacctgattgcctatctgagaaataaagcatcgcgggtggtctgtatctgccgtcaccagaccctgcccaataaagcgcggcgctatgaagtttatgtcatccggatgcttgagagtccttcacagacccgacgtgaaaagcccccgtccccaccggtatcacggcgccggatagggaatgcagataaagcacaggcaaacgcactgtggaaccggttgcgtagcaaccgtaacgccggaaaaattctgaagaaggaggatgaggatgacgaagcataa

SEQ ID NO: 385646 - DNA, 1191 bp, Salmonella enterica
atgattaaggccgggaacggaacaatgaaaacaagggatgaccggccatcgtctgcgctgagtcgcagactgaacctgccggcgctgctccggtggctgctggtggtgtttgttctgaccggaccggggtatgtgtatgccgttgatatgatgtgcactggtctgaacggcagtacgggaactataaagctgcagttgcctgcatcagtcagtttcgatccggaaggtgacttaaaaccctatatcagcccgcctgctaagtttgactacacatgtagtgcatctgacggcgtttctcataccgtgggtataatacgacttggcgacatgtcgcctttaattaatgcgctcaataaggcaggactgaaactcgaggttcttgtttctgattcgagcggggggggagaaagcgtctgggatttcagtgtcgcaactcccgctgaatatgtgaacgttggttcttcctatatcagtacaacaggaaacagaaccatgacagtcaggaccagacttacccgggaccagacaaaacctaagcccaaccccggattttatgttgtaccggggctgacgtctttcaaactgatacctgactattacagcacgagaatcggcccgttcctggagactccgccgacgaggttacagtatgtccctgtctgttttgtacggaccagccttggtacaaataacgtcaacttcgggcccgtattgacaaccgatgtggacagtactttttcccgaagtattgctttcaatgtcattgcagatgtgaataaaagctgcaataacggaaccttcggaaatctcctgggctcctatacagtcagtgtgacgggaggaacaacaaattattatcttgaacttcccctgaaagtctcatttattctgaataatggtggggaggtttcttcagatagaaaatccatcctgctgtataaaaaagacacacatacaaaaaatggtctgaaactgcaaataactaacgccagtaatagtaatacccccgttacgtttggtgaaatcagtttaccagacagcttatctgccaataaatttggtgaattcaatggcaacggtagcaagtggagtacagacaatatctataacgctgttctgtcttccacaggagaacaggtaataaccggaaaataccaggcgcaggttaccgtgaaagtggattactactga

SEQ ID NO: 385647 - DNA, 405 bp, Salmonella enterica
atggtacagcgctttggtgagcgccactgcgccgagctgacccgctccccgcgtgacgggattgacgaagtggtgatgacgaacgcgctcattcaggccagtgccgaaatcgacggctacctggtgtcgctgtaccccacaccgtggccggacacgccgcgcattctggtcgggcgctgctgcgatatcgcccgctaccagatgaccacggcgggccgtccgctgaccgacgagatccggctgcgctatgaggacgcgatccgctttctggagaaggtggccgcaggcactatccgcctcggacgcgatgacagcggcagtgtctatcgaccgacggcgcaggcccgtttcacctcaacgccccggcgcttttcccgcgatgatacgaacgggggcgcgttttga

SEQ ID NO: 385648 - DNA, 693 bp, Salmonella enterica
ttgatagcgctgacggaaggggccatcatcacgcgcctgacgcaggggctgggcgatatggttgacagcgtaaccagctacggcggcgagtttgacggggatgaccccggccgcgtggtggagtcactgcccgccgtctgggtgacgttcggcggcgtgacgcgaagcgtcgccatgagtaccacccggcgcaagtggaaggtcaccggccgctttgtggtgctcgtcggggattacaacgtccgctcagagcaggcgtcacgcaccggcggcgagcgcgacgacgaacccggcacctaccgcctgacgtatgccgtaaggcgtctgcttgccggtcaggatctggggcttgccatcagtccgctgcgaccgggggcagtgcgtaccctgttcagccgccagcttgcagataacgccatctcggtactggcctgcgagtttgacgccgactggatagcgcacacgttggaaaacggccgctggccggaggaagaacaggacggcacgaaggccgaccatcttttcaccctgcacaacgggcgactcgatgagccggttcccgatctggtacgtgtggatattcgctacaacccgcccggacttggggatattgataacccggccgaccgggtagagcttgggagagaccaggatgaaggtaagagcagcgacgggcctgcaggttccgtatga

SEQ ID NO: 385649 - DNA, 177 bp, Salmonella enterica
atgaaggtaagagcagcgacgggcctgcaggttccgtatgagaacctgccccgccggtatatcaaacagacgccggtgaacgtgccggataccatttactaccgccgtctgctggctgccggtgacctggtgacggtaaaagcgacacgcaataaagaggccgtaacccatgattga

SEQ ID NO: 385650 - DNA, 639 bp, Salmonella enterica
atgccagccaatcgtcgtgcgcccgtcgttgcttttgcccgcgagggtggtgccgctggcaagcgtgccgggccagcccgccacacccaccgcgccgcgtttttccatcgcatccccggtagcggtaagatgctcgcgcagcgcgcgaagcgtggcctcatccgtccacggcacggcaatgacctgatgaccggcggcaaagaccgctgccagcgcctcgcgcacgtcggcgttattttcgccgcccgtcatggcgttcacggtcaccgtgacgccgggggcggtggtgcgcccggacaggcgaatatcgttaccccacgcaccaccgtgacgggcggtcagggtgataccgctgtcgctggcggccatctgcgcactgaccggcagcgccggtttacgcgcgatcgcatcgagcagcgaggcggcgatggctttcgcgtcatccccggcctgtaccggcgcatcaatgcgggtatttgccacccaaagggtgagcgtgccgctctgcgtcgccgggccggtcaggctgatatcgccggtcgccgccttgcccgcctgcgcgtcagcaagacctatggcctgcagttgcaggtagcggtttgccttcagggcggacgcggacatgatgtgcgcgagtga

SEQ ID NO: 385651 - DNA, 306 bp, Salmonella enterica
atggcggatatctataacgcgctggataaggccgaacaggttcacggcagcagcgacagcggcgcaggcgatttgtattaccgcatggcgctgatggcctccgtactgacgcgcctgggtgacattcccgctgatgccgtcacgcctgaactgctgcttgccgggctgctttccgaggactacgagcgcctcaatgacgccatcgcagagcttaaaaaaaagcgcaggaacgcgaacgcaggcggcacggactgcggcttgccatcctcgccctcggctcccacggcgtcagcgaagaccgcataa

SEQ ID NO: 385652 - DNA, 306 bp, Salmonella enterica
atgtatcagggcgttaagctccggcagacgggccagacgcccctcagcgtcctgctggtaaaaggcggtattggcaaggtttgcctgcgaatgctcgtaggccatctgatttttaacgggcgcgacaaagggcattgcagccgccacaataccgccgctaatggcccccatctggccgcccgccatgcggacgcgctcaaggcgggtcaggttccccatttcgccattgagcgcggccaccttgtttttcatcgccgtgtacgcccgcgcctgttcccgcgccgtcagcgtgccgctgcgacttaa

SEQ ID NO: 385653 - DNA, 918 bp, Salmonella enterica
atgaagaataaatcagcacgttcaaaagttgagcagttcaggcgggattttgtcacgttagcccgggatgcgggcagaagttacgcgacaacggctgacagcatgcgtattgccagatactttctgaactaccttcgtgataacggtatcaaattacgccatacagacagtataaaaacacggcatttcgtcgggtatcttcagttcagaaaagaacagggtatttccgttcgtacgatccagaatgagcgttcggcaattcgcggaattttaaatcaggccgggcgttataaactggcagacccggataatccgttactgagtaataaagcgctcggactggaagaaagcagcagggcgggaacaaaattaccgttaagcccggaagaatttcagaaagcatttaaggaagttgagagaaataaccgtggcgtggcggcggccatgttgctttcttacacactgggattaagaaataaggaagcggtggaatcctgcaaatccgtaatgacgtggaaacgggcggttgaatccggacagaataccgtacgtgttgtttttggtacgaaaggaggacggccccgtaataccgttattgtggacagggatgccgtaagacgcgcaataacgtatgctgaaaacgtcatgaaggaaaataacggaaaactgattgaccgtccggatatcagaaaagcgatcgacacctaccgttatcacgttcgtcgtgccggactgactggagaaaaagcgcctcacagtatgcgttatcatttttctcaggaggccagaacattttatgcgaataaaggatattcggagcgtgaaatatatgcacaggtgtcaatggatttggggcacggagacgggagaggaagatatgtgaaacaggtttatttcaggaatggtgataacgaataa

SEQ ID NO: 385654 - DNA, 405 bp, Salmonella enterica
atgaagattgaatcgctggaattcatccgggagagcaatccggatgcagacgggtatgatgaagctgtcttaaagtttgtttgtgagacgccgctgaatgaatatgatacctgtgaaatgatatgtcgttatttcggagacgtgcattttgatgagagcgatgacgacttctttatccgtaaaggtggtgtgtatgaaatgggtggtattttgagcgtgataccacccgttaacgttcctgaactgaaaacgggtgagtttataataccggtcattcctgaactggctggtgaactggaggcaggaatatatgatgctgatacgccggttgatgtcagtaaaatagtgaaaagacggttcgtggatttgtttgacaagaatggaaatttaattatctgtaaatga

SEQ ID NO: 385655 - DNA, 162 bp, Salmonella enterica
atggccctgcagcgtcgtatgccggcggtttattcagtaacgatatgtcaggaatgcgtgtatacgacgctgcagcgatttttttcagttcaggagctgccggacaatgtaccgatgattttcctccgttctgccccgcagccccgtatcctgtcattctga

SEQ ID NO: 385656 - DNA, 303 bp, Salmonella enterica
atgcaacttgtcactgtagtgagcagggccttataccggctgctgcctcatgatacctgcacttcgggtgaatggatcaccagtcatactggctacctcagcttccgggctgtggtacgcgaggatgaaaatggcagattccatgcattcgtcagcaaacgtaccggttataccgccaggactttttcttatgagcgggttactgactgcggtacgtttgacacctttcgtcacgccatgagcgtggcgcaccatcaggcctgccagctggcgcatctgcgttatgcctgggaaatggcctga

SEQ ID NO: 385657 - DNA, 429 bp, Salmonella enterica
atgattattctgtttaatgtcattttccggattttacatgccctgatggtgtttttccctgcccggagtgtaatcgctgtgcagttacgccagctggcagaggatgcgctgctgatgaaacgtgtggccgccgatatccggctggccggagaggttttcaggcagatgtcgcgtggcaccggtggacatattcccggtgcggaacagtttgttgagtacacactgttttatgccgcgcacagtctgggatgggggcttttttatggtctgtcgtcccgctggcctgaatggcttattcacgaacttgagttccggggtgcggatattgaggaagcgtactggtgcgaaggccgcagcagcggtttccgggatgcttatgacagccggacgctccctgaagatgtcagtatggttgttgctgaccgctga

SEQ ID NO: 385658 - DNA, 378 bp, Salmonella enterica
atgctgacaatgacaacactgaagaccccgacagataccctctgctggttgtgtctgcttgagagtgaactgctgagtatacgggcgtttaagaatactggtctttatccgcagtacgatgagtctgatgaagagccggtttttgaatgttcagtttataacagtggtatggcctgtggtgaatttctggctggtctggaggcgggtaccatcgcgcccctgactgcggccgggaaggaactgctgggcacgcttaaccacatggggagggcgttatgcgccccggtgtgggagcagggagtaaacagggggctgtatgacgcccgggctgaccgtgccatttatgaagccggcgcggatggctggatatacaactga

SEQ ID NO: 385659 - DNA, 804 bp, Salmonella enterica
atgaacacgatgactgaccttgtgaccctgaactgccgccggctggcggttgcgtggggataccctgatgacctgcaggctcactggagtccgggatattgccaggggggcggtgtgcgttattccgggcgtatcacgccgcctgagataccgcggctggttgacggtatgaaggcgcgtggacggctggatgaacgtggcgcccgtattcttaaacgactggcggccacagaccgcctggatatcacgctgagacattccggttgttacacgcattcgggatgtactgacatcatcactgatgacgtccccggctatgctcagggcctgagtgagatgtttgagaccgcgctgcgggaagacctggactgcctgtgttatgaggcagcgtcagagggggaaagtcttctggatgcacgatggccgtatccgtactgccgggatgataacaggggaaccccgctgttctgcaggcgtaccgggtatctgacggtacaggccgaaatcacgagcgatgacggggcggaagacctcttcattgacgacggactggcttatgagtgtctgatattgccggcgctgcagcagaatctgcgttttccgcaggtgaagctcagcgtgacggtgacggagaccggagaggagctggcgtcgctttactgtgacctgttcttcaggtcagcggagccgctgagacgtacgttctccggtatccgccatgagctgaagacgctgtttgcacaggcccgccgctcgctggctgagcgcaggcagatttaccatgatatccggctggcagtctga

SEQ ID NO: 385660 - DNA, 171 bp, Salmonella enterica
atgacggccccggagcttgttgagcccggaggtcagtatattgaacggattgcgccggaagataactcgcccggcagatataaaccggacctgtcggtgacgaaaggtccctcgggtgagctgatttaccggcgtctcagtgatgacggtatgccggtgacggcaggctga

SEQ ID NO: 385661 - DNA, 156 bp, Salmonella enterica
atgctgtttttaatgataaagcagaatacggctgaccgtttccatacagaacagctgacctgtgagcgttttcagtggagtaaacagagcctatgtcgaaccagaatgcacaacctgaagaacaacctgagtatgaatatgcgggattctggctga

SEQ ID NO: 385662 - DNA, 216 bp, Salmonella enterica
atgaagaataccgatatttatgcattcagtaattttgaattccttgccattacctttgctcagatgaccgtacaggggcgggaaattaatatggatgcagtgaccggaaatatggataaaaggcagcgggaatggtttcttgcaagataccgcttctggcttgcgtcatgtgccgggaatgccggagaaacagataaaaatgagatcacccggtaa

SEQ ID NO: 385663 - DNA, 981 bp, Salmonella enterica
atgagaaaatatttatcaggaattattttattcagcagtggtattttgttgtccggagcggcgcaggccggttccctgacggagaataatgacggctttctggatgcttcagagaaggccgcgctgtctgagtggtttacgccggaaaaagtatctgccggtttatctctcggagcgttgagtggcagtgctaaagaaagggtttaccaggatgggcgcagagtcagtcaactggactggaaatttaaaaatgcgcccatcctcaaaggcaatattgactgggatatatccccgtggatgagactaggtgcatcgggatgggtgacggcaggcagtcacggggcaagtgacatggttgaccgggactggcgactcccggaccaggacagatatacagatatatctcaatccgcttcgaaacttcgttctgccagctcctgggatgtgaatgccacggtctggggcgtgaataatgataactggcgtctgggactcatggccggctggcagcagacggattatcgctgggacgggcatggcggaaattacagttacaataatggaactgatgtgggaaagtttgacgacgaccagaaagttataaactacaagcagcagtttaaaatgccttatatcgggctgacgggcggtacccggttccgtaatgttgaaatgaacaccacgtttaaatacagccactgggtcagggcgtccgacacggacgaacactatttacgggagctcactatccgggacagtaatcgtgattcggatttttattccgtgtcggcggatattggttactacatcacgccacaggcgaaggtctttattgagggtgagtgggtgagaataagcaatggcacagggaacaagacgcagacatatcatgataccggggatgtgatccattaccagaatgcatccggtattgagagttcgtcatataacgtgacggcgggactgaaatattacttctga

SEQ ID NO: 385664 - DNA, 486 bp, Salmonella enterica
atgaatatactgaaaccagataaatatttccggtctgtgctggccggactctgtctgtctgttatcagccatatcgccatggccgcagactgttttgatatggcggggcaggatgcaggcattgacccggatttattacgggccatcgcctggcaggaatcgcggctgcattatgacgccattggtaaaaatccggtatccggttatggcatggggctgatgcagattgattcccagcatctgggaaatatgaagaaaaaggggattgaccgggaattactggtctcggatatctgtatcaatatttacagcggcgcgctgattctggcgagggcctttaataagtggggccccacctgggaggccgtcggtgcctataatgccggctttgccggaacaccgaaacagcatttcaggcgaatggcctatgccagaaaaatatacaccgtgtaccggcaactcaaacacggggaaaacggtcgttaa

SEQ ID NO: 385665 - DNA, 174 bp, Salmonella enterica
atgatgaataacgacaccagacagaaactgatccgttttctggttccgggccgtctgggaaccggttttttactcggtgccggttttatgctgtggctggccattgaaagaaaaacagaatttgatgagttcgttttattcattatcgattttttaaatctgacacacgtctga

SEQ ID NO: 385666 - DNA, 882 bp, Salmonella enterica
gtgatagtgactgaacaggagttttattggcctttttttattctctgtacggtgacagggatatgcgtcggcagttttatgaatgtagtcatttatcgtctgccccttattatatcaggggcatacgatgacaatatgcgattttctcttgcctggcctccctcacactgcccggtctgtcatcaccggatacggttttatgacaatattccggtgatgagctggcttgtgctgtggggaaagtgccggcgctgccggacccgtatttctgctgtctatcccctgacggaagccatcaccgggttatggtttgctgtggtgtacctgtgtctggccggtccggtgaacactctgctgaccatttcaggcgcggcagcgttgctgcctcccctggtgctgttctgtctgctgtactgtattaccgtgactgacgtccgtcattaccttattccggatgtcctgtctctcggcctgttgtggtccggactggtgttatcggtctgcggacttatccgtgtgtcgccttttcaggctgtgacgggatgtgtactggcatactgtctcatcagcgcggttcagtacggataccgcgtgattcgcgggcatgagggactgggtggcggtgatgccaaactgtttgctgccgcgtcagtctgggtcggcctgagtcaggtgccgtggctgattctgttttcagcggtctgcggtggcgtgctgttcggaataaaaaagttttatcagcggaaaatacttgttcaggcgccggcggtgttaccgggagaagataatgatgacagtgaggttctctgcgacggattttatattccgtttggtccggccatcgcgctggcaacgcttgttcttttttttacacggatatga

SEQ ID NO: 385667 - DNA, 1413 bp, Salmonella enterica
atgagaatgaatcatatgtcactcaaccggaaatggattttattttcactggtcctgctgtcaccggcgattctggcggcagaaaacctgaattttaactacacccgggcaaatgcgctcagccttgaaccacaactggggctacaggcaaaggcctgccactcgaaagcagacccaatggatatccatgtccggtttgataaaaatgtgaatatgggaagaatttcagggatccagcttgaaattaacggaagtgcatatgttaaaagttatacaatattttctccttcagtaaaaagcagggcaagtttagatcctgattttctggttccatggggagctcatgcaaagggctctgtaaacgtcaacgaaactaataatgtttatattccggaagttcctgagaaaaatgatggacctttttgtttttctaacgatggaccgcgtttttggtcagttttgtatcctccgcgatatagtgttggaggactgttacctatcttcagggacccaccatattatttcgaccccttagggcaattgacaaaaaaagactttgatgagaagtgtcagcgctttcttaataatacacccgattcttttaaaaacgatatcatgttttactggccgtacggctcagatttttgggagcatctgctgatcaaacctgaagagatagcccgaagaaccggctcctcctatatctacgatcaaattaaagcagtcggtaagaatgctttgatagtgaaaaaatctggtcacatattttttacatatcatacagacgctcagccagcaagaacagaacagcattccacgccgcaaaaatatgacatagatagtaattgtacggcagatagctgcagcttttattttccgacaggaaacggtaaagacgggaacatcatacagaatggcagtgaatttttaataaagcttaacaacagaaatatcaagtcaatgaaactgacagtaacaaatggcctgtctgtggatgactgggtatggcgtctggaaaatgacagttacagtaataatttaaatgggactcatcattttggggggccttccgttctgagagaaccagttctgagaactgatgacccctataatattgccgggttttatatgaagaaaaacccgggtttttactcaggtacgctgattgcccgttcagcgctgaacacgacgtacacggattttgttaataaggtcacacctttatcattacccgcaagtgcggctggaaatattaatctggttaacaccgacagcctcatatttacctttggagcggggagcaataatgcaccgacactcagtatatttggtcagcctttgaaattcgcaccattaagtgtcaatggtaaagaagtcgccagtgcgatggatgtaagaaatgcctgttactga

SEQ ID NO: 385668 - DNA, 681 bp, Salmonella enterica
atgctgtgtcttgccctggtggtgattggcgggtatgcggtcaaggtgttcccggcttttgagaaagttattccgaccagccgctggccgggggtgacgcaggtgttatacagcttcggtactgaactgtaccacgggctgtggatacacatcatcgtggtattcgtggtggttgtcatcctggtccggctggtgatgtacaacatcacaggaagcttacgtaacaatattctggaccggatactgccgttttcggcctacaggaagatgtcggcttcgctctttctcaacagcctctcggccatgctgcgtaacaacattccgctcaatgagtcactggacgtcatccggctcaactctaaccgctggatgagaaaccacctgaccgtcatgcagaacaacatggcgctgggccagccttacgggaaggcgatgaataccggcctgctgggggcgagtgaactgctgaatatcagcctgtacgccagtctgccgtcattttttgacgtactgcaggcggtttctgacagggcaaggaaagatatcgaggagaacattgagcggctggcgggcattctgcgctcgctggccactctggtgctcggcgggtgcgtggtctgggtgtttggtgccctgtatgccctgtccgatgcgatttcccagatgagttcctttcattaa

SEQ ID NO: 385669 - DNA, 681 bp, Salmonella enterica
atgctgtgtcttgccctggtggtgattggcgggtatgcggtgaaagtgttcccggcttttgagaaagtcattccgaccagccgctggccgggggtgacgcaggtgttatacagcttcggtactgaactgtaccacgggctgtggatacacatcatcgtggcattcgtggttatcgtcgtcgttatccggctgacgatgaataacgtcacgggagggcttcgtaataacgttctggaccgtgtattgcccttctccacatataaacggatgtcggcttcgctgtttctgagcagcctctccgcgatgttgcgcaaccatatcccgctcaatgagtcgctggatgtcatccggcttaacgccagtcgctggatgaagaatcatctggctatcatgcaaaataacatggcgctgggtcagccttacgggaaggcgatgaataccgggctgctgggagcttccgagctactgaacatcagcctgtacgccagtcttccttcgttctacgacgtgttgctggctgtttctgaaagagcaaagaaagatatcgcagagaacattgagcgactggcgggcattctgcgctcgctggccactctggtgctgggcggatgcgtggtctgggtgtttatttcgctttacgcactgtcagacgcgatatcacagatgagttccttttattag

SEQ ID NO: 385670 - DNA, 1413 bp, Salmonella enterica
atgaattattttattctgaccagaaaatgtatctttttctcactggttctgatgtcaccggaaattctggccgccgataatagcctgcttctgaactattcaggtagttcagatctgttctctcgggagcctcggcttggactgctggccaaagcctgtcattcaaagggcgacccgatggatatccgggtccggtttggtgaactgtcggtaccagcagagggagttatactgactatcgaagggggagattacaggaagagttatagcgttttttcagccagtgaagtggtgaataaaaaaaacaccagtaaaaaaaatgattttttggttccctggagagtttctgttaacggcaaagttagtggtttcggttacgctaataaaactattcccggacgtgctgctaagtatgagcatgcgttttgttttgctgatggttacactggaaatagtgctccgggttttaataagtattggtcgcccaatactttcggatattttcctttattcgaagactatattccccaggaattaatcgaaaccagcacttctgatgcgctggagtacaatagaaatgaatttaaaagattatgcggaggcagagaagccacgaaggattttcaacatgtatggtcaaaaagtttgccatacaataacccacctgttccagataatataacgccctggaataaagagtttgcgacaaaaggtctgttttatcttgattacacaccagccgaaagtgacaagaccgaaaatgtccaggttgaactgaatcagccgcaggcagttgattcattgccgatgaatgccgcaggagtaagttcctatcattttcctttaaattcatcccttgctcatgcatatctttataatggtgactttatgctaagactcaataaccggaatatttcaaagcttacgctgagagttggaaatacagtctggtcatgggagtcaagtaataaaaatgcgtccgataataatctttatttatataaaaaagatgactatcctattgaccctggattgccaggtaagacaaaagatcccaataatgatccgttcagggtatctgatgatgcaatgcctgagtccttttacgagaaaggttatctaaccgggagttatttcagaggcactctggtgaaagaggcatctctgagccaggtgtacacgagttatataaataacaatacgccgttatcgttaccacctgttgctgatggaacaattaatctcgtcaatacggaaaacctgacgttcacaatcgcacaagttcaggatggtggtgccagaaatggattgttttctcttcgggtttctggccagccgctgaaattcgcgcctttgtatgtaaataatacagaagctgccagcgctatgacgatgagaaattcttgttactga

SEQ ID NO: 385671 - DNA, 876 bp, Salmonella enterica
atgatggaacagatatattatttctcctttttttttctctgcctgctcacagggatgtgtgcgggcagctttatgaacgtggtgatttatcgtctgccccttatgatattcggggcagacgacggcggtgagcgtttctctcttgcctggccaccgtcacactgcccggtctgtcatcaccggatacggttttatgacaatatcccggtgatgagctggcttgtgctgcggggaaaatgccggcgctgccggacccgtatttctgcggtctatcccctgacggaagccatcaccgggttatggtttgctgtggtgtacctgtgtctggccggtccggtgaacaccctgctgaccatttcaggcgcggcagcgttgcttcctcccctggtgctgttctgtctgctgtactgtattaccgtgactgatgtccgtcattaccttatcccggatgtcctgtctctcggcctgttgtggtccgggctggtgttatcggtctgtggacttatccgtgtgtcgccttttcaggccgtgacgggatgtgtactggcatactgtctcatcagcgcggttcagcacggataccgtgtgattcgcgggcatgaggggctgggcggcggcgatgccaaactgtttgctgccgcgtcagtctgggtcggcctgagtcaggtgccgtggctgattctgttttcagctgtctgcggtggcgtgctgttcggaataaaaaagttttatcagcggaaaatacttgttcaggcaccggctgtgttaccgggagaagataatgatgacagtgaggttctctgcgacggattttatattccgtttggtccggccatcgcgctggcaacgcttgttcttttttttacacggatatga

SEQ ID NO: 385672 - DNA, 174 bp, Salmonella enterica
atgatgaataacgacaccagacagaaactgattcgttttctggttccgggccgtctgggaaccggttttttactcggtgccgtatttatgctgtggctggctgtggaaagaaaaacagaatttgatgagtttattttattcattattgactttcttggtctgactcatgcctga

SEQ ID NO: 385673 - DNA, 486 bp, Salmonella enterica
atgcatacagttaaaaaatatagcgggttacggctcattatggccggactttgtttgtttgttatcagccataccgtactggctgcagactgctttgaaaccgccggggaagatgcgggaatagatccggatttattacgggccatcgcctggcaggaatcgcggctgcattatgacgccattggtaaaaatccggtatccggttatggcatgggactgatgcagattgattcccagcatctgggaaatatgaagaaaagggggattgaccgggaattactggtctcggatatctgcaccaatatatacagcggcgcgctgattctggcgaaggcctttaataagtgggggcccacctgggaggctgtcggcgcctacaatgctggttttgctgcgacaccaaagcagcatttcagacgaatggtttatgccagaaaagtatacaccgtgtaccggaaactcaaacacggcgaaaacggtcgttaa

SEQ ID NO: 385674 - DNA, 978 bp, Salmonella enterica
atgagaaaatatttatcaggaattattttattcagcagtggtattttgttgtccggagcagcacaggccggttctccggtggatgataatgacggatttctggatgcccacgagaaggcggcgctggcggagtggttcacactggaaaaggtatccgctggtttatctgttggagcgctgagtggcagtgcgaaggagcgggtgtatgacaacgggcgcagactcagccagctggactggaaatttaaaaatgcgcccattctgaaagggaacattgactgggatttatctccgtgggtgagacttggggcctctggatgggtgacagttgccagtcacggggcaaatgatatggttgaccgggactggttaatccccggtcaggagaaatattcacacatttctgagtcgccgacaaaactgcgctcagccagcttctgggacgtgaatactacggtctggggcgtgaataatgataactggcgtctggggcttatgggcggctggcaacagacggattataaatgggatgcgcatggcggttattacagctacgggaacggtcttgttgaagacaaactcccggacgggaaagggatactctacaaactgcagtttaaaatgccctatgctggcctgacgggtggctggcgtttccgtaatattgagatgaacaccgcgtttaaatacagccactgggtgagggcatctgacaccgatgagcattttttacggaatatcactttccgtgacagaaaccgtgtatcggacttttattctgtgtcagcggatatcggatattacatcacgccacaggcgaaagtgtttattgagggggaatggatgcgggtaaacaatggtaaaggaagtacaacagctgagtttcataacaatgattcagtgggatattatcccgactcatcagggattgagaatacagcgtataacgtgacggcgggacttaaatattatttttga

SEQ ID NO: 385675 - DNA, 1008 bp, Salmonella enterica
gtggcagaagctcttggtaataaactcagtgaaagcatttctgcgcttcagaaaaccctggacacgaaacttgcagaccttgacggactgcagcagaccatgacaaccctgcagatgcagtttgaccaggctgtacgcaccggagccatcgggcaggtcgacctgaagcgtctggaaacagccatgaatggcctcagtgacaggctgaataccgctgctgaactgaaagacgccttcggtgcgctcaaaacggatacagggtcactggaagaaagactgaagaagtctgacgttctcagtgcagagattcaggggctgacgttgccggccgggggggatataagtgcagtggccgcagagcttggtgcagcgaaagcactacagtcagccacagtttccctgcaggccagcctggcagccagaacggaagaaaatggaaaagtccggttgcgtcttgacagcctgaaacaacgactgaaagaggcgcaggaaaaagggactgccggaggtgctgtactggcggaaatgcagacgcaactggaaggtctggagcggcagcagcgttcatacggtgaaagtctggtgcattttcggcagagtcttgcgacggtcagtcaggacggcagcagaccggtaaccagcagacaggagagtgtggacaggcttcagactgcgttgtccggggtatccgggatttcagatatgcaggtcagtacgctgggtgaacagttacagcaggcgatgaccggctatgcacaggtggttgtcaccgctcagggacagggtggtgtgaacgcacagacttcattgcaaaaccgggaccagcaggatggtttccgcgcaggaggtgagccgctgataccgatacgtggttatcagacgcagccacagaacgtggatattcatctgtgtgacagtgacagatgtcggttaataacgctggatgtgggtaaaccgtctcaggtagcgatggctgaggtgactgagtcacggccggatggaaaatga

SEQ ID NO: 385676 - DNA, 153 bp, Salmonella enterica
atggactataaccagcctgattcggacaatcagactcagcagttaaaagtgtggagaatgcagccggaggagtgcaagtatattttgtattttttcacattcatccgtttgcaggcgggattcagcgcccagcagaacagccggttaacgtga

SEQ ID NO: 385677 - DNA, 276 bp, Salmonella enterica
atgagcagaaacattgttcacgggttgccggaagtggtttattccctgatatgtgaaaatccgggattgtttaaatatgaccttaagcgcatggcacaggaacgcctgaatatcagagttactgaatctgatttaagtgatgttatctcctgtctgaaactgtatcgcggtatttttgtaatgcgcgggtacgggtattttaaagatgaagaagcatttaataattacagtcccgggataattccggggaaagaaatgagaaggaaatggcggtaa

SEQ ID NO: 385678 - DNA, 615 bp, Salmonella enterica
atgaaagacagaagtgaaatactggagtctttttcatggagtgcgctggttgcaataaaaatggcctggcatgacggaaagataatgtcggagatgtcagagcacgtatttattatgaactggctggttaaagccagaaaaaggaaaattttcccccgcacagtatcatcagagattgactggctgattaatgatggcaggctaaagggacaccatgcaggactgaagataaaactggaatatttatacgcaacctgccagaaaaatgtcagcgggcaggcagcttattttcgttttacccgggtaatggaaatactgaaaaatgaaggctggaaaggatatatgttgacgccggcaaaatggaaagcgctgaggagggaaagtacagggggcagggagaatttaatttttatggatgaggaagagattaaaatcagttttaacaataatggcgggctgattcgtgcactggagctgcgtgtcagcggagatataaaaatggcggagacggtatttgaaaataatcatctgccggtcagaaaggaatgtccggacggtgagcgttattacttttacctgcagccggaacgggagagcggagtggagccacgataa

SEQ ID NO: 385679 - DNA, 186 bp, Salmonella enterica
gtgcagggtgtggatgaaccggcggataccctcctgatcggttatcagccgcagcgtgctgccgcagctttcgcactggaaaagctccccgtcacgaagccccggggtccggatattcacccgttctccgtcagcattaacagcatggctgatggtggtcagataatacatagtcagaattcctga

SEQ ID NO: 385680 - DNA, 231 bp, Salmonella enterica
atgaataattccagccacctggcttcgctactgtcaacagacgatccgctcatcgacatggcctttatcaccacctgtacaggaatgacggacaagtggttctacaagctgattggcgatggtttgtttccaaaacccatcaagctcgggcgcagcagccgctggcgcagaagcgaggtggaaagctggatgcgtgaacgcattgtggattcacgcggcggggctgactga

SEQ ID NO: 385681 - DNA, 630 bp, Salmonella enterica
atgtcagagtcttattcgtatcgtcaggattatattgaacgtattcagcagacactcaatgtcgccgtcagtcatcattcccgtctggcgtgtttctttatcactctacgtttccctcagcagggggcatgccgtgatgacagtgaagtgatatcccgtttctttgacgcgctgaaatatcagatcaaccgctacatcgatataaaacgtcttgacggaaaacgtgttcacgccaccacattacatggcgcctgggcaagagagtttggtttgaagaatggcaataaacactatcatgtagcactgatgctcaataaagacaccttccatacgttgggccattacagcttttcatcatcaggggcgggctcgctggcgaatttaattcagaaggcgtggtgcagtgcgatggggttaccggttgatttacacgcctgtctggccagtttttcaccggatttgccctgcatgtggattgagcacaacgatccgtatcagcgtacagccgtggaacaaagaatgttttatctggcgaagaattattccaaacgttgtggtgatggcgagcgctcattcgggtgtacacagaataacccctcgctgctcaatggtcgtaaaacacgaacataa

SEQ ID NO: 385682 - DNA, 801 bp, Salmonella enterica
atgcagggaaaaacagaaaccagtagattgctacgtaatgccttaaataatttacggaaatcgaatgaatcacactctgaagaaaaccctccctccggttttattccggcagaaaaaagtcgccttctgggctggatcgactccgaacgaatcacgttctggtgctggttatttatcaggcgtgcttcatgcagctttttaggtaagcagatagctgacctggtggatgaggatatcccctatatacactttgaggtcaacagtaatccgttaaaccatgacgaacgactggttgcggtgaaaaaatactttgaagagatggagaaaaaagctggtcatgctacagcttatgagattatgcgtgaaatgcaggctgagtggttagtcattgctgataaaacaaaagatatgtcgtggcttccacgaaaagaagctgtcgtctgctgggcatgggactacgtaagaaaattaccctatttcagaaaaaaaagtatgtcatcctggtttcagccagtcaatgtagctgaaaaaagaatggcggttattgccgtttttgacgagtcgttcccggatgagtatatgtacaggcatgattttattaaatacagaaaccatttaatagctaatatgaaagccgcatatgataaaaaaatgggcaataaaaatgacaaactgagaacacagattagcgtaaaaataagctggcatgcaaaacaacgactcgataagcttatgcgggacagaggtgccacacaacaatctattatcgagtatttgctgctacacggaaatctcgactaa

SEQ ID NO: 385683 - DNA, 903 bp, Salmonella enterica
atgacctttatgggcgacagacagctgactccaagacgacaatttctgaacaactcccgggctgaacagcattctgatgcgctaaggtcaggtaaggcgtggcttgcaacccagcgaatgctgaaacgaacgggaagaattttggtatcggataagtctggtccgaaagcaccgggatccgtctttaatttttatgacatccgggatttataccttttgcaacttgccgccagctggataaaaaacgcggcaggtttttcctcatgggtggaaatttctccggtgcagagacgcagccctcatcaattttccctgggcgctcaatatatgattatccctcgctctatacgaaggaaagtcgatgccttcagacagataaatacaacaaaaaaaataccagtgcaggaatttaaagggagcctgtattttgcattatgccagatatcaggttcaaaagaagcagcaaatgaaagactccttacgttgccggtaacgcagaaagaaatcaggaaaataaccgaacctgatattaaggtctatggttatatcggaaaaacgattgctccggtatttatgctttttatgctggaatgtcagaggctcggatatagcatggagtacagggatttgcggcgtctcagatactttatcaaagaccataacgaattaaatatgcttggttatagcttatatttcgcttttctttaccaggatgatggagactattttactcgtttttttattgagtataataacgtcttaaaagacgcagtaaaaaaaagagagttgattcagttattcatactggatattcatactcgttatctttacacagctaataaacgtaattatctcaagcgaaaaaaaagagatggtcagagtgactctttcatccacgtttag

SEQ ID NO: 385684 - DNA, 306 bp, Salmonella enterica
atgaaactgggtatatcacctctggcagaacacgatcttgaggctattggtgactggatagcgcaggataatccagtacgcgcagtcagtttcactgaggaattatatcagcagtgtctgctgatagctgaatcaccagacatttacagagaaagaccagagcttggggaagggatcaggagctgcacctatggccgctaccttgtgctgtacagagtgctggaaacagaagtgcgtatcgaaagggttgtccatggctccagagatattataaggatgtttgcagcaccagacgaaggcatttag

SEQ ID NO: 385685 - DNA, 255 bp, Salmonella enterica
atgccaaccagcgtagccctcagcccatacttcgaagattttatccgggaacagatagaaagcgggcgttataacaataccagtgaagtcatccgtgcggggcttcgcgcactggaagaacgggaacaacaggttaagcttgagtctctcaggaatgcggttatcgcgggaatgaacagtggggacagtaaaaatgctgaagagatatttggtcgtctgacgcaaaaatacaaaaaaatggcagagagtgagtaa

SEQ ID NO: 385686 - DNA, 657 bp, Salmonella enterica
atgaagcaggacttccgctgtggctgctggcttccggagaaaccagaaacagcaatgaaagccatcacccgtaatctcgatcgcggtatatggcgtgatttgatggagaggtccggaatgctgtcactcatggatgcccgggcctgtgaacagtggtacagcagcctggaaaaggacgatattcccgctgtcagtgaagccaatattctcagcacctttgagcaactgcaccagagtaaagatgaggtatttgagcgcggggtgatcaatgtgttcaaaagcctgagctgggactttaagaccaacaatccatgtaagtttggttcaaaaattatcgtgaatggtctggttaaatgcgaccggtggggatacagccttaactggagctggcagcgtgaccggcttgctgacctggagcgcatgctgatgctgctggacgggaagcccgttcctgataatcgtgcagatgtgacccgacgcctggacgatcacattcacgagaacagaggaagtaacagttacgaagacgggatgtttaaaatcaaatactttaagaagggaacatcacatatcacattcaaacgacctgaactggtggacaggctgaatgacatcatcgccaggcactacccgaggatgctggcaacaagagattga

SEQ ID NO: 385687 - DNA, 192 bp, Salmonella enterica
atgaagataaagtttattgaaattacacggcaggcagctgatttggaacgtcagagattgtttcaacaagccggacatttatggaaaaaagcgtttgttgtagccagacgtgatgcgaatgctgagtattgtcgccgtcgggcagatttttgtctgagcagcatgtttacgagaggttcacaggtatgttga

SEQ ID NO: 385688 - DNA, 597 bp, Salmonella enterica
atgcgtaataaaatactactcgccatggcggctgccggtatgatgtgcagcgcctccgctttcgcgctcgacacagcaccggcggcgacactaacaaccggtccgttcggctcaggtaaagtcaccttcaccgggagcatcaccaattcaccctgcgatattgcaccgggagatgacgacctcaccgtaaaatttgggcagatttcctatcgccatcttaaactcgcccacgctatagatactgcagatgccaaatccttcactattcatctgcagaactgtgcatttgatattgatacttcgcagacctccccaaaaaataagatgtccatagtgaacgtaacctttgacggtggtacgacaagctctgataacaaaacgtttaccaactcaggcaacgcgacaggggttggccttcagttgctggattcgactcatacagctatcacctccggtaccgccaccaaagataatcaactgcagtcaggtgataaccagcttaccttcttcgcacaactggtcaatctgggcgacgcaaacaccgtcagcccggggagtatcaatgtcccggtcaattataccctgacatacaaatga

SEQ ID NO: 385689 - DNA, 2490 bp, Salmonella enterica
atgaaactgacccggcttgccatactgataaccctgatactcccgtccctgaaatccggggccacggaatttaatgccggtctgctggacggcggggagacatccggtgtcgacctgtcggcattcagtcaggaggggtacgttgcccccggaagctacctgatggatatccgcctcaacgaccagtcggtgcgtgagcagtatcctgtccgggtggtgccggttgagggcagggagagtcctgtcatctgcgtgacgcccggtatggtggacatgctcggtctgaaggatgatattgtgcgcgggctgaaagtggttcccggagcggatgccggccactgtctggagctgaacaccccggacagtaaagtgaaatacagcgccggagaacagcgtctgaccttcattatcccccaggcgtggatggcgtaccaggacccggactgggtgcccccggcccgctggagtgagggcgtcacggccgccctgctggactataacctgatggcgaaccggtacatgccgcatcagggcgagacctccaccagttacagtctgtacggcactgccgggtttaatctgggtgcctggcgcctgcgcagcgattatcagtacaaccgctatgacagcggaaacggcagcgtgtcgtctgatttttatctgccgcagacctatctgttccgcccgctaccgtcgctgcgttcaaagctgactctggggcagacgtatctcagctccgccatttttgactctttccgcttcgccggtatcaccctggccagcgatgagcgcatgctgccgtcctccctgcagggttacgccccgcaaatcagcggcattgcgaacagtaatgcacaggtcaccgtcagccagaacggccgcatgctgtaccagacccgggtatcacccggaccattcattctgccggacctgagccagaacatcagcggcaatcttaacgtgacggtgcgcgaaagcgacggcagcgtccggacctggcaggtcaacaccgccagcgtgccctttatggcccgtcagggacaggttcgctataaagtggccgccggacgtccgctgtacggcgggacgcataacaacagcacggtcagtcccgactttctgcttggagaggccacctggggagcatttaataacacctcgctgtacggcggcgtcattgcctccaccggcgattaccagtccgtcgcgctgggtgcggcgcagaacatgggactcctcggcgcagtatcggcggatgtcacccgctcagatgcgcaactgccgcacgggcagaagcagtccggttacagctaccgcatcaactatgccaaaacgtttgataaaaccggcagcaccctggcgttcgtcggataccgcttctcggaccgccatttcctttccatgccggagtacctgcagcgccgggctaccagtggcggcgatgcgtggcatgaaaaacagagctacaccgtcacatacagccagtcgattcccgtactgaatatgagcgcctccctgtcagccagccggctgaactactgggatgccacctcaaataataactatatgctcagcctgaataaatatttcagcctcggcagtatacagggtgtttccgcctcactttccctgtcccgtaaccagtattccggcggaggagcacagaaccaggtatacgcctctttcagtatcccgtggggcgacagccgtcaggtgggttacagccttcagaaggataaccagggcaatatgcagcagaccgtgaactacagcgatttccacaacgctgacacgacctggaatatcagcgccggccacaaccagtatgacagcggcagcagtaacagcttcagcgggagtatccagagccgtctgccgtggggccaggctgcagcgtccgccaccctgcagcccggacagtaccgcagcctgggcctgagctggtacggttcgctgaccgccaccgcccacggcgccgccttcagccagtcgatggccgggaatgagccgcggatgatgattgataccggcgatattgccggggtaccggtgaacggcaacagtggcgtgaccaaccgcttcggggtggctgtcgtgagcgcgggcggcagttaccagcgcagcgatatttccgtcgatgtggccagtctgccggaagatgtggatgtcagaaattctgttatcagccaggtactgacggagggtgcggtgggttaccggaagacagacgccagccagggcgggcaggtgctcggtcatatccggctggctgacggcaaaagcccgccgtttggcgcacaggtgatatccgggaaaaacagcagagtcgcagggatggtcggggatgacggactggcttacctcaccggcatcagtaaggaggagcgccaggctctggaggtgtcctggcacggacgggtgcagtgcaggctgacgctgccggagaacacagacctcagtcaggggccgctgctgctgccctgcagataa

SEQ ID NO: 385690 - DNA, 747 bp, Salmonella enterica
atgctgaagagcagactattaagccgcgccgttgtgctctcactgaccgtggcgtggagttacggcagcctggcggccatcaacgtcgaccggacgcgaatcatcatgaacggcagcgagaaaaccatcgccatcacactgagcaatgacaatacgcacaagcctttcctggcgcagtcctgggtgacggatgcggacggggtaaaaacgaatgccctgatggccctgccgccgttacagcgtattgacggcggacagaagggccaggtacgcatcacgcaggtcggggcgctgaccgcgcgccttccgcaggacagggaaaccctgttctggtttaacgtgcggggtattccaccgaaaactgacgaggataacatcctgcaactggccatgcagagccggctgaaactgttttaccgtccggacgctgttgtcaggggcttcagtgaccagccggaaaaaaagctgacggctgaacgggaagcgggtcgcctgacattaaaaaatccgaccccgtattacatcaccgtggtctggctggggactgaccgccgtcatcccctgagcggattcggtcagggggggatggtgccgccgttctccagcctgcctttaaaggccgttctgccggctgaaacacggcaactgtgggtggggtatgtcgatgattatggcgggctgcagatgaaccgctatacctgtaatgccctgaactgcgcgcttaaggacggggagactgcatcatga

SEQ ID NO: 385691 - DNA, 168 bp, Salmonella enterica
atgagccatcaggaacgtaacggtgttcgtgcggcgtatatccataaagcggagtttctggacgaacgcaggctgatgctgcagtggtgggctgattttctggatgcaaatgcagagaaatccgtgagcccgtttgactttgcaaaagtcaataacccgttgaaatga

SEQ ID NO: 385692 - DNA, 186 bp, Salmonella enterica
atgagtaccattttacatgagcagggctttaattcagcgtggatcgaactgcaacttgctcatgtggacaagaacagcattcgcggtacctataatcatgcgcagtatcttgatgggcgtagggagatgatgcagtggtatgcggattatattgacagtcttgctgattcgtctccggcggtttaa

SEQ ID NO: 385693 - DNA, 210 bp, Salmonella enterica
atgttcatgccgcttacattcataaagcgaagactggacaagcataggttgatgctgtgttccctgctcgaagggaatatgaacgtcgatatcagctcgttcacatttaattgcttattccccataccaggctcgagtgccaaacccacatcgattcatacgtcaactggcaacagacaaaaattaatctgggaacaagaattaatctga

SEQ ID NO: 385694 - DNA, 240 bp, Salmonella enterica
gtgtgcttcgactgccagcccgggcgtggtcaccagtatcctgaaaactggcttcagggctggagcgggaagctggtcgtcgacgggcataaagcctaccggacgctggtaaacaaagtaccggagatcacgctgtccggattccgagtagatgaggacgttaccgccctcatccctcacagacccggacgagcgcaattaacgcatccggttcttcactatgattgtttcactgcctga

SEQ ID NO: 385695 - DNA, 1335 bp, Salmonella enterica
atgacggatacactgagctccgggaacgtgtcaacgaaacaacaacagatagccacactggcaagaaatttccctgaaagggttttctcgtcgctccaccattatctggattatgactggcttcttcgggcctgggaactgacgcggaaaaatgcggcagcaggtgtggatgggcagacagcagataaatacgcagaacatctggaacaaaatctgcaatcgttacttagcagaatcaaatcgggtaattacagggcgccagccatcaggcggatatatatccccaaaagtgatggtcagcgacgcccactgggtctgcctacatttgaggataaaatagtacagcgtgcagtggtcatggtgatggaacccatttacgagcagatttttagctcgtgttcatttggatttcggccggggcgctcagcccatcaggccctgcaatatctgcgaaaccacataatggatgaaggaggccgctggatactggatatcgacatcagaaaatattttgatacgataaaccatcagtatctaagggaatttcttgacaggcgagtgactgatggcgtcattcgaaaactgatcgataaatggctgaaagcaggcgtcatggataatggcgttctgacctttccagtagcaggaactcaacagggaggagtgatatccccactgttatccaacatatacctgcattatgtgctggatgaatggtttcaccagcaagtctgccccagaatggcaggaaggtgcagcctgacgcgttttgctgacgatgcggtcatggtatttgaacaatatcaggactgttatcgggtacaacgagtattgggttgcagacttcagcgttacgggctggaattgcatccggtgaaaacctgtaggattgattttcggtttaagtacaggaaacaaaaccgacgacgcggcaatgcagtgtcattcaactttctgggatttacgcactactggcgtaggtcaaggctgggtaatccggttgtttgtcagcaaacagctaaagacaggctggcgaaaactttaaaaagttttaatcagttctgtcgatggaaccgacactctcccctgtcagagcagtataaaaaactgaaccagaaattgagaggccattatgcctattttggtataacaggcaatgaaaaggcgctgcgggcggtccagtaccatgtggagcgaatatggcataaatggctgggcagacgatcccggaaaagcaaaattccgtgggtcaaattcaccctattcctgaaacgatttccactggaaaaggccagaatttatcaccagtactatcggggagctatcaggcagtga

SEQ ID NO: 385696 - DNA, 186 bp, Salmonella enterica
gtgcagggtgtggatgaaccggcggatgccttcctgatcggttatcagttgcagcgtactgccgcagtattcgcacaggaaaagatcgccgtcacgaagccccggggtccggatattcacccgtttgccgtcagcattaacggcatggctgatggtggtcagataatacatagtcagaactcctga

SEQ ID NO: 385697 - DNA, 240 bp, Salmonella enterica
atgaataccaccccccataccgtatccaccaccacactactgaacgcagacgatccgcttatcgacatggcctttatcaccacctgtaccggcatgaccgacaagtggttctacaaactgattggcgacggtttgtttccaaaacctatcaagctcgggcgcagcagccgctggcgtaaaagcgaggtggaaagctggatgcgtgagcgcattgtggattcacgcggcgtagctgactga

SEQ ID NO: 385698 - DNA, 636 bp, Salmonella enterica
atgtttgactcattactgcttgatcaccgacatggctcattaaattcccgttatctggaaaaaatagagagggttcttcagtacgctctcaatgaacatccccggacattagccgtgcgcgttgatttacgcttatccccacagtggtatcagaacgattctgcaacgtgtaacccgaatctgtcccctgacttattaacgcgcttcgtctgttcagtaaaatcccgaattaaacattaccgaaaaaaacgtgaaagggagggggagagagtacatccctgcacaccacgttatttctgggtgaaggagatcgacactgctgattttccacacttccacggagtgatgttctttaacaaagatctctttcgggggctgggtgattttaattcagaagaaaacaatctcgggaacataattcagcaggcgtggctgagtgccctggatttgcgtggatgcgatgaatataagtcgctggtacatttcccgtcaaacggcgtttatacccttgatcgcaatgatcctggttttacccgaacctggaataaccttatgtttcgcctcagctatctcgccaaggatgagaccaaagcgtacagcccgaaggcccgttcaatgggagggagtcagaagtag

SEQ ID NO: 385699 - DNA, 876 bp, Salmonella enterica
atgtcatcatttggacactcagtatctgaatatttagattcaccaatgagagccttactaaaacgaaggactgaacgtgctcgtttaatggagaaaaacagggaaaaaaaagagtcctttcagcccgactcggacgtgaacttgctggaatgggtatatggagatcgggttgttttctttgtgtgggcatatattcgcacctcaaattgtgaacatttatcaatcacattacctggcataagttcagacagtattccttatgaaaaactaaagcttaaagaaaatcctgtctcaacccgggaaagattatcctcaataaaaatctggttcagggaagttgaaaaacgtacaagtccaggcgatgcatataaggtaatgattgctattcgggatgagtggctctatgcttttaattatataaaacaggctgactggctggaaaaaaatgaaatttccactcgctggctatgggaacgtatgataaaaaatccactatttaacacgagtttacttagatggtttcttcctgcaaatgctcgtgaacgttttctggctattaatacagcattggatatttttcttcctgagcaatggcaggatgcggattgcattactaaatatagaaatgagtttatcgcacgttctttccgggcatacaggactcacccattgtcggtaaaagacgagtcccaatgtcagttgaacgttaaaatatcgaaaagaacaaaagaaattctttatgctctttgtacagacagaggggcgactcaggcctcttttatagaatggcttattcttgactattggcaagaggggcagcattcaggccatgaaaaagaaaaaagagagcatgatgaacaggttgaccattcatag

SEQ ID NO: 385700 - DNA, 906 bp, Salmonella enterica
atgagttatctaaaccagcgacatcagtttttcaaagagagaatgctgccacttgaagtcaggaaagttaagggcagtaggccatggctgaatgttcagcagatgctgaaacggagtggtagagattgtgcccaggggttattttcaaataatgaaataaacggaaaggacacctttaactttgatgatgtcagccatctatatcatctttattcagcagtaaaccgaattaaatcctcatcaggaaatcatgtaaagcttgaaatttgcgagcttaaaagaagtctgcatggctggccctataattttatcattgttccgacatctatcaggcgaaaagcagatggttttatgcaagatcgtggagattcaaataaaaaaaacaaaagcgggaagtcgtggtgttccggaagtctctacaaggagcttcgctacgccagcaactctgagcaggaacttaacgattcgatagcaaggttaagtctggctgacagagtaccgccaatggctggtgttattcatcctggagtgagtaatatatcgtctaaaaaccattctcttacattcacacttttatggcttgaatgcagaagaatggggctcagagctgagtcagacaggttaatcagcttgcaacattctgttaatgatatacagcttttggaacaattggggaacgctctgtttttttcacttctttattttgacccattcgaggatttattttcagcatttttctatgatgaagataacttccccctccgggtacatggggaaaccaactatattcaaaatcatattgagagaaaaaacgaaaaaataaactcctttattgaattaataaatcagcgttttctttttaatgcaaatagaagacacaaaataaaaaaccagaacgttaaataa

SEQ ID NO: 385701 - DNA, 747 bp, Salmonella enterica
atggcgaaagaagaatcccgcccgcagcagaacaccgctccgccgaaaaaaccgggcctgctccggctgctgctctggcgtctgccgtggcatattatcggtattctgctggcgtcgctcctgctgagtctgatggtggaatatgcgggactggtgttctggtggccagagcagggagcgcagcacgcacgggccatgatggagacggaactgcgctttctctcgtcggactttacccgaagcctggtgatgtcacagccgtcagtgacggtgatgtcgtgggtacgcgacgggtaccggtggttcacggggagcgccgggctgtccggtaccctgagcgccggtaacggccacggtaatctgttcacgcggacggtggcgaccagtggggcgtggctggccgtgcagttcagggtattcctggaggcaacgctgtatatcacggtggtgtttgtggtgcgggtgagcattctgctgctgtcagtaccgctgttcgtgatggcggcggccgtggcgatggtggaagggctgagcctgcgtgacctcaggcggtacggggcagggtatgagtcgagttttctgtaccatcatgcacggggcctgataaagccgtcgctggtgtatccggtgatggcgtatctgtcgtggccggtggcggcgtacccgaatgcgtttctgctgccatcggcgctgttgtttggtgtggtactgacggtacaggcctccacgttcaaaaaatacctttag

SEQ ID NO: 385702 - DNA, 726 bp, Salmonella enterica
gtgatttcaggggacaacgacgcgctttttgccatggtttacagaatgctgcagtcgaagcaggtgcatgtgctgtataccgcagaaaaggccgaaaaactgtataccagaatatctgctgtggcggatgagaatgagacggtgaccgacgaaattaccgggctggtcaaccggatgtattccctgcgtggcaggctgaaaaataagctgggtgccctgacaccccgggagaggcgatacgggaaccaggttatcgccctgctgaatgggctgattgaagaaaatgaaaaaatacagggaaagatgaccgtgtctgcgaatgcgatgcgctgtacggcgcacagtctgcaggtgacggtcctgaaggccatacactaccagtggcgggagagagtctatatgtctgtcctggaagggaaggacacctttcctccggaggatgagcatcactgcgttctggggcgatggtatcacggtgagggccggaaaacctttggttccctgccggcatttgtccggctcggggatgcgcacagcaggcttcatctggcgctgtctgaactggtgcatgaatccctgcgggcaaagcgcacgccggagtcggtactgaaaaaactggatgtgctggaaacggtcagccaggcagtcattgtcgcactggatgagctggatgacagtatcatcaggtccggtattgaggatgagacctcactttctgaagaataa

SEQ ID NO: 385703 - DNA, 315 bp, Salmonella enterica
atgtcccgtcgttattctctcattccggccattgtgctggcgctggccgtgtcgtcagcctccgcatccgaaaaggatgagctggccctggtgatgcgccagcttgaccagcttcaggcctcccttgaccgcgcacagtccctcagcgtccaggatgcaggggatggtcgtttttattttgattatgcccgcgccaccggagacctccgggcgatgaagcagggcatttcacagtaccttgacccgtcccgcgcccagccccggctgccggaaggcgacgcggtcagcggacagtaccgccgggagcgcccgtga

SEQ ID NO: 385704 - DNA, 237 bp, Salmonella enterica
gtgaacagtgtgcagcgtacggcttttattgccggctccggcggactggaccccgcgaatgttaaacacctggtgactgcgcttttctttgcgctgctgtttttgctggccgcctggatggtacggaccgtgtatgtcggctggtcaaaccaggacgtgaaggcgggggcggccgggatgtttgtcgtgcgcctgattattctgcttgagctggcgatgcttttttacagttattaa

SEQ ID NO: 385705 - DNA, 339 bp, Salmonella enterica
atgaaactgatttcccgtttgcgtggcgcggccacgttctgcaccggccttttctggtccctggccgtccgtgcggatttgcccaaaatcgccgggggcgcaaactccgccgacgtgatggaggatgtcaagaacatgagccgcaacggggtgtcctacgggtctctggttatctgtgcggctgccttcattgtggtggtcatctcctgcgtcggcacctatcacaagattggggacggtaaggccagctggtttgacttcggcctccgggtggtggtcggcgccattatggtggtgctggtcatctaccttctcaacaaggccgtgacggtaatctga

SEQ ID NO: 385706 - DNA, 381 bp, Salmonella enterica
atggctgccattgattttattcccgaccgcctgaatgtgcgtccggtggtgtggcgggggttcaccgtcggggagctgggcgtggcggcgctgtgcggtgccggactggggctggtgacggcggtgtttgtggccccgttcgcgggctggattgcctttcccatgctggtcattctgatgcccctgccggtggcctggttcagcggtgaatggctgatgcgttacaaacgcaacaagcctgacaactacctctggcagcacgtcatcctgctgcttgcccgggtgaccgacagcacggaaggcagttgtcgttatggcggataccgtttcttcacggactgcccctgccgggaaatccggcgtacccggaggtgtcgctga

SEQ ID NO: 385707 - DNA, 237 bp, Salmonella enterica
atgaatatcggtctttcaacattacaacgctggttacgccaatatcgcgtgaagtcaggcggaacgggacggctggcggcgagctgtacaaacatctgcgacgccatcgaccaggcaatgttcactatggggctgcaaatccatctgcgccagcgggaaatgaaagaagaggtggataaactgaccgacgcacaggctgtactggattacgttgtcggctggccggaagggagttaa

SEQ ID NO: 385708 - DNA, 354 bp, Salmonella enterica
atgagccgcttcacaactccggcaattctggaaatgttgggccactataactggcgtgtacatgagccgtttgcgttttacctcagtgacgacgaaagtgacgtgatagaagtgccggctggattcatcaccgacctggcgaccgtcccccgtattttctggatactgctaccgccagacggcaaatacgccaaagctgcaattattcacgattatctctacgacaacgcgttatgcacgaagaaagaggccgacaaaatcttccaggacggcatgacggtattaggcgttcctaagtggaaacggattgtgatgtatctggccgtgcggttgtttggtcgggggagttactga

SEQ ID NO: 385709 - DNA, 219 bp, Salmonella enterica
atgtcgctaacagacctgactatgttgaagaagattcagttttttaaaaagtcaggctatctgactgaagtcttaccgttcctgattttcagaagtgtaatgattgcgatgcagattgtctgtgttgtggtattgctggtcggtacgtttgatatcgtactcaataatgtcggagaaccgcgagagggctctctcggtactatcatcaaaagcgaataa

SEQ ID NO: 385710 - DNA, 267 bp, Salmonella enterica
atgggctatcgcctcacgatagacgaacccgaaccgttcagggcgggaacggggcgcgccggtgaccgtatctacaccccggacatcatttttatgtggcgggttaacgtctttacgacgctgctgcagaactaccgttttcgcgcgggccagtctgcggccggtgagcggctgtcatggttcgccgacgcggtaattgagtcggtctttaacgacctgaaacccgcgcacacattctgttatttcacctaccaggaggcgcaatga

SEQ ID NO: 385711 - DNA, 1458 bp, Salmonella enterica
atgaagccgctaatgaagcccatcgataccccggatcaggtatttcatgatggcgacccgtcaaccggcgaactcggcacaatctgtagcgccgagtggcttaacgacacgcaggcgagtatccgtgatattcaggcagaatgcattgccattctgcgggcgaatggattcgaaccggacgaaacaaaacgcgatcaactgtggcagtccattcaggcggcaataaaaagccaggttccggccgcaaccatcactactgcgggtatctcgctactctccagttcggtaaccagtaacagcgagaccattgctgcgacatcaaaagcggtcaaaatcgcgatggacaatgctaacgaacggctcgccaaagcgcgtaaccttgccgatctccagagtgtaccgctggcgctgacgaacctgacacttgctaacgtcaaaaaagccgtggaagacacgcaaatcggcctgagcaagctccccaccttccgcccggaaaccgaagacgaccttgacgcgttacccgtgggatttatcggcgagtgcaaaaacaaaacgcccggaggtccgttaccgactgaattatggtgttatatccagaaaaccgggaacctggacaattattccggcaatcccaaaagaaaaggcggcactatcaggctggtatgtattcataacgccggagaaacctggacaggcgcaaaatttgatgacggcaccacggaaggtaagcgttacgaatggtccagagacttcagcaccctgaacaaacccaagccggaagacgtcgggcttgccgccaccaaaaaagccatcgacgagacccagaccggacttgccgcgcagggtgttatgtggctaagcaccgctgacgacctcagcaatctgccatccggcgctcgccgctttgccagcaacaaagccccggcaacggtactgccagcagcgggctattttttcctggaagtcctggcaaagcgtgatacagcgaacggcagttgcattctggcgacgagtgacacaagagacgtctggatcggctttcgttacaccgttcctgatgaagcaggattcacctggatacagctaaaccagaatgtggaaaacctcggtttaacggatacggtaaatcgggcttctcatgtgttcacggatggaaacattaacggtagcctttggggcggctggataaatcactggcttggtaatgagtttggcattcgcgacaataacatcaacgcccgcgcgactattgactgggtgcgccaaaacttcctttcaggattcaggttggggagtgttgagaatgctcaggtatggagagcatatggttataacgatcaaccaccttacgttattaccggagtaatcaacggcaatactgacgacctgattgataatgtcacgcgtcgccctctacagatgtatatcaacgggtggcgtaatatagactggttataa

SEQ ID NO: 385712 - DNA, 504 bp, Salmonella enterica
atgcattttgttatccagaatgcagatggcgcggcgcgtacttatatctggaaggataaaggcggcgacggtatccgcattaacaacggcgctgatggcggcggtgaatttgtctttggtaaaaacggcgaattttactccccgtctcatgttcacgtgggcggtgctatccttgcaaatgatggcaatgtctacggttcattatggggaaacacctggttaaacaactggctcagtaacgctttcgccagtcgcgacaacaacattaacgtccgcgcgacgattgactgggttaaccagaatttcccttccagtatgcgctggggaggcatttccagtacagctaccgtgaactcaagctcagtagatgtgcctgccggaagtgcggtagtgggcgtaacgatggatgtatggggtagcaggggaacgcacgtaacccatattcgccaccgccccttccttaaactgattaatggcgcatggctggttattgatacgtggtaa

SEQ ID NO: 385713 - DNA, 690 bp, Salmonella enterica
atggtcaacatcaaaaactttacaccaggcaacccaaaaacacctgagcaacttgaactggctaataaacatcgtgtgctgtttttattttctgaggacggtcaggagtggtacgagtcacaaaagcagtttgcggctgacaccatcaaattctcctacgacagtgacggcgtgattcgtagtatttcgcgtgatgtatcggcgctgtggccggttaatatgagtgtctccgaggtggctgacaccaccgccaatcgccgcgctgatatcagcggtcgctggggttttgatggtactgacgttattgaccttatgacgctggaaaaggcccgccgcgcaaagcgtgacgagattaaccgctggcgcgacaatcaggaagacggcagtgctatgtttgaatggaacggtcataaatgggacgccagtaaagcctctcaggagcgtctggcatccatcctggtactgacccgcaccgcagatttaccagcaggtttttactggactgacgccgagaataatgacgtcagtgttacgcccgatgatttagtgtcaatcagcgaaaatatgaccgccacaatggttgcacaaggctggaaaatccacgaacgccagcgcgacatgaaaaaagaggtcgatgggttaattaagattagcgatattctcaactatcccgttggctgggcggaataa

SEQ ID NO: 385714 - DNA, 486 bp, Salmonella enterica
atgcattttgttatccagaatgcagatggcgcggcgcgtacttatatctggaaggataaaggcggcgacggtcttcacatcagcaacggcattgatggcggcggtgattttttatttggtaataatggtcagttttacgccccgtctaacctgcatgcaggcggtgccgcccttgcaaataatggcgatgtctacggtggagtatggggcaatcagtggatatctacctgggctaacaactgctttgctgcccgagatgccaacatcaacacccgcgccacatgggactgggttaaccaaaactttatcaccaatgtcagatacagtgcagaacgccaggtgggggcaagtggcgtatggtcatatcatgaaaatacggtgttaaccggatttaataacaaagatggtgatttttctgctgagacgttgttctggagtgaaatccagattttgaaaaatggtgcgtggcttaccgtaggtcgataa

SEQ ID NO: 385715 - DNA, 561 bp, Salmonella enterica
atggcaaaaattggctatatccgcgtatcaacaaatgaccagaacaccgatttacagcgagatgccctcattcgcgcagaatgtgagcagattttcgatgacaaaatgagcggcacaaaagccaatcgccccggattaaaacgtgctttaaagtgccttcaaaaaggcgatacgctcgtcgtctggaaactggacagactgggccgcagcgttaaaaatcttgtcgcgcttatctcagaactacacgagcgcggcgtccactttcaaagtctcaccgacagtatcgacaccagcacctcgatgggccgcttctttttccacgtcatgagcgccctggctgagatggagcgcgaactcatagtagaacgaacaaacgccggtctttccgctgcacgcgcgcagggccgcattggtggccgaccttttgcactatcccccgacgaaatagcccagataaaccgacttgttagaaacggccactcacgaagacagctcgccattatctacgatgtttccctttctacagtgtataaattcagccctgtaaatgttgacagatag

SEQ ID NO: 385716 - DNA, 240 bp, Salmonella enterica
atgccgtacttcacccccgccgcctcaaagcagaacgcctgcgcggagaatgacgccagcgacatcagcatcactgtcaccgccggcactgtccgcattccctgtaacatccgcacagtgtctccccggaacaaatatcagttgttcaccgtgaatatcagtttgttggtgccggtacgtccgctgtccttcgtgcactgtgcccccgcctgctctgtcgtcaccctcccgtcagcatga

SEQ ID NO: 385717 - DNA, 600 bp, Salmonella enterica
gtgcaggccgtctgccgtcggcgtgtgactgtagcgggcgccaaacagcccgaccttcttcaggaatgtcgccgccacccgcccgtcctgcttgcgcatcgggaagaactggacttcggtgacatcacacatcgacagaatgatggtggcggccagcgactccccgtcctgctcccccagttcggccaccgtcaccaggtcaccgtgaacccgcatttcaatccgggtcagcccggggctggttgtcacatgaatatcggagctgccgatctggcgcgcggtctgaaaatatccgagtacctcagcctggcgctggctgacgtccgccaggtctttcagggacagtcccggctcgcccgacgcggcctgccggtcctgcgcctgccggcagttctgcagcaccgaacgggacacaaaccgggtggaagagcgggcatgctcgcccaacagccgcatcaccgacgtctgaacggtgctctggttgcggcggtgctcatcaatcaggatctccgtttcacgggtttccgggttgtggtacagcagaaccccgctgtcctcgtcctgatactgatttcccctggtcatacatttatcccctga

SEQ ID NO: 385718 - DNA, 483 bp, Salmonella enterica
atgaaagaatctttctttaatcctgatgatattcaggaaaccatcattgggctgaaaaaacaacacggtcactctatgcgttcgtccaccaacggcattcctgattttgtcccacgcaggtctcaggaaaaaaaatgtcatcaggcaaaatcaacgtactttatacccgatattccggagcaaacaccgcctccagcaaccaatactgttttcagcaaggcagacgttgatgagtttctcacccgtaagccgaaaacatataaaatgactgaacaggactataaagaactagggaaaaatacattactgggaatcggtagtcttcttgatggtttgttaacagccactgtaatttgcgttccagttgtagcagggatgatgaatacagaaaataaatgcgattttgattcagagtatacatatggtagcgatgggtccatatatcaggatggtgtagtaatattcaatcctgaaaactactaa

SEQ ID NO: 385719 - DNA, 558 bp, Salmonella enterica
gtgactatcaaacatgataatgcaataactcttcttaaagatgttgtaaggctcgaaactaatcttcctgctcacgtttttcacaaaaaatttgaaagatatttattttttgataatgatatctgcacatcagacgatttgattagtgtgactaaactagtcattagtggggctttagggtatgacttaattgcgagcgttttctctagttcagatttcagatacttaggtgatctacatatgaatgaggattgggtcgctaaaatagtttccttaagcactgaaatgaatgactttggcgattatggaggtctaattattttagatcagaaaaaacaatgggcgatattccagaaaacccctgttgatgagggtgtattgggggtcaatggcaataaaaaactagaggccataaatgacttgatttatgagaactttgttgattgcgagaaatttaaagaatggcttgaggaaaggacatcacatgatgttgaattagtcgaatccatggggagagattatttaataagcatggtagagaactatagagaagcatag

SEQ ID NO: 385720 - DNA, 2199 bp, Salmonella enterica
gtgaatacggcaaaaggccatgagaatggcaccaccctcacccgggcgaatacaacactcgatgcgggtcatcatgtcaccctgaacgccggccgggatgccacgctgaaaggcgctcaggtcagcggtgaaaaaatcacggcagatgtgaagcgtaatctcaccctgcagagtgagcaggacagtgaccattacgattcgaaacagcagagtgccagtgccggagccagctacacctggggagccggaggcccttctgccagcgtcagcctcagccaggataaaattcacagtaacttcgacagcgtgaaagaccagaccgggctgtttgccgggaaggaagggtttgatgtcaccaccggacaacacacgcaactggacggcgcggttatcgccagtacggcagataaaacgaaaaaccggctggatacggggactctcggtttcagcgatattcacaatcaggcagacttcagcgcacagcaccagggtatcagtgccggtacgggcggctccaccggcagccagttgctgaccaacatggccacaaacacgctgtccggggtgaacaaatccgggcatgacagcagtaccacgcatgccgcagtgagtgatggcagcctcatcattcgcgactccgccggacagaagcaggatatcagcactctcagccgcgatacggaccatgctgcaaacggactgtcgccgatatttgacaaagagaaggtacagcgccagttacagcaggcgcagatggtgagtgatatcagcagccaggtgctggatatttacaacacgaacgaggctatcagtgccacacggcaggccactaaagacatgcaggatgcttctgtccgcgaaaaagccagaacgcaggcagaaaaggaactgaaggcagagaaggacaaacatccgtcactgacgattgatgaagaaacgataacgaaacgtgcttaccagaacctgtataatcaggcacttgaaaagaacgaggcccgtgtgggtgacccgatgcgtcaggcagtcactgcctcagtggcggtactgagcggacttgccgggggtgacattaaggctgctctggcaaacggggccgcaccttacctggcgacagggctgaagctgattaccggacgagatgacccgtcagatgaacagatggcagtccggctgctgggtcatgcaattatcggtggcgtggtggcggagctgaacggagcaccagttgcaggcggtgcggctggcgcggtcaccggtgaagtggcggcgataacaatatcaaaactgtactttggtaaaccgccatcagagctgaatgaatcagagcgtgaacaactgagcgggatgtcgacggtggcggcagtcctggcgggttcactggcatcagactcatctgcggggataattgcaggtgcgcaggccgggaagaacgtggttgagaataactttttgagtcagggaaggccgaaggacttcaccgagcaactcaaaggttgcaacggagacccatcctgtgagcagagtgttcgtaaggatatggccaaggagtctgcagaaaatatcctgaagctgaaatcatgctgggatgccggtgatgccgcttgtgttgcagaaacgcgctcgaaaatagaacttgatgagaaagcgtatactgagctacgccagcaggacgacatggccgggcgtgcttatgaagactcggcaaaatggtatgctgatattattgatcagtgtgctggtaagtgtgattggttagaagcttcattgctgaagaccggtgccgatggactaggtaacctagtttatggtgcgttgggtgcggggagcctgccgaaaccgggacaaactgtaagcgcgaacgatcttaaggttgccaacgaaattagtaaggatatagcatctgttgggaagcagacagacattggatttgcggcaaagcaaactaagaaaagtgcagggcaaatagttattaaaaatataaatcaatctgaggcaattgaaaatttatcggctaatggttatataaaatcagtttcgaaagatggttcggttaccgttatgacaaagggcgagaaagtatataggttctatccatcttcaactggaggtgggatctctggtgctgaatctggggtaccgtctgcctctgtatcagtaaatggtaaaatcatttctaaattacgtttcccaggagagtga

SEQ ID NO: 385721 - DNA, 360 bp, Salmonella enterica
atgccggtgttctggccgacgttaatgccgacgcccgttgccgtatggcagaccctgctcactcatctgctgcaacagcactatggcctgacgttcagcgatacgccgtttggtaacgacggcgtcattgagcagcatatcgacgccggtatctccctgtgcgatgcgctgaactttatcgttgaaaaatatgacctggtccggaccgaccggccagggttcagtatctcagtgcagtccccgctcatcacccgtatcgatatactgcgggccagaaaagcctgcggcctgatggcccgcaatagctaccgggccgttaccgacatcaccaccggcagacactgcggggtgacacgatga

SEQ ID NO: 385722 - DNA, 489 bp, Salmonella enterica
atgaaactttccctgaacgtggaagccggtgccatcagcgttcaggccctcaacatgggccggatctgcgtcgacattgacggcattgaatggtctgaactgatcgctgcggtaaatcagactggccacacactgcaggaagccgacgaaacgaaggcagtcagcgctgacgttccgccgccgtttacctccctgccggggatgtgttgcagtaccgcccatatcactgaagaagataaccacctgctgcatatgctgtcgcagcagttcctggactatggcaacgcggagtggatccactttaccggttccggctacctgctccgcctggaggcgtggtcgtttccggtactgcggctaaaacggctggggctgtcgaaagcctgtcgccggttagtggtgacgctgatacgccgttacgccactggtattctccacctggatgcttttggcgaactcctgcccggctttgaaatcttcgactggtaa

SEQ ID NO: 385723 - DNA, 270 bp, Salmonella enterica
atgaaaatgcgaaaattgcgtattatcgtgaaggaaaccggaggatatctggcgatctccagacatgagaatccacaaaaatcatgggaaaatacaacaattaccgtccccccgattactgaagcaacttatacggaaatcaacggggtctgctgtctgtgcaggaaaccattttcacagcactcacttaatgaaattatccatattatttatgtgtttctcgcagacagcctttatttttttgtcagacgtcgtcctggcctcccgtga

SEQ ID NO: 385724 - DNA, 222 bp, Salmonella enterica
atgaaaatattgtcgtgcatatccaggtttgaccttatggttactttcgttccggtatgtttgattgtgggagcgctttacgtctgcactatattgattcccccaaaatgggaaactttgtgtcaggaacagtattcacgggaggccaggacgacgtctgacaaaaaaataaaggctgtctgcgagaaacacataaataatatggataatttcattaagtga

SEQ ID NO: 385725 - DNA, 960 bp, Salmonella enterica
atgaccagtaacagtaagcgtgggcacgatccgctgttcaaactgtttctgcgggagccggagacggccagagattttcttgaggcgcatctgcctgaagatatccgttcgctggttcacctgggcacgctgaaactggagtcgggcagttatgtcgacgaacagttaaaggagcagcactctgacattctgtattcggtaaaaatggcgcagggcgagcagtgtctgctctactgtgttgtggaacatcagagtaccgaagacgagatgatggcctggcgcatgatgaaatacactatcagggcgatgagtgatcacctgaataaagggtacaggacactgccggtggtggtgccgttgctcttttaccatggtgacgttcgtccttacccgtacagcatggactggctggactgttttgaacagccggagcttgccagacgggtactcagtaaaccgtggccgctgattgacgtcagcgtgctggatgacgatgatatcaaatcgcaccgtcgtgtggcgttgctggagatggtacagcgtgatattcgtctgcgggatggtaaggaactgctggcgcgtctggtacagctgattcagatgaaagtgaacagtcgtgagcaggtggaggccgttctgcgttatactataatgaatggcatgacgggcgaggatatctcgtcgtatattaaccaactgtcgggagatatccccgaatatgaggatctcatgggcacaatagcacaacaatttattcagcagggtgctgaacgtgaacggcaggttagtcttgaacgagagaaagccagcctggaacgtgaacggcaggccagcctggaacgtgaacgtcagacgctgctgaaagcagcccgtgcgctgcttgacaatggcgtcagcctggaagtggtcatcaaatcgacaggattaagccgcgaggagctggaacagctccgtcattaa

SEQ ID NO: 385726 - DNA, 504 bp, Salmonella enterica
atggcttcaagaggcgtaaacaaagttattctggtaggtaatctgggtcaggatccggaagttcgttatcttcctaatggtaatgctgtggcgaatttgtcactggcgacatcagatacctggaaagacaaacagacgggtgagccgaaagagcgcactgaatggcatcgtgtggtactttacggaaaactggccgaagttgccggtgaatatctgcgtaagggctcacaggtgtatattgagggcgaacttcgaacccggaaatggactgaccagaatggtcaggaacgttataccacagaagttgtggtttccatgcagggctccatgcagatgctgggtggtcgtggcaacagcggtaacgccggtggtggtaatggtcagcaacagggcggctggggtaaacctcagcaaccttcaggcccgactcacagtggcacaccgccgaaacaacatccggcgaatgagcccccgatggattttgacgatgacatcccgttttga

SEQ ID NO: 385727 - DNA, 219 bp, Salmonella enterica
atgttaaattcaacgacggtatccaccggtatgctggcagcagaatatgccggtttgtctctgcctttacaggttcttcgcagtggtaaaggtttctatattggtacggaaaacgaaacgggaccggtgtcccgcgaatccgtggagtatttcaccactgctgaacgggctgaacgtgcactcgaaaagggtacatggtcacagcgtcaacagccttaa

SEQ ID NO: 385728 - DNA, 780 bp, Salmonella enterica
gtgctcacccccacaccgtctgctgaatttccgttcacaatcccgcccgtcacattcccggacagaatcgctccggcaccactcccggtcgaggtgcccgtcaccgtcgtcgcccccgtgccggtcagactccctgtcacatgtactcccgtcccgttaagggtatcaccgctgaccgtggcatcagccagaacgctggtatcagtcacgctgactcccgttcctccggccgaatgcccggcgacagtaccgccactgacattccccgccagattaacgccgtttccggtaccgttcgtggtgcccgtgatatgcccctggcccgtcacgcttcctccgataccggctccggtcccggttccggactggccggtgatactgccatggttcgcgacattccccaaagtgaccacacccgttcccgacacagaacttccgtcagcatggcttcccgaagcaatgttcgcgccatcactgaccagcacgccggttccggatgaggatgaacctttgataccggccgccagcgtaccgtttatctgtacccctgtgccgccccccgttgcctggccgtttaccacagtaccgctgccggacagccctccgctcaccagcacaccggtaccatcttcagtattaccgctcaccaccacatcactgaccgtcacattctgtccactcactgtcacgccggtacctgtcccgtctgcattacccgtgacactgccaccagtgatattcccggcaacatcgacccccgtccctgcccccgtggaatga

SEQ ID NO: 385729 - DNA, 357 bp, Salmonella enterica
atggccatccaccttaccaccggtgacgctgccgctgacagtcacacccgtaccaccatcctgtgtcgccactcctgtaacctgcgatgttttgtcaccggtgaacgttccgctgatggctgcacctgtacctgtctgtgtggtcccgttaaggacggcgtttgtcagcgtagcttcacctgccacgctcacccccgtgcccgtagtggcctcaccgtttacaacagtatcagtgaacgtactcccttcagccacggacaccgcagtaccgccggtcgcatgaccttctgtcttacctcccgtgacgctgccgctcacgctcacgccgtcaccgccgtcttctgtcgccgttcctga

SEQ ID NO: 385730 - DNA, 225 bp, Salmonella enterica
atgtccgttccggatacgtcgggcccggatacgtccactccggataccatccgtcaggccgtttaccgggaacagggagtgacatcgcatactgagcgtctgagccatccggcgaaggcgtccggaccgcaggggcaggataagccggttagtgtggagatttgtgaggaaaaccgttgcagtacactggttgttccggcagtgggcggggctgttggtccgtaa

SEQ ID NO: 385731 - DNA, 1941 bp, Salmonella enterica
atggacgccggcctgtcagccacggtcgttttgccggataccctgccggagataaccctgtttaaccctgaagtgtttgagtggcgggtacacacgacagagacggaactggcctgccgtgagctggtttttctgctgggtgaactggaccgtaagtacggtctgtggggtgagaatttccggacctgtacgccggggcagactccggaaggtctgaaccgccatatctgtacccgcctggcaggggctgtcaccacgctgttttcccggccaggtttcagcatcagtgatgaaggatatgtacggctgatgaacctgcaccgctggctggcgctggtttttgccgtcagcagctacgaccatgccgaccacattattcgcaatatcaacgcggcgggtggcggggtggccgacccgctgacgctcaatagtcataacctgcgtctgttttgcctgtgctacttcccggactcgcagattgcgctgcagccggacgtgctgtggcagtacgaccgccggacggtggcccggctgtttctggcgcttatcagcggtcgtgccctgccgacgcctgccgcgcacggcaagcgggaacaactgctggcctggttaccggaacggcttgcagagctggactccctggattttttaccgaccgcggtcctgcacgatgtgtacatgcactgctcctatgcggacctggcggacaagcaccggataaagcgcagcctgaacgaccttatccgtcgctcgttgctggccggggattttgcggatatcgcggtggggaatgaccggaggcagatggccactgacaacccggagattcaggggccgcccaaaaaaccggtcatgctggttgtgctggagtggttcacctgtcagcacagcgtgtaccggacccactcccgggcgctggccgccctgcgtgagcgtttcaccgtccatgccgtggggctgaccacagcggtggatacggtaagccggcaggtctttgacgtttttcacggggtggaggctgacacagccctgcagaaggcgtatgccctggctggtgaactacgtccggacgtgatgctgtatgccggaatcggcatgtttcccttcacgatttacctgagtaacctgaggctggccccgctgcagctggtcggactggggcacggggcctccactttttgtggacagatgaacggttttgtgattgaggaagacctggtcggggaggcgcgttgcttcagtgaaacggttatccgggttcccgccgatgcgatgccgtttgtgcccccgacagatatccgccgcgtgccggtcacgcgcacgccgtttctcacgcgtcagcaggcacagtggcgtgagttgctgccggttcgggtggcggtgtgcgcctccattatgaagattaacccgaactttctggcgacgctggcggaaatacagcgccgcagccgggtggccgtgcagtactgcttctatatgggttttgcacaggggctgacgctggattatctgcgggaggctatccatgctgtgctgccgggtgcggaggtgaatgcccacatgccggtacaggagtaccagacagctctgaacagttgcgaactgtttgtcagcccgtttccgtacgggaacatgaacggcctggtggatgcggtgcgtcaggggctgccgggcgtgtgcctggccggtccggaggtacacagccatattgacggggggctgttccgccgtctgggaatgccggaggaactgattacgcgggacagggaagggtatattcgtgcagtcctcagactggcggaggagcatgactggcgtgagtcactgcaggtacagatgcaggaaaacgacccggaacgggtgttgtttcaggggcatccggagaagtttgcggaggtggtgtatgacatttaccggggcaaccatggaaaacaggcgtga

SEQ ID NO: 385732 - DNA, 429 bp, Salmonella enterica
atgacagtatcagcacgtaaccagttaaccggtaccgttagcgcagtggcaacgggggcagtcaacgacgaagttgaactgacgctaaccggtggcgctaaactgatcgcgattgttacccacagcagccagcaggcgctgggactggtcaagggcaaagaggcaatcgccctgattaaagccccctgggtaactctggcaacagaagattgtggtttgaaattttctgcccgtaaccagtttcccggtagcattacgaagatcactgaaggcgcagtaaacactaccatgaatatcaaaactgatgctggttttaatattgtggcggtagtgactaacgaaagccaggacgagatgaaactctcggtgggcagccgggtgattgtgctgattaaagcctcggcgatcctgatcgccaccagaacgtaa

SEQ ID NO: 385733 - DNA, 618 bp, Salmonella enterica
atggttttttcggttaagaaaatttcccttgctgttgttgcatgctcttcttttgttggtgcctcatccgcaatggctgacgtcggcaatccaacggtagcaggggaagtatccgctcttacgatgcacgtaatcggtactatcagcaaaagcacctgtgatatccgcccttacacgacagcaggcgcggatgcgacaactctgaacatgggggctatgacagcaggaacagaatccactgaggtgtcttttttcctgaagcctgccaatggttgcagtaccggaattacaggtgaccatggcagtactgccgcagaaatcacatgggaaagtaatggcctgaccgagcatggtatttcaaacatgtatggcaccgctaaaaatgtccatatcgagttaagtccggcgagcggggatggtgcggctgtgactgatgcgacggggtttataaaaactggtgctcagactgttgcatacagcacgattgccactaccggcaaatcccctgatgctccgcttccctttaagtataacgtgaaattcgcatcagacaacgggggcaatatggaagccggcactgttgatactgatatgagttacacggtagcttataaataa

SEQ ID NO: 385734 - DNA, 1152 bp, Salmonella enterica
atggctgaagtaaataatgcagtacagtcactccaggatatgtggtacctggcagcggttgatggtctgggactggataagtcctcgttcatgctgctccagtccggggtgaaattgccctataccacaagcaccctgtggcaagtgatcgatgcaattcctcccaaagcactaaccgcagttttttccctggggtccctgaatagcttttatcagaattacggtggcctgttcagcgttgtcattgcacccataagtgatgaactcagggtggtcatgggtgactacctcagtgactggatggaatacaaaaagagcgcggatttatctgtcggattgccaaaactattcgaagtctgggcttgccagtatcttccggacaatatagccacgaccgccatttccgtctttaacaaggataatcacaacatcgtcaacttagcttccaaaaagtactacgataacagtgatgtcagtaatccgttcgcgcccaacgccaaaaaaccacccctctataacatccgtattgacgaaatcatcggcggagccatcgcgcatggcccgagaaaagaagtccatgttaacagcaagacttcatcctctgatgtgtccagtacatgggcaaaaggtggcgtgagcggtttcttggggatcttctccttgggcggtaatcgcgtcagcagcaagacaaccagtaaatttgccagctcggaaatcactattgatgcaacgttccagcacgtggtaactgtccagaccttcaaaccgggtagctggtacaactcaagctttctgaactatgccagcaaaggagagaatgtgttttctacaggtaaccccattacctgggaaaatacattcgggccggacgggactctgcaacgcatcatcgaagggttggttatcgtagatgggatcgacattgtgatgacatcagatgcaacctacaccgccgaagaacagaaggagatcaacgctcagacaaaaggtggggtatggccgttcttctcagtcaatgccagcgatagccatagctgcagggtaagctttaacgaccagggcagaatgacggtcagaacttcctgtcccgtgggtaacccggctatttttggtgccaatgtgagaaatatttcactatatatctccgactga

SEQ ID NO: 385735 - DNA, 273 bp, Salmonella enterica
atgatcgacctgacggcagaacagcaacaattagcgaaaatagttcatgattacgccagccagtttcctctgacagaggatggtgacgcgcaattattgcagggctgttatgactacatggaggcgtttaaacgggtgatggacagcacatcaaaggtgcagatggactacatctgtctgcagtatcctggatattttcgctttgcgaaatggatggaacgactggcccagggcattgctgatggactcattgaggttccgaaagatcactaa

SEQ ID NO: 385736 - DNA, 363 bp, Salmonella enterica
atgaaaaaaccaccattgagaagcaccgggcagaccatcaatcttgctgaattaattgatgatatgcctgaggaagtgctgataacgttacataatcttattgttaaccgactcaatatgttacagcgccagcgaaccaggcaaagcatggaagattttcggcccggggatgtggtcagcttccgggctgaagacgggcaaacggtgacgggggttctgatccgtctgaataaaaaaacggtgaccgttcatactgaaagcggtgcccgctggaatgttgcgccacagttattgaccagagttaaacgccaacggggatccgaaacccgggcagataatactgtcgaaaaaaagcttcattaa

SEQ ID NO: 385737 - DNA, 303 bp, Salmonella enterica
atgcggatcccggaacaggttatcctgtcagccctgcaaaaaggcgcgtgtatcaaaaccttttaccggacatcggcccgggcagcggggtcagcggaccgtcgaattcctgacggatatgtactggaatcgcccggtgagcggaacgaggtcattctgagccataccgattttcagtcggtagaaaaaaggctcacagaaacagaaacctgggagcagatcgtgggaaacgtacttttcggtggcagtacctgggcgcttcgcccggatacggacgattcatcaatgcgagaacgggactga

SEQ ID NO: 385738 - DNA, 579 bp, Salmonella enterica
atgactgaaatacggattggctatgcccgctgctccactgacaagcaggatttgaccacccagcaggaggcgctggtgaaacttggcgtttctccggaccggatttacaccgacaaagggctgacagggtcaaaccggcagagaccagggctggatcaggcgctggccgctgtgcgccgtggtgacaccctcgttgtaccgaagcttgaccgcctggcacgctcggtacctgatgcgcgtgaaattgcggatgcattacaggccaggggcgtgaagctggcgctgggagccagcctctacgatccggaagatccggtggggaaaatgttctttaacgtgctggccaccttcgctgaattcgagggcgacctgatacgcctgcgtacccgggaaggcatggcaattgctcgtgcgaaagggaaactgcgggggaaacagcccaaactgtctgagaagcaacagaaagaactgtgccggatgcatgaaaccgggcagtactcgattagtgacctggctgagctattttcgatctcacggccaacggtttaccggacactttcacggaatcataaggaataa

SEQ ID NO: 385739 - DNA, 363 bp, Salmonella enterica
atggcgacgaatgagcgtcatctgcgtgtccactgcctcccagcgacgggccatgcggctgaccggtttaacctgcattcgttgtgccgtactttgcagggtatcacggggcatgattttccaggcccgttgacgcacctcgccaaacgacgtgacatcggccaccgtctcgtcaacgaacagggacaacagacggcctacttttttgctctcctgttgtcgctgcagcagatcggcttcaaagatcttcttcgccgcttccttacagcggtcctccgtctgcttcatatgccacatcacggcactgaccagattgtcagacaactgccggtaacgaagccagacgtaacacagcaggtataa

SEQ ID NO: 385740 - DNA, 336 bp, Salmonella enterica
gtggtaccggcagccgccttccattccggaccggacggcagcgccttcaccggggtgccgatcagtttccgggccggtgtggctaatgcaggtgcgggggctggtgacgccgttgatacgacagacgtgggtgcggtggttttgccgctcaggtgctttccgttgaacggattacgcccgattgcggtagttgcagtgaaaggcgtggacgtggcgcccggagatgttgcttcggacacgaccgcagcaaccggggatttattgtttgttgttgccggtgccaccgccggcgtggctgtaaccggtgaagacgccggacgcgcctgtgccagataa

SEQ ID NO: 385741 - DNA, 387 bp, Salmonella enterica
atgtttactcatatgcgtattgccaaacccgtcactaatctcgaaaggtcttttctgatgtacaatcaaggactgggtctgcataaaattgctgaatttgaggatcatgacggtttctatggaataatgttaggacggggagacttacaatggcatatagaattcaccttttgccataaccatcccgttcaacccttacccactgaagaggatttactcgttctttattattcggatgaaaatgaatggatgcgtacctgcaaaagaatgatcgacgctggtttcaaagtgtcaacgtcgttcaatccctattgggatgtcaacggaaagacatttgttgaccgcgacggatatagggtggtcatgcaaaacaaggcatgggcataa

SEQ ID NO: 385742 - DNA, 576 bp, Salmonella enterica
atgaaaaaacaggtgccgtttctctcctttattaccggactgggttccatcataggctcgggctggttgtttggcgcggccaacgccaccagaattgcgggtcctctggcccccagggcatgggtgatcggcgcaggaatgatcctgtgcatccccgacatctatgcgaacagccagcgtgatcatcgccgtcagcgtgccgctgagttacttgccagactgggactggaaggtcgtgagcaccacaagccaggtgaactgtccggtggtcagcagcagcgcgtcagtattgcacacgcactaactaatggcggagaaatcattctggcagacgcacccaccggcgctctggactctcagtccgggcgggaagtgctggcaatactctgtgagcttaaccggcgtggacatacggtggtaatggtcactcacgatatggatgtggcatggcacgcgcagcgcattattgaactgcgggacggagagatcatttccgacagtggtcgtcatatccccggcactgaatcactgccacttcccgctgtgatcaggccacgccgccagctttacctctga

SEQ ID NO: 385743 - DNA, 1608 bp, Salmonella enterica
atgctctcacttaagacacttttacaactaccttgcggatggcaatacagccaacaagtgattagccctgatggtataatcctccatctccgtgccaaacgtaaaacatcactatgtcctgaatgccttaagcgcagcgactctgttcatagttgtcgccggcgccggatacagcatctaccctgctcaggccaggcgctatggctggtgtttgccgttcgccactggtactgccgtaacccagcctgttcacgcaaaatttttgccgagtcgctggctcccttcgcaggttcacggcagcagtcttcgcaggcgttacaaaatttacagcgtcagttgggattaatagccggaggtgaggctggaagacgggcggcaacggcagcaggtctccgtagcagtgcagatactcttcttcgccgggttatcaataccccggagacgaaaccgccaggcacgccccatgtcggtatcgacgagtgggcgtggcatcggggccaccgttacggcacgttaatagtcaatcttgatactcaccgtcccctcgtcctgcttcctggccgcgatcaacgtacgctggcggcctggttcagaaaatatccggaaatacaggttgtctcacgcgatcgcggcggtatctatgctacagcagcacgtgaaggtgctcctcaggccaggcaggtggccgatcgctggcacttgttgaagaacattggtgatgcactcgaacggatgatgtacagacacatgccgctgatacgtcttgttgccggtgagttgtcaccaaagaaatcacctgagccagaacgggtacaaacagctccatatatccgtcgcccggagcgacttaagcagcagactcgtaataaacgccaccaacgctgggtggaggtaatcaccctgcataagaatggatgtgggctccgtcaaatatcccgtaccaccgggttatcacgcgtaactgtcaggcgctggctccagtcaggtacattccctgaaatgtcgacccgcccccggaaaccaggccttctggatccctggcgtgggtggctggaggaacaacgtgaaagcggtaatcacaatggcagccagatatggagggaaatggtggcaaaggggttcaccggcagcgaaaccaccgtcagggatgaggttgccaaatggcgtaaaggtgggagcgcacctgttactgcaccagcccgtcttccatcagcttcgcgcgtgagccgttggttgatgccctggcgaataataaagggcgaagaaaattatgcttcccgcttcatcgggctgatgtgtgaaaaagacccccagatgaaaatagcacagcaactggcgctggacttctaccggatcctgaaaaccaaagacaaactacagctaaacaggtggtttacccatgttagtgaaagaggtcctgttgagcttcagcgcgttgcagccgggatggaagctgatgcagcagcaatatgtgaagccattaccagcaaatggagtaacggtgtagtcgaagggcatgtaaatcgcctgaaaatgttaaaacggcaaatgtatggccgggccagcttcgagttactgcgacgacgagtcatgagccctctagcgtaa

SEQ ID NO: 385744 - DNA, 3195 bp, Salmonella enterica
gtggggaaaaacctggataccacggccgggaatgatatcacttttgccggtacggatgtcggggttgccggtaatgcgcatcttgatgccggtaataatctggaaattattgaccgccaggacagcgtcaccacccatacggaaagtgaatctggtggtctgctataccatgaaaaacatgttcaggactcaacaaagaccaccagtaacggcagcaattttgaggtgggtggcaacgcagagatggctgctaaaaacgctattaccgtgcgtggctccgatgtgggtattaacggtgacgccagcctgcaggccggcagcgttaaaatcctggacgggcagaacacagagcacagcacttcagtggatgaggaaagcggtattggcgtgaacgattcgttgtacggaaccagtaaaaccactacacagcatgtggcagagaacagcgtggccagtcatctgagggtgggggggaatgctacggtgaaagcgacggaagattttacccttcagggctctgatgtgaatattaaaaaggatgcagatattaatgcgaaaacggtcagtgtactggccggacggaatacggataaaacggacgtcaccactgaaaaaaccgcgatcttacaggccagcgcgtcgggcagtcgttctgctgaaaaaacgctgtctgcaaaagccggtacggaagtgaaaaaatacagtgcctcggcaggtgcgtctgccagtgcggagggatctgccggaggggaaggaaaggcgggactggctttttccagtaccacaaccacccatgaaggcagcagtgaactgaaacatacggcttccagtttgagtattggcggtaacggaaaaattcatgcagataccgttaatctgaaaggctcagaagtgtcatccggtggagatatggatgttaaggcgaagaatattaacctgctggcagcggaagataaaaaaacttcgtataaaaacaccagtaccacccgggttgggctgatggcagattctgataataaagccacgggtaaagctgaagccggagcgaatgcaggggtaaaaaccgccctgaaagccagtgcgtcagcaaatgtatccggctctgttgaatccagtaataatattgacctggtacaaaccgactcctctgcccattccacgctggatacaacccatcagggctcagtgattaagtctggcgggaaaatgaaactggacgccggggataccctgacgctggaaggttcggcgctggattccgggggggatatggatttacacgccagggatatgaaatttaaggctgctgaagacagacatgaaaaacgtgacagcagcaaccatatgtcagtggggctctatgcggatggcagtgccagtgctggcgctgatgccggtgcagatgtgaatgcaggactgactaaacgggaggctggcgtgtcggcgggttacaacgcttcggcagaaggtgaagtcggtatacaaacaagagtgggcagtgagagtaacgtttccggctccaccactgctgtcacttccgccatcaatgccggcggtagtataaaacgtacggcagagaacagcatcaccgatgtgggaacgcagataaatacagaaggggattttgaacagtccgccagtaaaatcaccagcgaagctgcgcgcaacaccagttatcagtcacacagtgattcatctgacaccacacggctggggatatatggcgaagcgtctgcccagggggccgccagtgcggggtctggtggcaaaaaagaaattacacacaaggaagacgtgggaagcggtgttgccgtcagtcatcagcatgatgataatgcttcagcgtcggacagcagcgaggcggtcgtctcaaatgttcacgtgaggggcagttttaagagtacatcgacacagggtaccaccctggaaggcacaaatatcacggcaggtaaggatacggaacttaatgccgggacgctggactaccgcgccgcggaaaatacctcatccaggagtgagaacagcaacaaagccggtggaaaattaaaggcgggagaaacaggtctttccctgaatggagaatataaaaacgccagtgaaaataccaccagtagcaacgctgtggtggggcgcattaattcaggtggtgatctgaaaataaatacttccggcgacacacatctggaaggtacgcgtttatcggcagaaggtgcagccagcctgaccagtggcggtaatgtgtcgtttgatgccgcgaaaaataccggcagtaccggtgacagttctgcgacggtaaaagcagggctgagcgctgaaccaggaaaggtgggggttaacgggagtgtggataccgggcataattcagaaagttacgatacggatgtggcgggcagtataagcagcggcagtggccccctgacgattaagagcggcggagatgtaagtatgacggggacaaatcttgacagtaaaaaagcgatttctgttgaagctgcgggcgatctcagtctgaacgccgcacatgacaggaagagcgaatcttcctctgcttttgggaccggtgtggatgtgtcggcgggagagagtaaaaaagtgggcggaaacgttaatatcgatcatcagtctgaaaaaagtgagacctttaccggcgtgaatctggacagtggtggtgatatcaggctgcattccggcaaaaacaccacgctggaaggtaccgggggcagtgctgccgggaaaattgacgtttcggcaggagggcatgtaacacagaaagaaacggtggatacgtcatcgaaaagcgataccggcgttgcgctcggggcaacttataagaaagagcatgctgaaaagcagaacagtcagcctgcagtaaaaggtgcaccagatgaaaccggaccgcaggcaacccgccccggtactgaaccggataaatccggagagataaaaagcaataagtcggttacaaaacaaccgtcagaacatccgcgctcagcaactgctaccccgaagaagaatcattcattaacagaaaaaaccgctacagaaacacccaaaacggaagtaaaaaaggagaaggcgtcaccacctgtaaaaatggacaaacatgaggcgcatcataaaagtgactcgagcagaacgaaacacggcgtacaccttaacggggggaacggtgtgactgtcacttcgggaaactga

SEQ ID NO: 385745 - DNA, 696 bp, Salmonella enterica
atgaatttcagaaaactgagcctcctgctggcaggcctgctcatcagcagccagtccatggcggcattcaccctgaacggtacccgctttatctatgaaggcggaagtaagaacatttcgtttgaggtcaccaaccatgcgccggatacgtggggtggtcaggtctggattgacaacgagtccatgtcatctgacagcgtttccctgatacccgccccgactttttttaaggtggatggtaatcagaaacaggtgatacgcattctggatgtgaatgacgccctgctgccaaaggacagggaaagcctgttccgcctgaatgtccaggaaattcccccggcaccgaaatccgggggaaacgtgttatccatggccatgaacacgcaggtgaagctgatttaccgtccgaagtcgctgtctgcaggccgtcaggatgcagaaaagcagttgcgtattgaacagcgtggcagcaagagtgttctggtcaacccgacgccgtattattttgcggtggtggcactgcacaacggtaccacggacaagggtacggtgatttctgttcctgcgtcatctccgtcccccgccaccctggccccgcatgcagaagtatcgctgggtaaagtggtgagcctgccggtgacggtggaggccattgatgattacggtgccacccgcagttacaccctgagcaggtga

SEQ ID NO: 385746 - DNA, 663 bp, Salmonella enterica
atgaaatacgcagagaaggccgggaataataacgccgggagagtaaacgttgcccgccggtatcatccgtcccggctgtctgcggtaagcggtctggcattattcctgtccgccgggctcagcgggagcgccagtgcgctgacgttcacctttgactacacctacaccattgaggccaatacctgcacgctgagcgctcagggaacggacaacgacggcgctatacccacttccggtacgacaacattaaatgtcaactggggaacagtcacaaaagaacaactgaaagaccccgataaagccagtaaaaaaacgttcggtctggtgatggattgtcagggcgatatataccagccgaagctgactgtcagaccagcgaacggggataccacatccaccccgggcatactttacgtcacggacaccccgggttctgtcgccggttttgcaataaaggcttcagatgcgtccggcgcgacggagacagaaaaaacacagaaagttctgacaggtcagggacaacagacactgagcgaaaccgtacacaagaaaaagatgttgctggaagcctggcccaccattatgcccggaaaggggaatgaactactgccgtcagggactgaaataaacggaacggtcaccattaaggtcagttataactga

SEQ ID NO: 385747 - DNA, 636 bp, Salmonella enterica
atgaaaataaccttattcaccgccagccaggttatggcatgcctgatgctgctgagtcccgtggtttttgcagaggactaccacaaagacgtcactgcggaatttcatctcagggccaggtacaaagatttcacctgccagtcagcactgacagccagtggtgacatcagtggcacaatcattgatttcgggacattctcatctgactcagtggacataacaaaaactgttgcgctgacactgaaatgtgattcagacctgccggatacggtgaaggtcagtttttcggtggtgaaccctgcaatggtggatgaaaccaacaaccgccggctttatccgtcagacccggacgggaagcaacagacgaacctgtactacgactgggtatggggtgacgcaattaataacacagtgaaacaatcagccagcgatggtgcgcacaaggcagtgaaacccaatgacggagttaacctgagcggtacctcagggccggacgtttatgaagtggtttctgagggacacgcgtcgaacgtactggaatttccgctgaaaataatccggggggtaaaggaaaccgacaaactggctgccgggaattacacggctgatgtgaaagtgaccgtcagctatgactga

SEQ ID NO: 385748 - DNA, 552 bp, Salmonella enterica
atgaagatctttaccacggctctagtctcgttcatcacaataggctgcccgctaacagccaacgcaaactacaactcactgaccaccgagtaccccgcggacattaggacgatagcggtaatcggcggagcgtaccggtgggaggactaccatagcgggtgtgctggccgacacaaattttctgcgggcgcaataggagtgaccataaccactgacgccgccggtgcagtggctgcgaacgtagtcgaactaaacaacatcgacagtgagtgttctaacttcgactggaaagcagctgacttcgacccacccgcctcggattacttccctcaaggaaccttcggggtcaatggaacgtacggcgctacgatgtggactcaggggtctcagtgccccctgaatacccttcctcaggccactgccaccgtcttgcaggccacggggctacaacgatcgcccggcacacacacacggcgcatcactgtggaactagccgggatcgacgcccgcggctgttctgttctcctcgccccacacgtagccagcatgtga

SEQ ID NO: 385749 - DNA, 483 bp, Salmonella enterica
atgtcccggaaaaccaggaaaacgatgataaaaaatgaacataaagacttaaacatggcactcagttcattcaataaaaaacaggaaagaataaaactgctatcagaaaccagagagattcttaattatttttatgtcaacaccagtagttcaagaatatccccgtggtttttcgcttccgggatgactctttcctgccttacaggtactatattttaccacatccaaaacgacagtataacaaaacaacttttatttatatgcacatttacacccgtcttaattcttttattactcactcttttcctgctgacaaaaacaaaacagttcggacgtaccgatgacattacaatacaaacatgtaaaaaatgttctgactggtctgtttctgcattaaaaatatcactaaaattaatatcatccactcaggaatcacatgaaaaaagactcaatatttttaaacttgtctgtggtgcattgtaa

SEQ ID NO: 385750 - DNA, 960 bp, Salmonella enterica
atgacaacactcacggccgtgccggcatttgttcccgccggtgaaggggcctccatctcttcatatctgaacagcccggacccggaagacagtgcaggttcgccggcatctcagggcagcgatgaacccgttgctgatacagaagacacctccgcacagcaggcctcgcaccggctgggtggcaacggcggcaggcgggcagaaccgaccgttccctcccggaaaaaaacgccggcgctggtctggcagatatctgcagtcgtgctgattctggggctggcgggggcggtggcatatctgtggcagacggtcagtcagcaggaaatcctgctgacctcgctggacacggcgtttcgcagcgggcaactggactccctgccacagcgtattcaggcgctggaagagaaacagcagcaatatctgccggtgacgcaggcacagacctggcgtgatgaagacggcctggcccggaaagcgctggaaacgcaggtcacacaactggtgaaagacagtgagtctctccggactgatgtgacggcactggcgacacagcaggactcgctgaaacagctgactgacgcgctctcatcccggctggatgagcaggtttcccgtattgatgcactctctgcgtggaaagcgcagcgggaagaaaaaacagccgctaccgcggtaaaaccttcggccccgcgaacccgtgaggcaccgggaaccccgtctccggcggtgaaaaaaaacacggtttcccgcgcactccctcctccgtttgtcctgaccggcgtggaacgccggggcggtcagtcgtatgcggtggtgctgcccgccgggtctggcagcgactggtcacagctgcagatgttgtcccccggagagagttaccggggctggacgctggtcagtaccgacggtaaccgggcggcgtttaaggccaatggccacatacaacagctgacgccatag

SEQ ID NO: 385751 - DNA, 198 bp, Salmonella enterica
gtgcactgggtactggatgtgacgtttaacgaagatgacagccgcatcagagccggagacggagcggaaaatgtggttgtgataaggcggttcgcgctgaatctggctaggctccctcctcaaaaagacaacatgcgcagcaagctaaaacaggctggctggagcgataagttcaggagcgaaattatcttcggttaa

SEQ ID NO: 385752 - DNA, 1215 bp, Salmonella enterica
atgactgattacaaagagtatttagatggcgcttatgactatgatacagatactttgaatacagagaaagcaaaaaaaatagcagagcaaaaaaaagaaaagttcaatataatacttctgggtgcaaccggtaccggaaaaagtactttggttaatgccgtttttggtgaaaatatagctaaatccggtgtcggaaaaccagtaacacaacatctggaaaaaatcaatgttccggccaaaggcctggttttatgggatacaaaaggaattgaagcaaaagattatcaggaaacagtcagccagttagagaaagaaatatctgccagtttcgacgaagcctctcatgttgatgatattcctcatctcggatggttatgtatagattcaggttcaggcaggtttgaagacagagattttgatttaataaaaatctttaaaatgtggaatattcccattgtgattgtcttcacgaaaatgttgggtgatgattcatgcgggtttattgattcggtaaaagagtatattaacagtagtgagtattgcgattatattcatgaacgatatgcaggggtgaactcagttgaaaggaatatatcaggttcgttaaagattccggtcagcggacttgatgagttgctggacataagttttaagtgtttacaggaaggaagagaagatgcagagcagtctttaaaagctgcaaaggttttaaaggctttggaaacttttaaaaaagcgcaaacagtaaaaaagggcatccgtcttgaagcaatgaaaaagggggcaaaaaaaattgttcatgtagcggcggcggctgctggctcagttggtgccacaccgattcccgggtccgatgcaccattaatagcagccgttcagagcacaatgatatataagattaacgcagagttcgaactggatgcatctgattcgaaaatcacttctgtagtgggtggtattctgggcgttacagcatttgctcaggttggaaaaacaatagtagctaatatactgaagtgcatacctggtgttggctcaatagcaggaggtgcgatatctgcaactacggcagtggcactgacagaagccattggtcatgcctatattaaggtattgattttctattataacaatgaaactggttatgttgaattacccgaaaacataaagtcaattctgagggtgtttaaagataatttctcttataataaatag

SEQ ID NO: 385753 - DNA, 537 bp, Salmonella enterica
atgtttgaaaaactgaaaattcagcaccgtaaaatgcgtgaacaacttccctctgaccttaatctgcgtgtgcatcgtgctttaagctggttgcagcgagccgaaatggctgaggatgacgatggtcgttttatttttctctggattgcctttaatgcagcgtatgcaaccgaaatagatgatagttatcgtctgtcagagcaggcttctttcagaaactttctggagaaattgtgtgggctggatgaaaacaaacagactgaagaactgatatggcaggagttttcaggcaatattcgaattctgctggatacaccttttgttttgcaaagtttctgggattaccacagcggaaaaataagcggaacacaatggaaagaacgattaaagtatgacaagaaagtggcatctatggcgcaggccagcagtgatacgccacagttgttgggggggtgtttaaccgcctctataatctgcgcaatcagcttattcatggtggggcaacatggaacagctctgttaaccgaaagcaactga

SEQ ID NO: 385754 - DNA, 804 bp, Salmonella enterica
atggatgctacccatcgtctgggtggtgaaaactatgtgctgtggggcggccacgaaggctacgaaaccctgctgaataccgacctgcgtcaggagcgcgaacagattggccgcttcatgcagatggttgttgagcacaagcacaaaaccgtcttccagggcactctgctgattgagccaaaaccgcaggagccgacgaaacaccagtatgactatgacgcggcgacggtgtacggtttcctcaggcagtttggcctcgaaaaagagattaaactcaacatcgaagcgaatcatgcgacgcttgctggtcactctttccatcacgaaattgctaccgccatcgcgctggggctgtttggctccgtcgacgccaaccgcggtgacgcacagcttggctgggataccgaccagttcccgaacagcgtggaagagaactcaatggtgatgtacgagatcctcaaagcgggtggtttcaccactggtggccttaactttgatgccaaagttcgtcgtcagagtatggataaatatgacctgttctacggccacattggtgcgatggatacaatggcactggcgttgaaagtagcggcacgcatggtggaagatggtcaactggacaagcgcgttgctaaacgttatgccggatggaacggtgagctgggccagcagatcctcaaagggcagatttcgctgaccgggcttgcgacctatgccgagcaacacgatctggcactacagcatcagagcggtcatcaggagctgttagaaaacctggttaatcattacctttttgacaaataa

SEQ ID NO: 385755 - DNA, 339 bp, Salmonella enterica
atgccggagggcaacaggcgtcacgccgtgtatgtttttctccattttcccgttccacctgtattatccgctcagtctttcagtaccggttccgcttccagggccgctttctccgacagtttcttcaccttccacttcggcggcgtggtgacgttaataatggtagaagcaaatatcctgctggataacgttaatatgcatcagggggatatggggacgactaaggccattgctctgactggcgacagtaaccatcttcaggctaaaggtggagggattaatgccggggagggttatcgtaccagcgtttctgacatcaccgggagctttgttgaataa

SEQ ID NO: 385756 - DNA, 162 bp, Salmonella enterica
atgagccagacaaaaagactaccatcactgagcgaatatgagcgttttgtcctagaatccctgtaccgacaggcgacagaagaaaaggggcacccgccggaggtccaggcgcgtcaacgtattcgtgaggaatatatacccatcgtcattgaagatgcttga

SEQ ID NO: 385757 - DNA, 1689 bp, Salmonella enterica
atgaagaaaaacagaatacgcgcgctgacggtcattatcgtgacggcactgtccgtcgctctggccggctgcagcgaaatggacaacatgtcccggaccatacgggctgacgcggatattgcgcagcagcatctggacagccagaagcgtcatcaggacccgctggtctggacggacaaaccgtgggtgaacctgaagcccatcgcgcaggccacatcctccccgcagaaggcggggctgcctgcctgcaatatcactgtcggcagtcgtgacggactgacgctgtctgaaatcagcggacttatcacccgtatctgcggcgtgcgggtcattctttctccggaggtgatggcggccggacacggtgcgggctcagccggcgtcacccgccgtaccagtggcccgctgccggtgccggatgacagcgggcgtattccgctggaccagctgggcgtagccggaggtggacagcagactgccgtcgcgccggccacgctgaacggcctgcgctggcagggaccgctcggtggcctgctggacaatatcacggcccgcacggggttgtcctgtcgtactgaccatggcgcggtggtgttttacctgacagaaacgcgaacctttcagtttgccttcctgaatacccgtgtgaactcgaacgccagcgtcagctccggttcaaccagctccatgggaaccagcggcggcagcgggggcggtgataactccgtttccggcgattcgtcctcgtcgcagaaaaccaccacgctccaggaccgggatgcatacgaagatatccgtaaaacgatggagaccatcctcaccccggagaaggggcgctactggctctccgaaagtaccggggtactgacggtcaccgatacgcctcaggtgctggagaccgtatcgcactacgttgatgagcagaaccgtgaaatgaaccgccaggttcagctgagcgtgaaagtgctcagcgtcagcaacacccgcaatgagcagttcggtattgactggggccttgtctataaatcgctgcagcaggtcggggcgaccctgaacaatgccggcggtgatattgccggtgcaacatcggcaggcgtatccatcctcgatacggcaaccggcagcgccgcccggttcagtggctcctccctgcttatcaaagcgctcagcgagcagggcgacatcagtgtggtgacctcccaggacagtaccgtcaccaacctgacgccggttcccatccagatggcggaccagacggtctatgtcgccggcagtgcgacgaccacaaccacggatgtgggggccacgaccacgctgacgcccggcatgataaccaccggtttcaacatgacactgctgccgcttatccggcaggcaggcgacgtccagctgcaggtgaatttcaatctgtcagacccgccgggcatccgcagtttcacctcgaaagatggcaacagttatatcgagatgccctacacgaaactgcgctcactgagccagaaggtcaaccttcgcgccgggcagtcgctggttctgaccggattcagccaggataacacgtcggtcaggaagagcgggacgttcaccccgggcaatttcctcttcgggggcggccgtaagggagaacatggccgcagcacgctggtgattattatcacgccgttactggcggggaataacggtgactga

SEQ ID NO: 385758 - DNA, 519 bp, Salmonella enterica
atgggcatcggtgagtcagaagccaaagcgttctggctggccttcctgctgagccttaaagagcgtggtctggagggcgtgaagctgattatctccgactcgcacagtggtctgaaggcagcgatacagcaggtgttcgtgcagacggacgaaaaaagcgcccatgccacctggcgggaagttgctggccaactggagaagagcttcccggccgtcacggagatgatcgacgaggcagaagctggcgtgctggcttacttcagcttcccgaaagcacacagggtgaagatccactcaaccaacacgctggagcgtctgaacaaagaagtgaagcggcgtgcagatgtggtgggcatcttccccaacgaagagagcatcatgcggcttccgggtgcggtgctgacggagcagaatgaagaatggcttctgcagaaccgctacatgccgcaacacaccatggcggagatcgaccaggccgctgaaaacgacgtaacagaagcgctgccactcagcgcataa

SEQ ID NO: 385759 - DNA, 186 bp, Salmonella enterica
atgagttgtaccatcacgttgcttcataattttatcgttcaagacagttgcttactgctttatatcattggcgctaacacagcccgcaaggtcgacgcgctggtccagtcaatggggatgacaggtatcttcctcagcaaggtatcatccatctgtcgtggcggtaataatcgcctgcgcggttaa

SEQ ID NO: 385760 - DNA, 969 bp, Salmonella enterica
atgagtctgccaggtccactctgtgtaggtatcgatgtttccaaagcaacgctggacattgccgccagctacgctattgagcaattttctgttgccaatgatgctgatggctttgactccatcatcgctgagctgaggcagcacgacgttgcccttgtgttgatggaagcgaccggaggccttgaagccgccgtagcctgcgcgcttcaggcagaaggttttgagatcgccgtggttaaccccaggcaagcccgtgactttgcccgggcgatgggatatctggcgaaaactgaccgtattgatgcgcgagtacttgcccagatggctgaagttattaatcgccatccggaacgggagcgctttattcgggctttgccggatgctgagcgtcaggttctctccgcaatggtagtgcgccgacggcagttgctcacaatgctggtagctgaacgtaaccggctgtacccagctcatcctcaaagcagaaaaagcattaatatcatcatcaaagcgctggaagatgaacttgcgcggatcgacaaagatatgaataaccacatccagaacaacttcaaagaactctctgaacggttgagcagtgttaaaggtgttggcaccatgactgctgcggcgctgctggcagaggttcccgagttggggagtctctccagacgtcaaatcagtgcgcttgttggcgtcgccccggtaaaccgggactcgggtacaatgcgagggcgacgaaccatatttggcggaagggctggcgtgcgaaccacactgtacatggctacgcttgtggcaacccgttttaacccggtgataaaggcgttttatacgcgtctggttgccgcaggtaagcccaaaaaagtggccctggttgcctgcatgcgcaaactgctgaccatcctgaatgcgatgctcagaaagaacgaggaatggaatgagttgtaccatcacgttgcttcataa

SEQ ID NO: 385761 - DNA, 657 bp, Salmonella enterica
atgaagcaggacttccgctgtggctgctggcttctggagaagacagaaacggcaatgaaagccatcacccgtaatctcgatcgcagtatatggcgagacctgatgaagaagtcagggatgcttgcaatcatggacgcccaggcccgtgaccagtggtacaacagcctggaaaaggatgatattcccgctgtcagtgaagccaatatcctcagcacctttgagcaactgcatcagagtaaagatgaggtatttgagcgtggggtaatcaatgtatttaaaggattaagttgggattacaaaagcaacagcccttgcaagtttgggaggaaaatcatcgtgacagggctggtgaaatatgaccgttggggatttggtcttaactggggctggcagcgggattgcctagctgatcttgagcgcatgctgatgctgctggacgggaagcccgttcctgataatcgtgccgatgtgacccgacaactggacgatcacattcacgagaacaggggaagtaacagttacgaggatgagatgtttgcaatcaagtactttcagaaggggacggcgcatatcacttttaagcgaccagggctggttgataaaatgaatgatatcgtggcgaagcattatccggggatgttagcgtgcgttaactga

SEQ ID NO: 385762 - DNA, 660 bp, Salmonella enterica
gtgagtaaggtactgcgtcatgtcagcgcttccgtgctggcgcttatcgccggcctgctgcctgtttctcagtctgtggcgggagaaagcagcaccagactgacactgaaaacccggtacacgaaagccacctgcctgttcacccgcaacggggccgacgcaacaggcgtgcaggtggtcaccatgcctgtgattgacacgggtatggtcaacagtatggggaatagtgaatggaccggggaggttgttccgctgaacctcggtatgcgctgcccgcagttgccggaagagagtgtgggtatcgcgctgacggtcacacctgaacatagtgacaccggggcaggagataatgttatcgcctcgaaaaaaacaaccggaaacggtccgggtcctgacctgttgctcgtggataccggcaaccccgccgctaaagtgaccttcagtccggaactggccctgccgggtaaaacatgttcaggggctaaatcagccggaaacggggattgtctccggcttaccggaaatcagcaggattacagaattccgctggggataagggtgttcgttccggctgagggccgcagtagcttcgggcgcagtgaaatgctgacaccgggcacctggtcgtccgtggtgacgctgaatatcagttatcagtag

SEQ ID NO: 385763 - DNA, 2043 bp, Salmonella enterica
gtgcccggcttccggctgcgctacagtaccaacgccagcaaaacacagcagagtcaggccgtgtattacggtaacgttgacctgaatgccaacatcggacgctgggtgctcagtggctcttccagtggattttccgtgcgtggttttgagtcgccccgggctgtggcctccacggtggttgctcccctgcggggcaattttgaactgggtaaaacccggacacgcagtaccctgatgtcagacttcagtttctacggcgcctcgctcacgtcagacagcagcatggtgccctggtcctcccgtggttatgccccggtaatctccggagtggctcacagtaatgcccgtatcacagtttcccaggggagctatacgctcacctcccgggtggttccgcccggtgagtatgccctgaatgatatctccccgattggtaacggtgatttgaccgtcatcgtggaagaagaggacggcactaaaaccgtgcggacatacccggtcaccacattacccactctcttacgtgccggtgatttcaactacaacctttccgtgggtacgcgtaacgatgacagtcaggctaaaggtgtctttgtcgccggcagtctggattacggttttgaacccctcaccctgaatctggccactgtcctgcaccgtcagtatcagggggcgggactcggcatcagtcgcagtatgggggcatggggtgcgctggaagtcagtgcaaacgtctcccgcagcgtttttgacaaccatgaggatgtgtatcgtcttcacagtgagcgctccggcgatgagactccggaggaaaaggcgcttaatgaccgcaatgactggctgtggcacagctatggtcgcggatacgggcgacgggcctcaggtccccagaccggtatcagtgctaccgtgaagtatgccaaaagtcttgccgacaaaaccaacctgcacctgctgacctggcgttataccggggagaaatatgtggatttctccggctttgacccgacgcaggcctggctcagtgagaaccgcaaagagcgttatgaggctgttatcagccagggtatcggtaattcgtggctcaacttctccggctggacgcaaagttaccgcgaccgtgacagcaacgacagcgggctgaatgcgtcatacagtaccagtctgggacgtgcctcgctggggctttatgccggttacagccacaccccgtggacgccgcatgattacagtctctccatgaacgtgagtatcccgttcacggtggccggcaaacagcagtatacctcaacgagcgtgagctggcggccgcacggtgacactcaggtgaacacttccgtgtcgggaaatccgacggacagtctgagttacagcctcggcgccggtggcgcacgcgacagcagcaacctgtctgcctcgctgggatataccatggatgccatgcagacgggattgtccctttcacagtctcattacagtggttccgcctcccggacgtccggctctgtcagcgcctccggtgccgtgatgggcaccacacagagcggcctgttgttcacccgcgaacagagtggcgcggtggcggtggtgaagatacctgatattcccggggtgacgtttaacggctcccgccctaccgggaatagcggcgtgacggccctgtcgctgtcggaatacagccgcaacgacattcgtattaacccggaaaacgtaccggatgatgttgacctgctggacacggtatacagcgtggtgccaacgcgtcaggcgattgtgttccgtgaatttaactacacccatgtgaaccgttatgtactgaaggtcaccggacgtgacggcagaccactgccgcagggcagtacggcggtgacggataacggtctggacgccggatttgtgaccggtaatggcctgttgttgtcgaacctgctggcagagccggcatcactgacgctgaacatgcctgacggcactcagtgccgggtgaacatgagcggggtgaaaccggatgcaggaaaactgaaggaggtgcgctgtgagtaa

SEQ ID NO: 385764 - DNA, 474 bp, Salmonella enterica
atgacgcaggcgcgggttgtagagcagctcggccttaatggcctccaacatggggtaggcctgatcaatagagtccatcacaatgaccgggtagtgcttgataccccggatgatgcaccacaacacaaagagctggcttacgagcgtggacttggcctcaccacgcggggcggcgatggcgtcgttctcaccctccgggcttgccactatctgcggcagccgctcaaacaggtagttgtgaagctggcttcgcgacgcgtggcgaatgtagtgcggaaagtaggtggatacaaagaagtcgtagccgctcgccgtgtcttcggtacagcgcttacgctcagcgcaggctgccggatcaacgtcaaagtcgaggcattcggtctcaatggtctgtcgcagactggcaatatactctgccagttgctgccggaatgcctttctgtcgagctttttagccacgataaacctcgttaa

SEQ ID NO: 385765 - DNA, 174 bp, Salmonella enterica
atgagcgacaaactaaaacgttatcccgataacgacagaagcaacgacaacgacgacgtccgcatcggacacgggcaacaaattattcccgataacgtcgaacctcttcattcccggtttattccttctccttatgatgatgacgataagggggaggaaaaactcaacaagtaa

SEQ ID NO: 385766 - DNA, 468 bp, Salmonella enterica
atgccatccaacaaagagatattctggctgcactacaactactacatggaagtcatgatcgaaatcttcacccgccgctgtaataataccttgttgtttttacagtttttcctgggtggggcctcgtttgcaaatagctcttatggatggctcattggtacactcattggtttttgtgccgccgttcagtacacatggaatcctggcaaagtatcatccgatgcaaggcaacaaagcctgcgatataaaaaggtgtgtgacattgtggacaccctgacaactgaagaactggtaaaaaaacttcaaaagttagagcaaaccgacagcacaccactaaactccctgaataaacctgcctatcagcgggcatgtattagcctcggccgtagtgaacaaattaaacttacactcgtcgagaaaataatatcctgtattgctggcggtactcccggtcttggaatgcgctaa

SEQ ID NO: 385767 - DNA, 474 bp, Salmonella enterica
atgagcaaaattacgttaactgccgcaatgatccagtcgctggcagcgtttgcggcgaaagatggtcaggcggcttacaccctggcacacggtcatattccggcgtttgatgagttccccggatactcagggcttatcgcgtattctgtgtctgatgatggtggcgttctggcgctcgaagatgttaaccagaaagacggcgcaagctccacaaactttctcggtgctgcaactaccgggaatcagtcagtcggccgcacccgcgaagaacttgcggcgtataacctttatctcgctgaaaataatccggttgatatattgagccgaaaaatcgttgatgcaatcaaacaggaaataccggcagaagttttaggtattaataatttcagtgaggccatgtgggtagcgatgcagatgatatgcggcccacaaggagccgcgatgacaatcagtcggtgtcagattgccaattag

SEQ ID NO: 385768 - DNA, 216 bp, Salmonella enterica
atgagtttgggtaaaaccgatgacctgtggccggtgctgtgcatgttgcgcggtgcggtcagtgaagaatctgaaccggtgcagatgatggtgaaggagtccgaagagaaaacgaaggcgtttattgcacaactggacgctgattacccggacgggcgtgggttatttggtggcctgcttgccgtcattgaccaccttgtgaagaacgggctttaa

SEQ ID NO: 385769 - DNA, 501 bp, Salmonella enterica
atggcctattcaaaagacgatcgcgcccggtttcgccgcgcctacatattcagtcagttgtcgcttgaactgacggcggcgcagttcgggatcagttcgccaaccgccctgcgctggaagcgcgacgcgcagaagaacggcgacgactgggacaagctacgcgcggctaatgctcttgccggtggcgggatggaagaagctggccgcgcggtgctgatggcgctggttgtccagtgtcaggcgacgatggaaaagattaattctgacccggatttaaccgccgcaaaacgggttgatatgctggcgagtctgtcggatgcgtttaacaaatcggtcgcggccagcaagaaaatactgccggagaccgacaaactggcgatagcgattagcgtgctgcatctgttcggtgagcacattaaccagaagtacccgaagttgcgcgcggagttcgtcgaggtactggagacctttcagggggttgttgaagatgagtttgggtaa

SEQ ID NO: 385770 - DNA, 258 bp, Salmonella enterica
gtgaagcaacgaaaaaaaattaagcgccagcgccgcagctacgtcgtgcagtcgcaggccccggcggttaatgaagacctgctcaaagggatcagtattgagctgacgcacctcagcctgcagatggcggccgtgcaggatgcggcaaaagaatctgccattaagcgcggtgcggtgtccggtgcggtatccggggctattgccggtgcggtagtggcaacggccattgcgctgatacgtacccgcatggggttgtaa

SEQ ID NO: 385771 - DNA, 993 bp, Salmonella enterica
atgatacgccggagtctgtcatcccgtctgaagccggttgcgctggtcctgatgctggtcaccggctctcctgctgtggctgatgcggcagtgaacactgccaccctgattgccggcagcgcctcgccctcgtgtatcagctggcgggtgaagggcatttgctactggctgttctgcacgccctttggctgcacggtaaaaacgtcggtgaaggtggagcactttattccggaagccgtgatttccgtttatcaggataagggagaaaacccctggactgagatgaagacggtcagcagtgtgtcgggcggaattgagaacgccgtcagttcaggcctggccgggctgagtgccggaggcggacagtccacggcaaaacggccgcagggcagtgagagtctgctgagcacccgcttcaaatatgcagatgccatcggtcatcctgccacctcacttatcggcggacagataccggggtattcctgcaaaagtgccgccatcccgctggttccctatttcctgagtactctggacagcctggtctggcgcacgggcctgccggaagccctgtatccggaggcgctgatacccggtaagcgtgaaatcggcagtacggccggcaggaacatgtggggcaatgtttatccgcgcagtggttttgtcacccagcaggatgactataaggccggtgcggttattgcccagcgggtggccgatatcatcacccgcagtggacaggtgcatgtttaccagccgctgaggggccaccggcgcccgggttactggccaccggacccggtcacggaaaataccggcacaaaaaaccacaaatggcagcgtctggcacctgcggcatcacagtcctgtgcggtgtttcctgatacgggcggaaaggtggcagaagacggcaactacgcctggacgctgtggcagccgtacagctgttgcaaaccacgcggacagacattcctttacagcaccgatttcagctga

SEQ ID NO: 385772 - DNA, 423 bp, Salmonella enterica
gtgtcctgtaatctgattattcccccgttgttactgagcgtgttgttgctgtccctgtctgcccgggcgggaatggtggtgtacaccgaccatgcccacccgccatccggggggaccggtgatacccgcgtggtctggctggatgcacctgaacaattactgcagtcgctgtttggcactctgacgtcagaccccggagaagcagaacgccgggcgcaggcggtgctccactctgccggctgggaaaagaaacagactgaactggctcaggcttaccaggggctgctgcaggcgtggtcgctggggctgcaaaaatatccggccgtggtgtctgacgaccggtacgtggtttatggcactgccgatgtggtggtggccgaaggactgttccacagtcacaggacgcgggaggggcagcgatga

SEQ ID NO: 385773 - DNA, 198 bp, Salmonella enterica
gtgcactgggtactggatgtgacgtttaacgaagatgacagccgcatcagggccggagacggagcggaaaatgtggctgtaataaggaggttcgcgctgaatctggcgaggctacatcctctaaaggacagcatgcgcagcaagctaaaacaggctggctggagcgataagttcaggagcgaaattatctttggttaa

SEQ ID NO: 385774 - DNA, 774 bp, Salmonella enterica
atgaatatgtacaacaaaactgctctgtggctgtcactgccggcgctgctgttgctgacagtaccctttgtaacgctaatcagcgttactcactgggggcatttacggctggcttggggagataaggatgccattgtaacctcccttggattaggcgcgttttcgctgttgttgattgttttcagcggattacccgtcgcttggtggttatcacagtcagcgggacgtataaagctgttaactgaattgcttgtaatgatcccactgcttacccctcctctggcgatgggcattttactggtaagcgcctatggtccttacagcctgccgggcgagatactgggtaagtttggctggacgctggttaataatcctgctgcatttattatggcccagtggtatggcgcattaccttattttattatcaccgcacgttcagcttttgcaacgatacccaaagatatcctggaagccggttgtacactgggagcatcgccatggcaacggttctggcgattatctgtaccgctggcgggacccgggctggcttccgcgaccgcattagcctgggtacgcgagacaggtgagtttggtatcgtaatgatatttgcctacttccctcagggaatgccggtacaactgtataacaatctgcagaacgatggtgtggatgccgtgtatgtactgttgtggctgttgttgttgtttactctgcctgttccgttattgtgcttttcagtctcccgccggatacgtcatggcagggggacttaa

SEQ ID NO: 385775 - DNA, 810 bp, Salmonella enterica
atggatcaggctttaggtcctgcttttgccggacaacagggcggtaaatatgaaggacagggtcagggctcatacggtatggcgcgactgctggcaggtaagaaaataacggctgatgtgtttgtttccatcacaccaggtccgatgcaaatcctgaaagatgccggtttgattgataacgcagttccggttgccagtaccagtatggtgatagcatacagtcctgaaagcaaatttgcgcatcagttttcgcaatccagaggcagcaatgcagactggttaaaagttctggcatcaccggggctgaaatttggtcgtaccgatccgctcaatgacccgaaaggccagaacatcatctttaccctgttactggcagaaaaatattacagggaaccgggtatctcttctgaaattcttggcgggtatcagaaccctgcccagacacatcttgaagggggccttctggctcgtcttgaaagtgggcaggtggatgctgctgccggttatgaaagtgaagtcatttcagctcatcttccgtatgtggcgttgccggatgaaattaacctgagcaatccggtcatggcaaaacagtggtatgacacggtaagtttcagtgtgaaagacagtgaaggaaaagagaaagtccttcatcctcagccactggtatactatgctgccgtactgaaaaatgctccgcatggaaccaccgccggtaaaacttttattgatttcatgctgggtaagacagggcaggccctgtttaaacagaatggttatgcccagccgaaaggtgatgcgctctataagtaa

SEQ ID NO: 385776 - DNA, 381 bp, Salmonella enterica
atgcaatcgctgtacgactggatacaacagcagatgaacacgctgtcgcgacactcagataccgcgaaggcactcgcttatatgctgaagcagtgggatgctctgaatgagtactgccgcaatggctgggtggagatcgacaataacttgtgtgaaaacgccctccgggtggttgcgctggggcggcgtaactacatgttcttcggctctgatggtggtggcgacagtgcagcagtgatgtacagcctgatcggaagttgcaaactcaacggcatcgagccggaaacctggctgcgttacgtcatcagcgtcatcaacacatggcctgccaaccgtgtgaaagagctgctaccctggaacgtcactctctctgtaaactaa

SEQ ID NO: 385777 - DNA, 1605 bp, Salmonella enterica
atgaaaaaccgtgaatatctgtgccggagtataatacccggtatggatatctcgcttctctcgactactactgacatcgaacagcttcgcgctatggcctttgccatggtgcagaaagtggtgactgagaaaaacgccgagctgacagcaaaagatcagcgtatccgtctgctggaagagatgctgctactggcgcgccagcaacgcttcgggcgcaaaaccgaaatgctgtccggcctgcagcgtcagctcttcgaagaagataccgaagctgatatcgccgccgcagaaacgcaactgaatgcgttgttgcaacaggatataaatgaagcagaaaaaccatcagcttcccaccctgtgcgaaaagcgctgccatcgcaacttccgcgagtcaaaaaacatatccctccggcgtcagatacctgcaccgactgcggcgtgacgctccgcttcatccgcgacgagatcagcgaaaagctggagtacattccggcacgtttcgtggtcaatcagtacgttcgtcctcagtatggatgcccctgctgtgaaaaggtgttcagcagtcagatgccggcacaactcatcccgaaaagtatcgcggaggccagccttgttgcacaggtggtggtcagcaagtaccgtgactaccagcccctgtaccgccagcagcatatcttcgcccgtgcagacgttgagttacctgtcagtacgatggcgggctgggtgggtgctgccggcgtggcactgaacccgctggcggaactgttgcaccgggaactactgacccgcagtgtgctgcatgccgatgaaaccaccatgcgtatcctggatacccgtaaaggtggtaaaacgcgttcgggttatctgtgggcctacgccagcggtgaaaaaagtggcccggcgatcgtctgcttcgacagccagacggggcgtggacatgaacatccggcagcctggcttcagggctggagtggctcgctggttgctgatggttatataacctatgaaacactggcaaaacacgacccagggatcacgctggctggatgttgggcccacgcccggcgtggcttcgccgatctgtataaagcgaataaagatccgcgtgcagcgatggcggtcaggcagatcgccgggctgtacaggctggagaagaagatcaggcatcgcccggcagaaaagatccgccagtggcgacaacgttactcccggcccattgtcgacaaactgtggttgtggctggagcagcaaaaagatgcgtgtccggaaagctccgcgctgggtaaggccataaactacatactgaagcgacgtgaaacgctcagccgcttccttgatgatggttcgctgccgcttgacaacaatcgctgcgagcgagccatcagaccggtggtgatgggccgctcaaattggttgttcgcgggttcactggcggcaggaactcgtgcggcgcagatcatgagcctgctggaaacagcgaaaatgaacggactagagccgcatgcgtggctgactgacgtgctgacgcgtctgccctcctggccggaagagcggttgcatgagttactgccgttcccggagtaccgcttcgccactcctgagtga

SEQ ID NO: 385778 - DNA, 372 bp, Salmonella enterica
atgctgacgcctgagaacgttttcctcgcggtcaaaccggtggatatgcgacgcgggatcgatacgctgacccggtatgtccaggacgagcttaaatcctcgtggcacgaaggtgctgccttcgtcttcaccaacaaggcccgctcgcgcattaaggtgctgcgctgggacaaacacggtatctggctgtgcgttcgccgtctgcacaaaggacacttccgctggcctcgtgcgggcgacaacgcatggtctctcactcaggatgagttcaactggttgatcactggcgttgactggcagcagctcaacggccacgacctgacaaaatgggtcttccgcgaggagagtagttccgcggtcacctcgttgtaa

SEQ ID NO: 385779 - DNA, 330 bp, Salmonella enterica
atgcagaaacgaaaactctatacgcttgaagaaaaaagacagcatgtggccagctggcgtgccagcggcctcacccgtcagcagtactgcgaattacatgacatcaaattttccaccttccgggaatggccgcaggataccaaagctgaacgcagggggaatgactccgggctgatacccgtacatattgccactgcgcagcccgtcgttccggctcctccggtcgtcaacgaccccgtcatgttgtttttgccaggcggcatccgtatgagttgtcacgcaacccagctcaccgatgtttttcgggcgctcaaacatgctgacgcctga

SEQ ID NO: 385780 - DNA, 1761 bp, Salmonella enterica
atggtggtgcaggaagcgtccgggttgaccgacaagcagaagcagatcgccagcgctcgttgcctgctttgccaggaggtggacaagctgcgcgagttcgccgggatgggccgcaatgctgccgttgctgttatcgctgatggttctaaagatggctcattgcctgagcgtgtggcgaatgcctgcatgattgccaatgcccgcaaggggaagcggtctggtgtgagtcgcagctctttgcaggagtggtattcgatctacttgctgaccgttaccgacactgaaaagcgtctggtgatgctggcccccggtcatcataaagagacgccgccggaggatataagctggttgttgccgttcctggcccactggcgggatccaaacggccccacaatggcctactgctatcgcaagtttgccaaagagtgggatgaggtctatcacgaccagcccgccatgcaggcggttaagccgtcctatgatgtggttcgtcgggtgatgaataagttacccaggcgcgagcgtatgcgtgggcgtgtgagtggcgcggtggcgcgttcactggaaacttacagccgccgtgactggtcacaaatgcccgtcaacgggtgctggatatgtgatggtaagtcgctcaacatgaaggttcgccaccccgtcagtcgctcaccgttcacgccggagctgacgctgattattgacggccgttcgcgctttgtggtcgggttcagtctgtcctattcggagaaccagcgcggtgtgtctgaggcataccgctacgccatcgcgaaatacggcaaaccgttattcgtctataccgataacgggccggggcagaaaaacaagaggtttgatgctgatattaccgggatattcccccgcgcgggtatcacacatatgacgggtattcccggtaatccgcaggcgcgcgggattatcgaacggcttaacggggttattccctaccgtctggcgcagcggttcgccacctataacgggcgcggcgcagaccaggacaggcttaaactgttcagccgggtactggactccgccgacaatgccgcgaagcagtttaagccgctggataagcgacagcgtgcggtgctcgatcaggttcctgagtgggacgatgtgatccaggcgattcaggaggaagtagacgactacaacgaacatcacgagcatagcgcgttgccaaagttccaggggaaatatctgtcgcccgccgtctatcgtgaggccgttctggccgtcgagggtgacgaaatagaatatctgaccgagattgaattacgtgaaatgtttatgcccgaagaaatacgcactgtcgatcgcgggtatattgaattacggacaaatatttatttcgcaggtgcgttaataaattacgatggcgaaaaggttcgcgtggcttatgacacgcgcaacgccgaagaaatcattatcagaaaaatggatggtgtattcatctgtaaagcgatatggaacggtaatgtcagtgtggccgttcccgtcagtgatatggatcgggcgcaggaagagcgccgccagcgtgcgcataagcgggttagcaagaaggcccgcgagattgaagcgcaggctaacccggcacttgagcataagcctgactttaactttggcttcctctcgcagcagatggaacagcagaaagtcgggcatgacaatgccgatgatggatatgatttctttgaatctgaacgtgaacagaaattaaaaaagaacggtacatataaccattaa

SEQ ID NO: 385781 - DNA, 540 bp, Salmonella enterica
atgcagacggcgaatcacctcaagcgcacggtagggcagcagctcggcctcgtcgataaccagcagacggccggaatctttgagcttctcaacgcacacctcaatcagcgcgtgaatgttgccgttcttattcagacgcagacggccgcaaagttcctcaagcaacgtgcgcgcggtaaagccggggtcggcctcaatgaagatcacattactgtcacggcgggcgtactccttgaggatcatcgttttgccaagacccgccgcgccatacagcacacagatttcactttcaagatgggcgtaagacagcacctcaagccctttactggcggtaggggtggagacgaaccgctcatcaatacgcagggcgttttgcttctcgcgaacccgacgcaggaaatgaccaatacgctcttccatatcggcgatatcgccgttgtatttgccctgtacatattgattcatggtggcgctgctgcggccaatggcacgggcaacctgtccctgcgaatagccgtgcgtatccattacgtcttttaa

SEQ ID NO: 385782 - DNA, 687 bp, Salmonella enterica
atgaataaccagaaagataaaaagaaagtggtgtttatttgtggcccgatgaccgggtatgaaaattataatcgcgatgcttttatgcgaaaagaaaaggagttaatcgcccgtggcgcgactgtcctcagtcctgccatgttgcctgatggtctggagcacgagcagtacctgaccatcacgcgcgggatgattcgggtgtctgatgccgtttacctgctgccgggctgggaaaacagcgaaggtgcaaagcaggaggtgttgtacgcgataaggcgcaatatctggccgttggggtttgatggtgctgtgcgggagaagctaaaagaagtgctgtgggacgtgtttactgccggtggctatgcctggcgttctgccctctctaaccccatgcggccagcagagaaaggcgcggacgagttccgggttcctcatggtttccgctgccgcacggcttcggtgaaggacgcagagccgcagcgtgcaacagagtatgccctgctgccccgtaagggtgtgcttgatgttgctgaaaaactcacctggatttccggggtgctggaaggcgtgcaggcccgctttgcactgctgccgttaaagctcgacgagctgggcgaggcaaaggccgcaactgatgaagcgtacaacgcgctttgccaggtgctggctgatgaggtgatggaatga

SEQ ID NO: 385783 - DNA, 198 bp, Salmonella enterica
atgaaaataatggcttatatgagtgttctgatggtgctcactcctgcatttaccctgtgtgtcatatcgtttgcgatgtggcgtaacgcctttcgttatgtggggtatacgtacgttttcagaacatcccttgtccttctgattatgttgtgggcggggtatgccgcagcctgggcttttgtgaggtgggtgctatga

SEQ ID NO: 385784 - DNA, 342 bp, Salmonella enterica
atgaagcgtatcgatatacatgttgaaggtctgagtgttgaagctcgcaacaacctcgccatgagtgtttacgcggcgcttgcgggtgctggtagtcgtgctgttcggaatctcgctgtggggtttgtgctggcgttcgtgctggtctgggctgtgtcgtgggtgttgtttgaggcgggcgtgacccgcgattcgaccgatggtgacagtccgtcaaatctgcgtctgtacactgacgccctgaccggttgtcagtatctgggtaatggtaacggcctgacgccccgtatggatgcgcaggggtatcaggtatgcggggataaatctggagataaattatga

SEQ ID NO: 385785 - DNA, 432 bp, Salmonella enterica
atgagcagtattacccaaattgcagattctatctacgattctgtagtgaacaatcattcatcgacgtcactcatcactaacgccgatattctggtattgatacaggactggcgggctatgcgtaaatatattgcagagctgcaggcccagcccgttaataaagccgtcaatgatgtcctggcagaacggcagcggcagattgatgttaagggctggacgcctgagcatgatgacacttacacctgcggcgagctggctgcggcggccatcagctatatcgagcctgcggaggctgaaaattactggcctgttgactggcacgatggcagtttcaggccatcggatgagcggcgcaatattgttaaagcgacagccctgctacttgctgaactcgagcggctcgatcgtctgtctcagcgcaaccagaaataa

SEQ ID NO: 385786 - DNA, 549 bp, Salmonella enterica
atgaaccttaaacctatgggaacgccgggagtatgccccgcgcatctccgcgagtggacgtctgaacacgatgagtttttagtaaaaaactacagcgttatggggattgctgatattgccgctgtgcttaatcggactgcctcagcggttgaatacagggccaggagcttacgtagtaaaggcattcctgttccgtacagaaataaaaataagccgctcactctaaaagagaaacgttttattcgtgataaccgctacacaatgacagcacctcaaatggcggcacgtcttaacaggcacgaagtaacaataagaagaacagcaagaaaaataagggtaagtctgagaaagttaggtgattacaatccctgcactcgctacaaggatgaagatgttcggctcattcgcgatttgcgggacgacgagaaccccatgacataccgtgaaatcagcgtgaaattcgaaatatccagacgcaccgccgagcgcctttatcatcgccgctacactgcggatgacctcattgtgcgggagtatctcccacgatga

SEQ ID NO: 385787 - DNA, 192 bp, Salmonella enterica
gtggccgcgcagcagaccatcgagaaccccacccataccgtgacccatgacggcatgacctggtacgcccgccaggcggataacgtctggcaggtagccggggtgcgtgagcgtcttctgagtgtgcttaaacagggcgatagcctggattcgttactgccggagggcgtaaatgtaccggataaccattga

SEQ ID NO: 385788 - DNA, 552 bp, Salmonella enterica
atgtaccggataaccattgatacctcagcctttgaaacggtgtttaaacgtcttttaaatggccttgaagaccgtcgcgacctgatgaaatcgcttgcagccgacatgcatgacgcggtggaagagaactttgccgaacagggccgcccggcgtggcaggcgtggagtaaaccctatgcccggcaggcggcaaagcgaggccaggaaaagatactccagcgtaagggacgactggcggccagcattcacgaagcctcagacaacgactccgccaccgtcggcactaacgttaaatacgcggctatccaccagtacggcggcaccatcaccatgcccgcccgcagtcagcaggcgtattacaaaaagtacaaggacgggcgcgtcggtcatcgctttgttaaaaagtcacaaagcaatgtcagccagtggcacacgctgccggagtatcacatcaccattcccgcgcgcccctttctggcgctcgacgacagtgacgttcgtcagatgggtgacacgctggaaaactacctgcgcaccctcacggatgactga

SEQ ID NO: 385789 - DNA, 1164 bp, Salmonella enterica
atgaaaacatgtatcgccgccttatccatttctcttacagcagaagccaccccggccacgcgggtacgtattttcccggccggggagtttcgcagtaacgacggccgcccgaaggaatgcccgtcgtgggtgatgaacgccgcctgcgcgcagcgcctgatagcgaccgccgccagtaagaaggtggattacagctttgattacgagcaccagaccctgcgggctgtcaccaacggcaagcccgccccggcgtctgcctggtttaaatcactggaatgggtcgagggcgacggcctgtatgccgtggatgttgactggacggcagcggcctcgcagatgattgcggcccgcgagtaccgttatctctcgcccatgtttgattaccaccccgtcaccggggaggtcgggcagcttattaatgtggcgctgaccaacttaccggccctggaagaactcgacgagggggtcattgccgccgcgtcccgtctggcggccacatcatcaaccttcccggagagtacctctatggatgaagaacagattgcgtacctgctttcgcagttgcgctggatcctgaacctgcccgaaacctcgacggcggcagatatcaaaaccgagcttgagaaaatcatcaccgccatttccggcgggaaggagctggcagcgacgaacgtcgatcttctggcgctgattaacgcaggcaccgacaaggacgcccgcatcgcggagcaggcggcgcagattgccgacctgtcgcagcgggtctacgacccggcgaagttcgtgccggtcgccgcgctctcgcaggtgcaggagcagtacgcgcagaccatcacggaatccggcagccaggaagtggagcagcttatcacggcggccctgtctgaccgccgtctgctgcccggcgaactggagacgtgggcgcgggatttagggcagaaagacccgtccgccctgaaggcgtatctggagaaggccccgccgatggcggcgcttaaccggatgcagacgcaggaagcgtcaggcacaaccagtggcgcaccacgcagcgcagatccacgcaatgagggtaaaaaccccgccgcgctggatccggttctggtggcgctttctcagcagtttggtcatgacccggccgaaatagcccggctgatggaggagtaa

SEQ ID NO: 385790 - DNA, 399 bp, Salmonella enterica
atggacagaaacacggcccgtaacgacggcaaacagttcgccgtcccgatggcagccggggcggttattggcggcggccttctggtcgtcattgatgagcagggactggcgcacgagggacagattaagactggctggcgcgttatcggcctcagcgatgaggcggcggataacagcgcaggtaaggatggcgaggcaagcgtaatggtgcgccgctgcgaggcgttttatttcgacaacgacaccgcgaacccggtaacccaggtagcagtcggcagggcctgttacctgaaaaacgcgtacaccgtgtctgccagcgcaccggcggaaggttcggccattgtcggtcgcgtactgaccgtttccccggacgatggcgtccaggttctgattgagtaa

SEQ ID NO: 385791 - DNA, 573 bp, Salmonella enterica
ttgcagtatatacattcacacattctgcgccatttccgggcgcgttaccctgcaatccgttacaccctggtgccggttgtactgaccggactgctgaccacctctgcaatggcggccctgacggtggtggcagacctcgggggcgagtccacggcgccgctgtttgatgccgtgaacaatgaaacaaatgaattcacgccgccgcgccccctgacgccgccgtcgttttcagcatctcccgtgacggtggatgagatgctgccggtgagcacgccggagatgacgcccgggcgtgtggaaaaccgcaggtctgaacttaccggtatgacgccggtgtttctggtcggagacgacgcgctttcacgcagatggctggaacaacgccggggagacctgcagcaactgcatgcgacggggcttgtggtgaacgttactgatggtacagccctgcggggcctgcagacgctggccccggggctgacgctgttgccggcgtcagccagtgatattgcccgacggctgggcctggcacattacccggtgctgattaccgccgacggtctgtcgcagtga

SEQ ID NO: 385792 - DNA, 582 bp, Salmonella enterica
atgctgcaggccctgtttcttctgtttctgtctgtcgcggccctggtcattgccggcgggttccgccggacgcccggtgcctgcgcccgccgtcaccaccgctaccggcagacggcgggacgggtactggcccggttgccacaactggcctccgacggcgcgcggctgaactacctgcgcagaatcaacccgtatgtctttgaagagctgctgttgctggcgctggaaaaccagggcctgacggtgcgccgtaatccgtcctacagcggcgatggcggactggacgggcaggtgtttatttccggagagcggtggctgattcaggccaaacgttacagccggagcatttcaccacgacacatccgggactttggcgaactgctttcccgggagggctgctgcggattttttattcataccgggcgaacggggcgtaaaagtcgagacagcctgcaggtacacccgaaggttcatctggtcagcggacaacggctgctgaatctgctggccgggcgaccgggctggtgccagtcgccacaggtgctggctgaacacactttcaggaggatgtcatcagaatga

SEQ ID NO: 385793 - DNA, 1158 bp, Salmonella enterica
atgaacaatgccataactcagccggaagacaatccggtgcagccgcaggatgcgataagcggtaatgacgggaagtcttcgttacgtcagggtagcgacggttgtgctgagcgccgcagacgaaccattgagcggctgcgtgaagatgcagcgaggccggaaaataatcaggcggaccccgccggtgtggtgaaacgggtgacaggccagcaggctgaagccggatttcagacccgcaaaattttgggacgcactctgaaaggacggcacgttaaccgcctggtggcactgtggaaaagacagggtgtttctgacaccactataaaaaaccgccttgcgatcgtgcgatggtggacgggaaataccggggagccaggggttgtgaaaacgaaggaagagtacggctccggactgtacagcccggtcacagtcacgggtgatgaatattttctgaaacagatggatgcgggtctgccgccgtgggcagaggacattccggatatgcaaccacagccagtccccgacagggagagttcaccctttgtgacccagatactgcgggaggaggggatgtccgtctgcctggacagggtgacggggcatgacgacctgcgattccgggggatgagctggcgcgaactgctggagcacacgcaggccgggaacgctgtcctgcaaccggatagggttatctgtgtgtcggagaacggcgtggactggacggtcacgcaggggctgctcagcgtatgccgggcgcgctttcagtgtgaccgggaaaaccgcctgccggtgctcagtaatgtccatctcaccacgctgacggtggatacggtgatgaaggaggcatgcccggagctgacgcgttcgctgagtgacccgtcatttccggtctgcggaacaataatcgcctttcgtaattacaccggcatacaggatggtccgggctggcggcgcatttcgtaccagcctgtgctgagcgttcagctttatggagacaccacagggcggctgccggagaacgtgacctgccagcatgtgcaggatgtttaccgcctgctgtctgcgctgagcgacgcggaaagggagatccgaatccgtaataagaccacgtcattgcgttcctggtggcgccggtttgccgggaggatacagggatga

SEQ ID NO: 385794 - DNA, 558 bp, Salmonella enterica
atggcaaaaattggctatatccgcgtatcaacaaatgaccagaacacagatttacagcgagatgcgctcattcgagcagaatgtgaacagatatttgacgataagatgagcggcacaaaagccaacagacctggtttaaaacgtgctttaaagcaccttcaaaccggcgatacgctcgtagtctggaaactggacagattaggccgcagcgttaaaaatcttgtcgcgcttatctcagaactgcacgagcgcggcgtccactttcaaagtctcaccgacagtatcgacaccagcacctcgatgggccgcttctttttccacatcatgagcgccctggctgagatggagcgcgaactcatagtagaacgaacaaacgccggtctcgcggctgcacgcgcgcaggggcgcatcggtggccgacgtccggcactgtccccggatcagatagcccagataaaccgactcgttaaaaacggccactcacgaagacagctcgccattatctacgatgtatcgctatccacgatctacaaattcacccccgttaaccacttctga

SEQ ID NO: 385795 - DNA, 240 bp, Salmonella enterica
atgccacgtaatgaaagtactcagatcacgattggtaatgactggacgcaagtcacggatggcagtgctgatgaagtcatccagttttatactgtcgtggatatttgtcgcagcccacaaaagcccgccaatgaggctgctgcgcttcgttttaatactggattactgacattcacagccccggacactgtctggatcagaaccgtgtatgaaaaagagtcgattctgactttttattga

SEQ ID NO: 385796 - DNA, 1023 bp, Salmonella enterica
atgataatttctggattaacgactttccgtacccgcgaagatgccggagcatcacagaaaacccatatcccggccatgaccatagtaggctacaacggcagacgtggtgatggttcccttcagtctcagggctggacggagatttcaggtggtgtattcacgccagaacctcagtcagacgggaacggaggttactatctcaatattaagaagagcggagcctccccatgggaactgaagcagacggcatcaattcacccggaagacctgattattcagggtgggcgtctgttctgtcgctttcgtctgaccggaactgtcgcagagggacgttacgcctttgccttctacgtgaagaccaccccggcagcgctccctgctggcgtgacgctggccagtgacggctcggctaatatgaaccccatgctgatgaattttgccgttattaccaaaggcggcaatatctcgctatgccagcaccgtggcaataactccggcattatggttgaagtcgcgaactggggtaaatttgataatgactggcacacgttagaactgatttatccgggcaataacaacgtgatggtaacgccggtgctggatggcgttgacgcctccccggtcagtctgtcctggtcagcggcaattgtaccgaaagatacgatttacttaacgggtatcacaagcggcacggtatatacagttgacgtagcaggctttgaaggacagatttaccgcgatagtggagagtacaccctgaccccggcagataatggcagcagctactttttcccggcaggctaccataaaggaaaaatcaacattcccgatgcgccatttccgcagggatttagcgtgacgatatcggcgcagaacgccagtgtgacagtccacccggacagtaacgcggtactgttacagccaaaaggcagcagtgaagcctgtccggttgatgcgaccattaataccgacgtcagactcatccagtcaggtgcggacggtaaaacatgggtggttgcgtaa

SEQ ID NO: 385797 - DNA, 378 bp, Salmonella enterica
atgagcaagttcacaacgcccgcaatccttgaaatgctcgatcactatctttggcgtgtgcatgaaccctttgagttttacctcagcgacgacaacagcgacgtaatcagcgtgccgtctggattcgttaccgaccttgcgaccgtcccccgcattttctggatgttgctaccgccagacggcaaatacgccaaagctgccatcattcacgattacatgtatgacaatgctctacgtacaaagaaagaagccgacaaaattttcctcgacgggatgacagtgcttggcgtgccgaaatggaagcggacagtgatgtattgggcagtgaggttgtttggaaggggaatgtacgagaaaggacggaattactgtaattaa

SEQ ID NO: 385798 - DNA, 1284 bp, Salmonella enterica
gtgttttgtttgaatggtcatggtgaatatgaggtcgctaatattattagcacaagccgtgctcgcgggtatattcgaacggtgaatgcggtggaaagcgagtcagttgaaaaaatcgttcgccaaatcaaactaaaaaacccggctcttgattatattgagattattcagacctccggcagcgaggtgttcaacattcccgagagccatattatcccggaaagaaaagtcactgcggacgcgattgcattcttgttgttatcgggcggaaccaccggtgtgcctaaattgatcccgcgcacacatgatgattacctctattcggtgcgcgaaagcgccagaatctgtggactggatgaagcgtcccggttattgctggtgctgccagttgcgcataattttcccatgagttcgcccggctttcttggcggattctttgccggttcaaccgtttatttagctgataccgccagcccggagatctgtttcccgctgatcgaaaaatataaaattagccaggtgtcattagtcccgtcgctggtgcagctgtggtccggttcggcgctgtttgaagcgtttgatttaaccagcctgagtgttgtgcaagtaggtggtgccagactcctgcccgacattgcgaaaaaatttatcgaaaaattcaatatcgttttacagcaggtgtatggcatggccgaaggattggttaactatacccgccttgatgatgatatagaaaccattgtggcgacccaggggcggaaaatatcagaagatgacgatattgtgatcgtcaatgaagaaggaacttctctggggcggggcgagaccgggcaaataattacccgggggccttatacaataaactgctattataatctgcctgccgtcaacaaaatttcctttaccgatgatggatattataaaaccggcgatgttggctatattgacgctaatggcaatatagtggtgacgggccggttaaaagaaattatcaataaaggtggcgagaaaatatcccccggtgaaatcgaatctttgttaattgaccatccacggattaaagatgtctcggttattggcatacctgataaaattctgggggagaaaattctggtgtatgcgattaccgttagcaatgcgccgttaacgcttccggaggtgcggaaatatttactggataaacaggtagcatggcataagttgccagataagcttgctgtagtcacttcatttgaatatacattggtcggcaagattaataaaaaaacaaaagtgcagagatag

SEQ ID NO: 385799 - DNA, 252 bp, Salmonella enterica
atgccgaggactgccgctgtagtccaccaccgtcagatttacttcgccgtgctccgcaaggtactgggtaaacgtcgtttgatcgataacggtacgcaacgcgggatgcctgctcaccatgtcatgcagacattcggtgaagatatcaatgttaatatctccgcgaaattctctaaagtcgtgcatcgccacgccgcccaaaggcaggtagttcattctcccgacgatataggcaacctgcattttatttaa

SEQ ID NO: 385800 - DNA, 756 bp, Salmonella enterica
gtgagcaatatccaccaccttgaacgcagcctgcgtaaactgcgcctgacacgggttggcgcggaatggcatgcgctggaaaaacgcgcgctggcggaaggctggaccccgtcgcgttatctgctgacgttatgcaatgaagagctgctgtggcgcgagagcgaaaagctgcgtcgctataaaaaggaggcgcggttgccggtggccaaaacgctgagcgaatacgacttcagccaggtaccggaactgaacggcgctcagttccggcagctctgtgaaacgacagactgggttgatgcgggtgaaaacgtcctgctgttcggtgccagcgggctgggaaaaagccatctggcggcagcgatcgtggatggcgttgtagcccagggctaccgggcccggttctacagcgccggagagttgctgcaggagctgcgcaaagccagagcgcagttgaaactgaatgaactgttactgaaactggatcgctaccgggtgatagtggtggatgaccttggttatgtcaaacgcgacaacgctgaaaccggtgtgttgttcgagttaatcgcccatcgctatgaacgcgggagcctggtgatcacgagtaaccatccgttcagcacgtggggcagcatcttcgtggatgagacgatggcggttgccgctgcagatcggttgatccatcacggatatatgttcgaactgaagggagaaagttacaggaaaaagacagcgaaggcagtaaccagcgcggcttaa

SEQ ID NO: 385801 - DNA, 492 bp, Salmonella enterica
atgaaattgtgcctgaacctcgaagccgaccgtatcaacgttctggcactgaacatgggaagaattgccgtggaagtggatgacattgagctcgctgaactgattgatgtggtctgtgataacggttattcacttcgtgttgtcgacgagtctgataaacaggccgctgaatccacactgccactgtttacctccctgtcagggatgtgctgcagtaccgcgcatatcaccggtgaggataacgctatcctggaccaggcctcacttcagcagcacgacggcggtgacagtgactggatactgtataccggctacggatttttgctccggctcaatgcccgccggtaccccgtgctggcgctgaaacggatgggaatgtcgaaagcctgtcgacggttagtggtgacgctgatacgccgttatgccattggtattctccacctggatgctttcggcgaactcctgcccggttttgaaatcttcgactggtaa

SEQ ID NO: 385802 - DNA, 381 bp, Salmonella enterica
atgcaaattttaccctcactccggcacggagcggcatcgtcacatccgtcacccgttgccgtatggcagaccctgctgtcgcatctgctgaaccagcactatggcctgacgctgaacgacaccccgtttggtaacgacagcgtcattgagcagcatatcgacgccggcatttccctgtgcgatgcgctgaactttatcgttgaaaaatatgacctggtccggaccgaccggccagggttcagtatcacagtgcagtccccgctcatcacccgtatcgatattctccgggccagaaaagcctgcggcctgatgacccgcaatagttaccgggccgttaccgacatcaccactggtcggtatcatcaggaactgaaaccatga

SEQ ID NO: 385803 - DNA, 645 bp, Salmonella enterica
atgagccgggtcatctccaccacggtgtatctgtctgatgaactgtcagaatctgcccgggagaaagcacgctcctggtactgcgaagtggggctggagtatgactggtacagtgatgtttatgaagatttcatcctgatttgcaacatcctgggtataagactcagcacccgcaccgtcaccaccaccggcggcagataccacgaaaaagcctgtgtctggttctccggcttctggagtcagggggacggggcctgctttgagggccactatcgttatcagcccggtgccgcacaaaacatcagacagcatgcgccgcaggacgaagaactgcaccgtattgctgatgaactgcaggccatccagcagcgtaacctctggcagcttcaggctgatattcagcatcaggggcgctattaccatgaatacagtatgcacattaccgttgagcgtgattcccccacccgtcagcaggccaccgacgacgcagaccgtgtcctgagtgacgcgttacgcgacctggcccgctggctgtatcagcaactggaaacgcaatacgactggctgacctcaccggaagccgtggatgaggcgcttctcgccggcggttacaccttcaccgaaaccggcctgcgcttcggttaa

SEQ ID NO: 385804 - DNA, 372 bp, Salmonella enterica
atgacgaagaccacaaccacagtacatgatatcgcctctccctggtggggcctgaatcgtcccgtcgctccgctgtctggcgcacgcctcgtccaggaggggagccgcctgcactaccttgccgaccgcgccagtattgtgggtaaattcagcgccgcgcatttacgccggattgaccaggcctttcctctgatgctcaaacaactggagctgatgctcgtttccggtgagcttaatccccgccatcagcactgcgtcaccctgtaccacaatggccttgtctgcgaagccgatactctcgggtcgtgcggctatgtttacctcgccatttacccaagggagctccctgaaaccggaggtatggcacgatga

SEQ ID NO: 385805 - DNA, 366 bp, Salmonella enterica
atgtcagagaacaaccgtaaacaaccggataatcattcagtcccctgcatccggggccgtctgctgcaggacggatgtctgttccatttacagacctgccgggacgatatcagggcggccttcaccgcagaggaagcccggtggctggcgcaggccttcccgctgatattacagcagatggtcacgatggctgaccccggctcacctgaggcacagacgccgcatgtctttcaccacaacggcctgacctgcgaatcagaacccggtccacagggcgctgtctgcctgatgatttacccgacatctgttgaattaaccccgtcagaggagcccgtaaatgacgaagaccacaaccacagtacatga

SEQ ID NO: 385806 - DNA, 528 bp, Salmonella enterica
gtggtggagttcgttgccagagaatactggctggagaactacgccaccgccggaaaagatacctccgccccaaacgccatgtggaaaaaacgtccctacgcccaactggccaaatgctgtgaggcacaggcattgcgtaaagcatggcctgaaaccggacagcagcccacagccgaagaaatggaggggaaggcgctggatatcactgacgtgaccgaaatgtcatcagtggatacgactgtacggcccccgacaaacaagacgtcgcttaataacctgataagtaccagaacgcaagcgcagactgatacggatacaaaagaactgtctgcgttactcgccggttttaccgaaaagatttcggacagccagaatatcgatgagatggatctgcttttttccggaggcgtgtggccggatggcaagcggcgtcctggtgcagttaatacgttttctggtgagatgctggagaaagcacgcgatgtttacgaaatgcgccggaatgaaattactgattcagacaaataa

SEQ ID NO: 385807 - DNA, 309 bp, Salmonella enterica
atgagcaaatggaaacgagccgaaatcctgattatccgccagtgcgccggaaaaatgcgggtggcagatattggccggttgattggcagaacccgtgatgccgttcgaactaaagccagagagctgaatatctgtcttatcctgcgtggtgactatcaccagtccgcaaaatatcgccagagtgatattgaacaggcgcgtgacctgcatcagaaaggaatcagccgccgtgaaatcgcagtaaagatggaaataccactcagcatggttaaccagtacgtctatttcgatcggagggtgcaggcatga

SEQ ID NO: 385808 - DNA, 474 bp, Salmonella enterica
atgaaaccaacttatgaagaactagaagagcagattaagcaactgaaatcagacaacgaaaaggctatgtctgtcctgaaagaagcaaatgacgctgtactgctggcgaagtcaaaatttgatgcgctggctgcggagaatgaggaacttaaataccaggagcccacactggcggcgatgatgtcatgtcttgatgcgttctacgctgacgaggacgtgccggagcgagccatgatggccgcctataacattcttcgcaagtcgataagcaccccatccacagacgctttcctggctgaagtgcgggcgcagggtgtggagatgtttgccaagcattgtcagaagcgtcacggtgaaatgatgaaatccgagccaaacgaagcagcaagtaacgaggcgattactgccaccagacgcgctggtgaattcgcattgtacttcgccgcccaacttcgcaaaggagccacgctatga

SEQ ID NO: 385809 - DNA, 258 bp, Salmonella enterica
atgagcaaacaaaaaccgacgatagctaactatccagccgttcagcaaataaatttttacgtcaatgaggcatcgccagaactgatagctgaacgcggaaattatctggaaagttatctgctgccaacctggaaaaatcgactggagcaaatgcagtcatggaaagaacactcggctacggatctggagctgctctcggaatatcaacagggcgtggaatttttgacaaaagcactaatgttggaggccacccaatga

SEQ ID NO: 385810 - DNA, 207 bp, Salmonella enterica
atgacagcactcaacaaacaggcgctgcgtgaagcggcggagcgtgcaatgcatgacgactggggatatgacactgatattttccatgaacaggtaacaccatcggttgtgctggcgctactggatgagctggagcattacaaatcacgtgaagagcgagttacaaagctactcgacaagctgggatgtgctctacgagaagcttga

SEQ ID NO: 385811 - DNA, 435 bp, Salmonella enterica
gtgaagagcgagttacaaagctactcgacaagctgggatgtgctctacgagaagcttgaagccgcagaacgcagcatggcagaacaaagcgcgattgtagctgctgctgaaaaactggttcgctgcaaaggtcgttatcacagtgaactgaattaccgggcgcttgcaaaactttttggtgtcattacgccggatttaccaccacttgtgcatgaaaacgttcattacgcagaagatgctgaggtggaaatttcggcattacgccagcgcatagcagaactggaggcgcgggaggtgacgttgcctgcagagaagttttgcccttcggagtacgcgggtagtcagtattgggaagaaaccgaagtatggaacaaggcaatttccgcgtgtgctgtcgctgtccgcgccgctggcatcaaggttaaggagtcgtga

SEQ ID NO: 385812 - DNA, 273 bp, Salmonella enterica
atgaccgagacgcaccagactcatcagcagccggtcgcggtcttcctcactggtgccagccatgtagtaggcgatacgggcgggcatcccgtagatctccagaaactcggcaaagtcgcgcaccgcgtagttcttgaagagatacggccagaccagcacacggaacagcccggacgtggcaataaagccgctgcgggcattgtggcggtgtatcagccagttaccgggccacaactcggccccatgcatcgacacgccatcaatcaggcgtag

SEQ ID NO: 385813 - DNA, 1143 bp, Salmonella enterica
atggggacgattgttaccgccaacaatatcaaggtgacggtggcaggtagtggtaagaagctgcgtggtctgcgtcatggcccgtaccgtcctgacctcgttattctcgacgacatcgagaacgacgagaacgtacaaagcccggagcagcgcgacaagctcgacaactggcttaaaaagaccgtgctgccgctcggtgaggcaggcggtaaaactgacgtcgtgtatatcggtactatcctgcattacgattcggtgctctcccgcaccctcagtaaccccatgtggcgcactgcccgctttaaggcaatcatccgctggcctgataatcagggtctgtgggatacgtgggaagggtatatccgcaatgaagaccctgaaacggcggcgctgttctacgcggccaatgaagcggccatgcttgcgggagcgatagtgtcatgggcggcgcgtccgctgctgacgctgatgaagatccgcgtgcgtgacggtcacggcacctttgattccgaataccagaacgatccggtcagcggtgaggatgccatctttgccggtgagaaggtgattaagttctggactgaggaggttcgcgagtgggtctttttcggggcctgcgaccccagcctcggtaagttcggcaacaaccggcgcgacccctcggctatcctggtgggcggctttaatccctataccggcattctggacgtggttgtcgccgatatccgccgtcgcgtgccggataaaatcatcgccgacattatcgaatatcagcgcaaatatcattgccttgcctggtcgtttgagtcggtgcagttccaggagttcctgcgtcaggtgctggttgatgtgtcggcaaaggctggcgtacccgttccggccgtgccggttattccgtccaccgacaagattttgcgcatcgagtccctgcagccgcatgtcctgaacggccttattcgccttcacgcgagccagagcacgcttctcgatcagctgcgccacttccccaaagccgaccacgacgacggccctgacgccctgcatatgctgtggacgctggccgtctcacgctcccggcgaaccgaaattcacacctcatcgcgccacgacagcgacagccgtttcgggcgtggtgcatggtaa

SEQ ID NO: 385814 - DNA, 1146 bp, Salmonella enterica
atggcaatatttcatatgagcgctcaaacaataacacgcagtaaggggcatagtagcgtagctgcggcagcttatcgccacggcgagaagttaacggacgaacacacaggagagatccacgactacagcaaaaagaaaggtatttcagacagtgtgatattaatacctgaaagcgcagaccgtaattttttaaagcctgcatatttatggaacacgatagaaaaaagcgaaaaaagaaaagatgcgcagttagcacgcgagtttaatattacgcttcctgtcgaaatgacagacgaacaaaaaaaggcgttagcaaaagatttttgccaagagcattttgtaaaaaatggaatgattgctgatatagcttttcacaagctcgatagcgacaacccacattttcacgtaatgctaactactcgccgccttactcctgacggtgcagggttcgggcaaaaggtcagagaatggaacagcaaagagcagctacaagaatggcgcaagagctgggcagacacagcgaacgagcacatgcaaaaggctggcatcgatgcgcgtattgatcatcgttcactgaaagaacaaaaagcagagcttgacgctatcctcccccctctcagaacggttgagcaagaggcgcaggctatcagcttagacagaccgccgactatccatagaggacatagccgcaatccagagcgacaagcacgctttgacgtgctccaaggagtgaaagtatcacaagaggcaaaagcacttaaccacattgaacagaaacagcctaagccctcgccgctggctccagcttcctcccctgccgcatctttgcaagatgctacacagggaggcaatgaaaacaacccgcaaaataaactcggcaaagttggtgaatatcttcaatctaaactcaataaagaagataaagcagattttaatgctgataatgaaatcaaagttcacactactaaaaataatagtaaaagcagttcagcagcagcgataagttcaacatcaaatattaatttaaccgatgagaaagtagataagaatctacacttaacagaagcacaaaaagaagagttagaagatttagaaaataaagaagtagcagcgaagaaaaaagcttatctgatgagtggaagctaa

SEQ ID NO: 385815 - DNA, 414 bp, Salmonella enterica
atgaataatttaagacctaacccgaaccctctaaaagagggaacggcggatatgatgaaccgcttaaacttctatgatacgtcgtttacttgcttacattttttaatgatagattttgataatgatatgcaaaaaatgaaaaggaaaaaagattttcatccgctccagcttttgaataagcatgatagagcaagcttggatttagaagtgcgaaatattattagaatatcacttgctagtaaaatattaaatattcaaagcgaagagcttttgagcgctgatttatattttcataaaaaagatgagttagatatatgtgaagacgcgcgaataataggttatgtgtttagagactttgtaaaacaaagaatagaaacagcgattaaaaacattgaagaagagagaaatatatga

SEQ ID NO: 385816 - DNA, 162 bp, Salmonella enterica
atggtgccgcccctgggcagcctgccgctgaaagccgtgctgccggcagacacccggcatctgtgggtgggttatatcgatgattatggcgggctgcagatgaaccgctatacctgcgataccctgatctgtacgtttaataacgaggtggcggcatcatga

SEQ ID NO: 385817 - DNA, 1062 bp, Salmonella enterica
atgacagaacaaccttttaataataaaacaaaactggggttactgatattactgctgtgtgcaggaattgctccggtacgtgcagatatggaggattcatattgtaacgccagtggacatataaacattcagaatatcaatctgaagggaggacaattcatcacaggtcaggaactgcagagcgttaccattccattcagttatacctgtgtcactcaatataaatcttacggacccgattatcatgccactatcagtctcagtaatgtaaaaccgatggtggatgccctgaagaaaagtggccttggtatggatgtaatgattcaggaaggtaatctctctcccgtgacatttacatggaaggaaattcaggcaggattttctggctggtccagcgcaaaagtatttgggcaatggctgtctcccgggagcacgtacaatctgagcggaacggttacgttacgaatttttgttgaacaggcttttacgagtacttttttgaacataaatataccggcatctgtgtttaatattcttccctataaaccagcaaccgtatcgccgccagaggttccatacacgccgttaaccgtttcagcctttaatctcagatttattcctgacaactctggcagggttattatttcaccgtctgtggtccggatggggcatttttacacggaatataaagagactatggtggccagagaagtcccctttacggtaacagcgcaacagaataccggaactcagaccccattcgtcgcaccgctggctatagaatttcagactaacggtctgacgcttgctgacgcagacagttccgtgacgcttaaaaatacaaaaggagaagtcaatggtttcaggctgtcgatagaggatgataccggaaccccggttaaattcaatacgaaagctgatatggggagtattaatctggataacggtgccggcggaagaattgtaaaacagtacaaagcaaaagttgaaccagttccgggcgtggatattaaaacaggtgatttttcagcagcgatgaccattgtggttacctatatttaa

SEQ ID NO: 385818 - DNA, 507 bp, Salmonella enterica
atgtgccctgacaatacacacgcaaagaaactgcatattactgcgggtaatgacattcattatcccggtcagtcaaaccatgacgcctgttttattccggagtgcgtccgtcagtatgccggagaacctctgtatatcattgtggcacactggtgtgtgcagcaacaggactgggtccggcgcaaccagatatcggaggcttttcacatcaccgcgaggcgggccagctatctgatttcctacctgagaaataaagcatcgagggtggcctgtatctgccgacaccagaccctgcccaataaagcgcggcgctatgaagtttatgtcatccgggtgcttgagagtccttcaccgacccgacgtgaaaagcccccgtccccaccggtatcacggcaccggacagggaatgcagataaagcacaggcgaacgcactgtggaaccggttgcgtagcaaccgtaacgccggaaaaattctgaagaaagaggatgaggatgacggagcataa

SEQ ID NO: 385819 - DNA, 804 bp, Salmonella enterica
atgtataacatgaatacgttgttacgtcatggatccgataaacagaaagaattctggctgccacggatagctactggtgaatggcgcctgcagtcgatgggcgtcacagaacccacagcaggtacagataccaccagaattaaaactacagctataaaaagagaagaccggtatgtgataaacggacaaaaagtctggatttcacgtgttcaacattcagctatgaaaaatggaatgacagtacgacctattcccaatatggtcaatcatgaaaccaacgagctcttttttgacaacctggaaattcccgaagaaaatcttattggtgaagagggtatgggttttcattacatacttgatggtttaaatgcagagcgtaccttgattgcggcagaatgtataggcgatggatattggtttatggatcgtgttacccgctatacctgcgagcgtgaggtttttggtcgtcccattggtcagaaccagggggtgcagtttcctattgcagaagcatttattgcagtggaagcggctaatctgatgcgttttaaagcgtgcgagctttttgatcagcatcttgattgtggagcacaggctaatatggcgaaataccttgctgcgaaagccagctgggaagcagccaatgcctgcctgcaatttcatggtggatatggttttgcctgtgagtatgatatcgaacgaaagtttagagaaacacgtttatatcaggttgctcccatatctaccaacctgatcctgagctatatcgctgagcatgtgctggagatgccacgttcattctga

SEQ ID NO: 385820 - DNA, 1818 bp, Salmonella enterica
gtggtaaacgagaataccgttgcctactccgttaccctgccggagtccacaggtgattttacttttaactggctgggactggtgagcagcgccaccaatacactttgtatggcggtatacctgcacccccaggaaaaaataaaaaccgcaaatggtaaacagggtaataccctgatttattctgaaatcatggagtacgccggagccagtgccgcaaccggtattaccaccccggtaagcacctggcagatcgattttacggcacgccttcacggcatggatgaagccacccgcaaagcggcactggatatctacgggccgggcctgttcctggatgatgcatttaaactcaccgcgcaggctaccggacaggcaacttttgcgccgggtattgcctatctgcgcggattacgtgtggaactgggtgtaccaggcactttgacatactccaccggaattttacaaactgtttatattgacgcggcattaaccggcacactgaccggggaaaataaggccacattcagtctgacgagtcagaaatcagccgactatatcgacagtctgggatttgcacactacgttgaacccgtcgccacaatatcagccagtggcgaaattaccgatatacgaaaaacccgcaagccattaaatgaccgccttgatggggaatacctgacccgcaacgggaacctgaaagaaatcgccgacaaaggcgaacaggcacaatctgccgctcgcgagcatgtaggcctcggcaacagcgctacccgcaatgttggcaccacgccaggaacagtggccgcaggggacgacagccgcatcactggcgcaatgcaaaaagaccagaacggcgcagatatcccggacaaaccaggctttatcaaaaacgttggtttaggagaaacggtagatcaggccgctggcgccatgcaaaaattgcagaacggcggtgatattccggacaggggattatttgtacagaatatcagtgcggcgctggcgttcagtggcggggttgctgtcggcggtgattctaatccgtggactacggcggagtttatcgcctggctagagagttgcggcgcattcaatcatccttactggatgtgtaaagggtcatgggattatgcaggtaacaaagtcatcacagatacagggtgcggtaatatctgtctcgctggcgcagtgattgaggtgatgggaacccgtggcgcaatgacaatacgcataaccacacccaccacaacatcaggaggtggagttgccagcgcccagttcacctatatcaatcacggcgaaggctacgctccgggctggcgacgagagtttagccgtactggcgacgagatgaccggcaacctctaccttaaaaatgatggccgtgtgaatttctgcattatgaatgaagacggaacgccccgtatgtggatcttcaaggataaaggcagcgacggtattcatatcaacaatggtaatgatggcggcggggattttattttcggtaaagacggcaattttcgcgcaggagccgccatctacgccaataacggagacgcattcggcaccgcgtggggtggaggtaatgccgcctggttgagcagctacctctacttgaatatggtcaaagcgatcagacttggccccgtggcgctttctggcggtctgtggcgtgattttcagctcggcggcggacaggtagtgacggggttccatactgacggtgactgggaaatgcagggcggcgacgacaaagtctattatcgcccgattcaatatcttattggtactcagtgggtaactgcgccaagtgtgtaa

SEQ ID NO: 385821 - DNA, 1179 bp, Salmonella enterica
atgcccgatgatatcacgctgctcctcggcggcagacagtacagccagtggcagcgctaccggattgattctgactttcttaaaggtgcggacgcctggcagttgcagcttggccttcccgatcaggtgtttccggtggacgcggtacgcggtgcgccggtgaaggttaaggtgcgcgatgaggtcatcctgaccgagcgcattgacagcgtgcggcgggatgtgtcgcgtaagggtttgacccttatgctgtccgggcgggatttagccgctattctcgttgactgcgccgcaccgatattcagcgcgcgccagttgacccttgacgaaggtatcgccgccatcgttcgcccgctggggataacccgcatccgtattcaggcgcagggaatgacgcgtcatgacagtattcaccttgaacccggcgaacgggcatgggatgcgctggtaaagctggcgtccgggcgcgggttatggccgtggatggatcctgacggcacgctggtcatcggtggcccggactataccgcgccgccggtggcgacgctggtactgagtcgcgaaccgggaaaaagcaacgtgatgtcgctgtctgacacccgcaatattcaggggtgttactccgaactgacggtactggcccagagtcacgccctgcccggagagggtgaaaagttcgccgtggtggatgtgagcgcgccgcttgagggggatgtgagcgtcgatgacggccctgatatggcagacaccagcggcgagaccggccactacaatcgcagccataccgaacatgacccgaccgtgccttactaccggccacaaatcatcatcaccggggatatcgataaccgccagcagctcgaatacaaggcccgtaaggcgatggcggacgcccgcctgagcggtcttgacatcattgcgcaggtcagcggtcaccgcaccccgtcaggcgagttgtggaagcccggccagcgggtacgcgtggtcagtgaacctcacggcattgatgcggtgtattttctgatgggccggacgttttccggcggtctgcccgacggtcagacttcgcaactgcgctttaaagaagacggtatctggatccctgatgcgtatccgtcgaaaaaacacggcaaaaaacacgcgaaaaacgagacggccatcgtgccggtatgggagtaa

SEQ ID NO: 385822 - DNA, 384 bp, Salmonella enterica
gtgctcggtggcgatgacgataccgtgcgaactgacgccaccaagcggcagcacaattcccatcgtgccgggctgcgggtgcgatgtaaagccgtagtgctggaacagctcagcgccctgcaggttctcattaccgataccctgtgcctgaatgcgctgtacgactgccgcgctgtcggtcgcccccaggcggatacgaaaggcctggcgaatgcgcgccagcgcctggttaatacgctggctgataatctgcatcatggcagttactcccataccggcacgatggccgtctcgtttttcgcgtgttttttgccgtgttttttcgacggatacgcatcagggatccagataccgtcttctttaaagcgcagttgcgaagtctga

SEQ ID NO: 385823 - DNA, 585 bp, Salmonella enterica
gtgagtgtggaaaagaaattcaatatagcccctgttaacatcgacatagaaaataaaaaagttttgccatctttttggttaacaaaaatatcatattttaacaatggaaataactttttcattgttgataatgaccaacaaaaaaaagtcatagaagaattatatggcaaaccagaattaacatatatggtgtgggattcccccatcctggtttacagtcattctattaatatttatgatggcgatatagaaggaagtgccaatgtagtaaaaagtgacttcaaggttggggacaataatcaaatatgcaatgctggcgtacaaggcatggttgcatatgggccctataagactcttggtcgtgggtggtattctttaaaaattaatgcacatggcgatcagtatgaagcattaattttttcttatataacaggaaaaaaaatcaagatgtctgagaataaatataaaaatggttcttatattttcgaaataaacgaagatatgccatctgcagaaatacagttattcgctcaaaaagattcaaatgtatgttttgagtcatactcacttcagcatataaaataa

SEQ ID NO: 385824 - DNA, 336 bp, Salmonella enterica
atgacacattgtcagacacctcccgctgacactcatgcagagagttcgggaatccttcgcaaagtacttcagcaggccatcgatcagtatcctcgtctggcgacgtttctgctgacgttacccggtgtaactccggaagccgtacagcattttcacgacagcgtttatcagcaggctggctgccacccggcagctaagtggcagaccggttcccccgacgatactgcgctggatttgggcgtctcctccagatccgacgggcaggatgttactgctgctgaaccaggacaccttctgccatccccgttacgacagaccaccggaccgctgttttga

SEQ ID NO: 385825 - DNA, 624 bp, Salmonella enterica
atgaacggacgtatcgattatctgattgagaaatatcacttcacagagattgctgaatcgccacgtattgcaggtcagtgggctgatgtgatggcagaatgccggcgggaaaacgcgggagcagaagagcgccttcgtattgctttgctcaatgtggattacgtgaccagttttgaactgccctttcggctgctgcttacccgtacgcctcaactgattgataaactgcgcaatgaactgcagctcagtcagaaaaccgtgaccattaacgggaagaaacgtgggcaggtgtacagtatcagcgcggatttaagccccgtaccggatacgtttcgttaccggctttcggcccgcatacgacgggtggatgataccggtataaccgcaacgccgtatcagcaggtagccggccagactaaacgaccccgcgagcgccttcgtctggcgctggaggaggggctgcacgtgaatgccctggatggtcttttctggctggggagccagcgtattgctgctgatatacaaaggctgagggcatcgggaatgaatattatggcaacggatactgatgtttttgacagcctgacgggaaccaccaggacagtgacggcataccatctctga

SEQ ID NO: 385826 - DNA, 1491 bp, Salmonella enterica
atggggaacaggaagtcggacacgggcatagtaccggagaaatcagtgaacaaaacatgtaacaatgtggcggaattgacggagggaaggcccgtgactgaggggaacagccaacagttcgaccgtatccggacgcagagccggacaaatacgacgtcacggctgctggctgtgcgggaagcagcaaaaagggacaaaagtaaacagtttagctgtctcttccatcacattaacgaagccctgctgatgcagagctttttacaactcaaacgccagtctgcaccgggttgcgatggagtaacatgggaaggttatgcgcaaaatgtgcatgataacctcagggaactccacgccagacttcacagaggacagtataaaccccggccatcaaggcaggtgtttattcccagggaagacgggtcagaaaggccgctgagtatactgtgtctggaagacaaaatcgtacaacaggcggtagttactgtgctgaatcaaatctacgagactgactttctggggttttcctacggattcagaccgggaaaaggtcagcatgatgcactggatgccctgaatgttgcgattatggagcgaaaagtaaactgggtgttggatctggacatcagtaagttcttcgatacagtggaacacgactggctactccggttcctgcaacaccgtataaaggacagacgcatactgagactcatcagacagtggatcactgtaggcgtggcagatgaacatgggcacaggagacgcgcgcgcctcggtgtacctcagggggcggtgtgctcaccgttacttgcaaacgtttatcttcactacagctttgacctttggctgaacaggagtcgaaaatatgcgcagggggaggtagtgataatcaggtacgctgacgacgcagtactgggcttccagaaacacagtgatgcacgggaatgtctggaagcactgaaacagcggctggacagatttggcctgaaagtccacccggggaaaacccggctgcttcgtttcgggcgatacgccctgaagcagtacagagatcgaccagaactcgggaaaccgggaacgttcgattttctggggttcacccactacatcggtgagttgcataatggtaaggtggcagtcatgaggaaaaccagacgaagccgacgcattgcgcaactgaaggccataaaacaggcgctccgtaaacgacttcatgaaaagccggcagaaaccggccgctggctaaggcgggtggtggagggacaccttaactactatggagtccccttcaacatcagggctcttacccagtttgtggaagaagtgaagcgtctgtggctgaaatcactgagacgaaggagtcagcgacacagaatgaactgggcacgtttcagccggttgtgtgaacgctggatcccgtcgccccggataatacacccttatcccatgcaacgcttccacgccagaacccgaagtaggagccggatgcgttag

SEQ ID NO: 385827 - DNA, 180 bp, Salmonella enterica
atgctgttgtgcttagcagaaaccaacaatgggtatgacgatatggcaagacatacaccatacctcccggggtcggagacccggagcatgtggagaagttcgtcatacggaacctgggagatcctgtaccagacccgcaatgcgcgggctgttatgccaaagcgtatagacgaggtgtaa

SEQ ID NO: 385828 - DNA, 1185 bp, Salmonella enterica
atgattaaggccgggaatggaacaatgaaaacacgggatgaccggacggcgtttgcgcagaaccccaggctgaacctgccggtgctgctccggtggctgctgatggtgtttgttctggccggaccgggatatgcgtatgccattgtggaatgcacggactggaatggtaacgataaacctgtaaatttaaaactcccggactcagtcagtcttcagcccggtatggatgaaattcctcctgtcccaccagttacagttaattataaatgcatcgacccggagggttcggataatgtgacgcgcacagcatctattgtcattcttggtgatgcgaataatttaattaactccctgaaatcacttgggctgacattgacaataaacgtttctgatagttccggggtaacgtcaccctcctgggtttttaacagttctggcacagcagttgataatatagcggtaggccgttcttataatggtagtacgggtaccggtaacagaacgatgaccattaatgcagctctgtcaagagattcatcagaaaagaccagccccggattttatgcaataccgtcactgtcagcttttaaactggttccctattacggtacatttttaggcggtctgcagttgaataccccggcaataaggatacagtatgtcccgacatgttttgtacagaccagtctgaatacaaataacatcaactttgggccggtattgacaacagatgtggacagcagttttgaccggcagattccttttacggtcactgcaagtgtaaataaaaattgtaacggaggatattttggaaacctccagaccggctatacacccgccctgacgggagcaaaaacatattatctcgatcttccactcaaggtatcttttgtcctgaataatggtggggaggcttcttcagatagaaaatccatcctgctgtataaggagagcacatcagataaaaatggactacagctggaaatcaaagcacctgatggtaatccggttacctttaatgaagccagtttacccgtcaataaatttggtaactttcagggtagtgaaagtggaggtacatggaatatcattaatagttatcaggctgtcctgtcctccgcaggagaacaggtcaaaactggaaagtacagtgctcaggttaccgtgaaagtagattactactga

SEQ ID NO: 385829 - DNA, 480 bp, Salmonella enterica
atggaacaacagctccctttatttgcagccactctgccactggccgcccaacaaaccatccgggaggcgctgactctgctggagcatcagttacgcgagcccggggccgcatttaccagcacgcaggccgcccgggactggctgcgcctcagaatggccggcctggagcgggaggagtttatggtgctgtacctcgataaccagcatcgccttattgctcacgaaacgctcttcagcggcaccgttaaccgcacggaagtccatccccgcgaagtcctgaaacgggccctccacttcaatgccgccgccgtgatactggcccataatcacccttccggtgacccggcccccggtccggaagaccaggcaatcacggaacgtctggtccaggcgctggccctggtgggtatccgggtgcctgaccacctgattgtcggcagaaaccaggttctttcttttgccgaacacggctggctttaa

SEQ ID NO: 385830 - DNA, 477 bp, Salmonella enterica
atgtttgacgcgctgtacagcggcgttaaatccatcaccggcgcggtaacgccgttttacgctgagaacctgctgccggactgggagcgtgtgctgggtctgacggcagacgcaaaagacacctaccagcagcgcctttcgcgcgtactggcgaaattagccgagaccggcggcctgagtattccgtattttacgcgccttgcgctgaatatgggctatcgcatcacgatagacgaacccgaaccgttcagggcgggaacggggcgcgccggtgaccgcatttacaccccggacatcatttttatgtggcgggttaacgtctttacgacgctgctgcagaactaccgctttcgggcgggccagtctgcggccggtgaacggctgtcatggttcgccgacgcggtaattgagtcggtctttaacgacctgaaacccgcgcacacattctgttatttcacctaccaggaggcgcaatga

SEQ ID NO: 385831 - DNA, 1209 bp, Salmonella enterica
gtggaaaaaattatccggccggacactgaccattgccctgaatgtgacgaaccgttgcaccatatccgtgatgcagtgagtgaaaaactggagtatatccccgctcacttcgtggtgaaccgttatatccgtccgcagtacagctgcccctgctgccagaaggtgttcagcggtgaaatgccggcacatatccttccgaaaagtgcagttgagccgtcggtcatagcacaggtggtcatcagtaaacactgtgaccatcagcctctgtatcgccagcggcccatcttcgcccgttcagatgtcgatctgcccgtcagttcgatggctgacatggttggcgcggcgggagccgcattatcccccctggcggcgttactccatcgcgagttgatgagccgtccggtggtgcatgcagatgagacgaccctgaagatcctggacacgaaaaaaggcggtaaatcctgctccggttatctgtgggcatacgtcagtggagaaaggacgggaccgtcagttgtgtgcttcgactgccagcccgggcgtggtcaccagtatcctgaaaactggcttcagggctggagcgggacgctggtcgtcgacgggcataaagcttaccggacgctggcaaacaaagtaccggggatcacgctggccggatgctgggcccatacccgcagaggcttcgccgaactgtataaaatcagtaaagatccacgggcagccatagcggtgaagaagatcgccgggttgtatcgtcttgagaagaagatcagtagccgccccgtggaaaaaatccgtcagtggcgacagcgttatgcccgtccgatactggaagatctgtggtcatggcttgaagagcaggagccgaaatgttctccgggaagggcattacacaaagctatcgtctatgcgctgtctcatcgcgtggaactgagccgcttcctggaagatggtgcggtgccgctggataataatgtgtgcgaacgggccatcaaaaaggtggttatgggcagaaaatcgtggctgttcgccggttcactgatggcgggagaacgcgccgcgcaaataatgagcctgctggaaaccgcgaaacgcaacggtctggaaccgcatgcctggctgacggatgtcctgcagcgcctgccgtcgtggcctgaagatcgccttgaggaactgttatcgctaccggggttcgtcttctcagattaa

SEQ ID NO: 385832 - DNA, 162 bp, Salmonella enterica
atgtacatcatggatcttgcgtcgggcatgcgccatgcaggccgcttcggttactcgcccactttcatagagggcgttataacccgcgtacgcatctgcctgcaggataccgctgtagtccgccagatgtcgctgtgggtggatacctttgcggtcgggtga

SEQ ID NO: 385833 - DNA, 348 bp, Salmonella enterica
atgataacgctgccgaccggtaccagaatctggatcatcgctggcgtcaccgatatgcgttgtggcttcaacggtctggcctcgaaggtgcagaacacgctgaaagatgacccgttctccgggcatatcttcgtcttccggggccgcagtggcaaaatggtgaaaatactgtgggccgatcgtgacgggttgtgcctgttcgccaaacgtatcgagcggggccgcttcgtgtggccggtgacccgcgaagggaaagtgcatctgacacccgcccagttgtccatgctactggagggtatcgcctggcagcatccaaaacggacggaagggcctggtatacggatataa

SEQ ID NO: 385834 - DNA, 192 bp, Salmonella enterica
atgctctcccaagaaacgcagtgctttggcgatgattacatcggcttaatgatattatttatggctttgaaatttcgaaaaaattatgtaggtaattgcaagactcacttatcgcttacaatttatgctcaggatatggctaacaaaacggaatggatttattcggtaatggtgggtacttttcccttttaa

SEQ ID NO: 385835 - DNA, 585 bp, Salmonella enterica
ttgctgagtggtgatatccggccgctgcagcagtgcagcgaggaggaatatcttcgcctgaccgggcagacagatttgccggaaaaccagcgaataccgcagaagacctttaataccacggagagatactggcagcggtttgaggcctggctgggacgccagttgcgggagacaacggaacgctgcttccggcaactgagccggtttgtggaaaactgtaacttcgaaccgcgtgtactccgggagtacaggggagaatacggggtcatcaaagttggcgtcatgccacaggatatcggggccatagatgtgctggagttcgatccggattacattgtctcctgggtggataaagtggcggacggcgtgttcacaccggtgcagtttgtggcgaatgtgttctacaggaacggcgtgcagatggcgtcgttccggggagacacggaggtggaggatatcatccatctgacagcgaaggactatggtgatgttgtgggacaggcggttgagtgggtgcgggaacagtttgacgaacccgcagcagtcgaccggcccgttgcgcaattaccgcgtctggctgcataa

SEQ ID NO: 385836 - DNA, 573 bp, Salmonella enterica
atgttccgcaacctcattcagatgatgctggccgttaacggctacggagatatcccgctgcaccgtcagccgcgtctggtgtttgacactcgcgagcgtgtcgatctcgacaggttctcaaacgccgtggccgtgctggtcaacggtgtcgggatggagaccatacctgttgcgtgggtgcataaaaaaggcggtatccccgtcccgcagggcaacgagccggtgttagttccccgtcaggtggcgaacccgttcgcggatctcagccgggcgctgccggtcagtcccggtgtggggcgtgcggcactcagtcagaccgccgatatcccggaggatgacccggcgcagcaggccattgacagcatgacgcccatttcagatcagattggcgaggctatgcagcagttagtcgcgccgatgattgccgcacttagtcagggaaagaccgccgatgaggtgatgaatatcgctgccgcaagttatccgcagctcgatgacggccagcttcgcgcgttgctcagtcaggctatttttgtcggtgatatctggggccgtctcaatcatgacaagtaa

SEQ ID NO: 385837 - DNA, 369 bp, Salmonella enterica
atgcaccgcaaagccgcgcgcctcaacctgcgctctggtaaaggcccgaatgcggcagcggcagccgtaaccatcaggcgggtaaaaataatcccacaccggcgaatcagcggccgccgtaaagccgttgagcagcgcgtgccgggggcgggtgtgcagatccatgaccgccacacgctgccagtacggtcgctcggtcttgttggcgacctgctgcttccagcgcccggcggcgtaggacgactgtatattggtgctgaatatcgtcccgatacgccggggcgtgagacgcttaccccacagttcgccggtctcagggtcagcgaccagccccttaccaatccagcctttttgctcaagcagcggtaa

SEQ ID NO: 385838 - DNA, 1341 bp, Salmonella enterica
atgcgaaacgcttccactatgtctgttatccattaccatgctgcaggtgttgatattggcgctgagttccacgttgttgccgtttcccctgatgccgatcccgagccggtaaggacttttcagagttttaccggcgatctccagcggatggcggactggcttaaatcctgcggggttaccagcattgcgatggaatccacaggagtgtactggctacccgcgtttgaaatactcgaagccgcaggtttcgatgtaattctggttaacgcacgggatgctaaaaatgttcccggtcgtaaaaccgatgtgaatgatgctcagtggctgcaaaagttgcattcctttgggctgttgagggccagttttcgtcccgaccatgatattgcaatattgcgttcatatctgcgacagcgtgagcggctgacagagtaccgggcagcgcatatccagcatatgcagaaagccctgatgcagatgaatgtacagttacatcatgccgttgctgatattaccggtgtcacaggactgtccatcgttcgcgccatagttaatggtgaaagagatcccgcagtcctgatccagtatcgtgatgttcgctgtaaaaagcctccggaaatattgcttcgggccctgacaggtaactggcagccggaacatttgtttgcattagagcaggctgtttcactcttcgatttttatcaggaaaaaatccgggagtgcgatgttaaaattgaagaatcccttcatcaactttgccagtcttcttctgagccggagggcacattgttgccggcacgacaccgtaccaaacaacccaaccagcttgcctttgatgtcagacccttgctctggaaaatcacgggggtagacctgacacaaatacatggcttcgggccttatctggcgctgaagttcatcgctgaatgcggtacggacatgaatcgctggccggatgccagccattttacctcatggctgtgtctgtcgccgggaaataagatctcaggaggaaaggttttatcatcgaaaacgaagcgttcgtccagcagaatagcggcagcacttcgtctggccgcaacaacgattggccggagcgatactgcactgggtgccttctaccgacggttatcatcccgtatagggaaagcaaaagccgtcactgcaacagccaggaagctggcgatacttttttacaatgcgctgaaatatgggcagaaatatacagaccccggagctaattattacgaagagcgccatcgtaaccgggtgcttgatggattaaagcgaagggctaaatcaatgggatacatacttcatgaagatcccgattcatgtatctga

SEQ ID NO: 385839 - DNA, 342 bp, Salmonella enterica
gtgaaacacgtacagttcatcctgccgcccggtcctgtgggcttctgcccacactcttctgagcaggtcggcgtcacctttcgggtcaatcaccaccacggtatttccacgccggatatcctgggttatcagcagttccgcaagcctggttttgcccacgcgggtggttcccagtaccagcatatgacccacccgctcccccaggtccatgctgacatccgtttcatcaggctccacgccgtgtatcgcaggattaccgcctgccggcggcaggggccgcacgggattaaaccgggcatccgtacgcagtacccggctcagccatggaagccggtattctga

SEQ ID NO: 385840 - DNA, 141 bp, Salmonella enterica
atggttccgggattttttatctggttggtgctaatcagtatcagaatggacttacattttccggtgatggaaatgcttctgtctctgcatccggaggagaatcaggtattattggtagtattctggataactctcagctga

SEQ ID NO: 385841 - DNA, 303 bp, Salmonella enterica
atgtcagttaaaaccgaagttaaatcattgcgccgtattcaggacagaatatctcacggcgggcgtattgcaccatttattcactccactaagccgggatatatctgcgttgatttttacagccgcaatcgtgcgctgtttgatgataacagtgagtgggatgttgatgactatgaagcgcagaaaatgatcctgccattttccggccgcgatgagttccgtcgggtgtaccggctggcgcgtctcctgcgtggtcgtccccgttctcgtgtggagcgtctgctgtggaggactcatggctaa

SEQ ID NO: 385842 - DNA, 282 bp, Salmonella enterica
atggctaatccagaaatgcttacgcagtccattgtgtcaggcgtctatcgcgctgagtgtctggtgtcgtcgctcgttgcgtgtggggctgacgtgctgtctgtgtctattcgcggcggtctgcttgttattcgtattaatcgaaatgcctttaccgatgcgttgattagtcacggtaaagcgtcttatgtctggctggggaatggctcaagggggaaatataagcaaggtgtgtttattcaggacggttgcaaagtcgtctggtcggaatccattcattaa

SEQ ID NO: 385843 - DNA, 222 bp, Salmonella enterica
atggcaatagatataaaaattgttatcaaagaaagaaataaccagattgccgctgatattttggggcgaccggatggatatgttaccccggcagaaatgaagtatgccaacgatgttgccggacttctttcccggtggatggcagaaaacagtgacgagatgaaagtatacgaagcggatatggataaggtttttaaaagagatggtcactcaatcaattaa

SEQ ID NO: 385844 - DNA, 222 bp, Salmonella enterica
atggcaacaactctgcagatagttatcgaagaaaaaaatggacgtcttgaaaccgttatgaaaggcggtttgttggataacgtcactcaaggagaaatagaccgggcgctaagtattgcgacgatagttaaagacgcgctggccgcgagtggcggtcagattgcgcagtttgatgtgaatgttggtgcggcgatgaaaagagccggccgctcaattaattaa

SEQ ID NO: 385845 - DNA, 216 bp, Salmonella enterica
atgtcggtaaaagttgtttttgagtttacgcataccgaagacgggatcgacgttaagcacgaggttgtggatggcggtaaaggcgggtgtgtctgtgaagtggcaatcgctacggtcgctatcaatgaagtgcgcaacggtgtggcggcagttagtcgggtggtagaagaagaccctgccttttacagacatgcgcgtaccaacgacgttcactga

SEQ ID NO: 385846 - DNA, 207 bp, Salmonella enterica
atggcggtaaaggttgaggcggtattcaggcgcgttaacgggcagacgttcgccgaggttagcgtgtccacggcgtcagtcgatttttgcagtgaagaaatgcagcaggcgacggtagcggctcagttgttaacggggcgctttgctaccgtcaccgggtttgacagtgttaattttatcaacggagaaggtcactatgtcaactga

SEQ ID NO: 385847 - DNA, 615 bp, Salmonella enterica
atgcgcaataaaataatacttgctatggcaactgccggcatgatgtgttgcacttcggcttttgctgcacctattgccaccaccgatgccggtggcggaacgataaccttcagcggttccgttattgaagcaccgtgcagcattgtgccggaaagccagaacatccaggtaaatctgggccaggtctctgcaaaatcacttgcatcagcagattcacattccagtatggtaccagtcagcatcaatctggtcgggtgctcatttgatggaccggctactggagagactacggttaaatactccaaagtggccgtgaccttcccagatgccccggcacctgaacaaagtgacggaacccagcagaggggggaaataaaaaatacggccacggataatcctgcgaccaaagtggcaattcagctcctgaaaagtgacgccagcacgccagtggatttgacaaaaaccacacccacagaatcagacgctgacattacgcttgataccacctccagcagtaatcaactgaaattcttcgcacgcatgatttctgttgccggtggagccacctcgggtaatgtcgccgccacagtcacctataagctgaaatatttctga

SEQ ID NO: 385848 - DNA, 414 bp, Salmonella enterica
atgacactcttttttacccggctcccttacgccgtcaccttacccgacggggaacttgttgatgaaaattacaccggtcatgacccgctggtctgcgagttctgtggtgtaaagatggaggccgtcattgagccggataattcgcagcattacaggcatgtgttgtccggtgattttgccacgataaaagccatgaactgccggtacagccagcagcagaaagagggccggaaggattacagtgagctgaacacgtcaggtgaacttcctcccataccgcaatggatagcgaaaagaccgcctcacaggacggtcatccggaactggcgttgtgtgctgtgtcgccatcgctggtatggcaacaaacagtgcccgaagtgccatgactggacctgttcccttgaggtgtactga

SEQ ID NO: 385849 - DNA, 273 bp, Salmonella enterica
gtgaaagaaatcgtgacgcgtacagcggacaacatcagtcgggaatcgtgcggcataacaatcagaccctgcaaatacgcggtggcacaaaccggctacctggtcagcgcagctgagtttgagtttgtctcactgtggcgtttttactgcctgcactgcaaccgtccggtgaagctggtcatggctcatgggctacagccagcacatttcatgcatgttgcagacgacctcagcgatatcgccggcacctgtccttttgttttaaaagtgtga

SEQ ID NO: 385850 - DNA, 267 bp, Salmonella enterica
atgaaatcagatgttcaactcaaccttagggccaaagaatcccagcgagcactcattgatgccgctgctgatatccttcacaaatcacgtacagatttcattctggaaatagcttgtaaggcggccgaggatgttatcctcgaccgccgcgtctttaattttaacgatgagcaatacgcagagttcattgatatgattgatgcaccggtcgcagatgatcccgttatcgaaaaactgctggcaaggaaaccacagtgggacgtgtaa

SEQ ID NO: 385851 - DNA, 486 bp, Salmonella enterica
gtgggacgtgtaacagcaccagaacctttatccgctcttcatcaggtggcggagtttgtcagcggtgaagtcgtgctcgatgactggttaaagcagaggggtctcaaaaaccaggatctcggagcggcacgaacttttgtggtttgtaagaaggacactaaacaaatagccggcttttactctttggccaccgggagcgtcaaccatacagaagcgacaggcaaccttcggcgtaatatgccagaccccattcctgtcattatacttgcccgcttggctgtcgatgtctcattccgtggaaaagggcttggtgctgatttactgcatgacgcagtgcttcgttgctatcgggtagccgagaatattggtgtacgtgcaatcatggtccacgcgcttacggaagaagccaaaaaattctatattcaccatggtttcaaaccatcacaaactcagcagcggacattgttcctgaaactccctcaatag

SEQ ID NO: 385852 - DNA, 489 bp, Salmonella enterica
atgtgccctgacgatacacacgcgaagaaaccgcatattactgcaggtaatgatattcattatcccggccagaccaaccatgacgcctgttttattccggagtgcgtccgccagtatgccggcgaacccctgtatatcatcgtggcgtactggtgtatgagccagcaggactgggttcagcgcaaccagatatcggaggcatttcacatcaccgcgaggcgggccagctatctggtggcctatctgcgtaacaaaactaaccgtgttgactgcgaatgccgcaggtctgtccttgttaataaagtggcacgttatgaaattcgggttactgacattaaggacggcccgccggtaaaaaaaggcaacaggtcatcctctccgccggtctcccgccggcgggtggggaatgccggtacagaccgggccaacaaactgtggaatcaactttgcctgcggcggaaagccgggctgttgctgaaaaaaacgtga

SEQ ID NO: 385853 - DNA, 363 bp, Salmonella enterica
gtggccagagaggtcccctttacggtaacagcgcaacagaataccggaacgcagagtcccttcgtcgcgccactggccatagagtttcagactggcggtctgacgcttgctgacgggggcagttccgtgacgcttgcaaatacaaaaggagaagccaatggattcagactgtcggttgtggacgaggccggccatcaggttaagttcaatacgaaggagaagatgggggacattaatctggataacgactccggtggaaaaattataaaacagtacaaagcaaaagttgaacccataccgggagccactattaaaaccggaaaattttcagcggcaatgaccgttgtggttacctatatttaa

SEQ ID NO: 385854 - DNA, 939 bp, Salmonella enterica
atggagataattttttatcacccgacatttaacgccgcctggtgggtaaatgcgctggagaaggctctcccacatgcgcgcgttcgtgaatggaaggtcggtgataacaaccccgcagactatgcgcttgtatggcagcccccggttgaaatgctggccggaagacgcttaaaagccgtctttgcgctgggcgcgggggtggatgcaattctgagtaaattaaatgcgcatccggaaatgctggacgcctccattcctctattccgtctggaagataccggaatgggcctgcaaatgcaggagtatgccgtcagccaggtattacactggttccgtcgtttcgatgattatcaggcgctgaaaaatcaggcgctatggaaaccgttgccggaatatacccgcgaagagtttagcgtcggtatcatgggcgcaggggtactgggcgcaaaagtggcagaaagtctacaggcgtgggggttcccgttacgttgctggagtcgtagccgcaaatcctggcctggcgtggaaagttatgtagggcgtgaagagctgcgcgctttcctgaaccagacgcgggtgctgattaatctgctgccgaatacggcccaaacggtaggaattattaatagcgaattgttggatcaattgccggatggcgcttacgtgctgaacctcgcgcgcggcgtgcatgttcaggaggcggatctgctggctgcgcttgatagcggtaagctaaaaggcgcgatgttggatgtctttagccaggaaccgttaccgcaggaaagtccattatggcgccatccgcgagtcgccatgacgccgcacattgcggcagtcacccgtccagcggaagccatcgattatattagccgcaccattacccagctggagaagggagagccggtgacggggcaggtggatcgggcgagaggatattga

SEQ ID NO: 385855 - DNA, 606 bp, Salmonella enterica
atgcgtaataaaataacactcgctatggcggttttcggtatgatgagtaccgtacctgcttttgcaacacctatcgccacaactgatgcagggcagggaacaatacaatttaccggctctgttattgacgcgccatgcagtattgtcccggaaagccagaatattcaggtaaacctgggtcaggtgaatttaaaaacactatctggcatagataaatactccagttcagttccggtcaccatcaatctgacaggatgctcatttgatgcctcagctaccggagagacgactgttaaatattcaaaagtggctgtgactttcccgggtaccaatagcccgtcagccgaagctgcgaaaaaaggggaaataacaaatggtgccgctgacgcggcaggaaacgtggtgattcagctccttcagggtaatggcactacgcctgtggatgtgtcaaaagttactcctgctgaaaatgacgctggcaacattcagctcgacagcacttcggcaaccagtaagctgcaattttatgcccgcatgatggccacaggtacagccactgccggtaatgtaggcgcaacagtcacctacaaactgcactatttctga

SEQ ID NO: 385856 - DNA, 1056 bp, Salmonella enterica
atgaaatcactgatactgtcaggtgtgtttcttttctttgctgtctgtgatcctgcgcaggcaaactatgactggtcaaaatgtgatgccaatggaaatgtcaatattcagaatatcaatctgaagggaggacaatattcccctgggcaggaactgcagaagattactgtccccatcagttatacatgtgagacaacatggagcagtataggtacatttgtatactctacagctatgtatctttccgatatggggcaggtagtaaatgcgctaaaaggtagcggtcttgggatggatatcattgctcaggaggggggtaatactcctgtgacatttacatggaaagagatacaggcaggattttctgggtggtccaggtcaaaaacattcgggcaacgtatggaaccggagaaaacatataaccggagcggaacgcttacgtttcgtatatttgtagatgttgtttataagaatactttcctgaacataaacattcctgcaagcacgcttcacatattaccctataacccaactcagcccgggagtgttgtttatccgccaactgtttcatacaaacctttaaccgtttctgcttttaatctccggtttattcctgataattctggcagagttattatttctccctcagtcgttaatctgggtcatttttatacggagtataaagatactatggtggccagagaggctccctttacggtaacagcgcaacagaatatcggaacgcagagtcccttcgtcgcgccgctggctatagagtttaagactaacgatgtgacgtctgctgactctgacacctcagttacattgaaaaatacaaaaggcgaagccaatggattcaggctgtcggttgtggatgattccggaaatcaggttcactttaataagcaagcggatatggggagcattaatctggataacgcttccggcgggaaaattataaaaaattacaaagcaaaagttgaacccataccaggagctgagattaaaaccgggaatttctcggcagcaatgactgttgtggttacctataattaa

SEQ ID NO: 385857 - DNA, 381 bp, Salmonella enterica
atgaataaattgaccttgatatcctttgctgtgttgctgtcatccctcctgttttcctttaataccagcgcatctgtgctaacgggatgcgctgcaaaacgtgccgatattgaaaaccaactccagtacgccagagaacacaacaactcacaccaaataaccaggttacagatggcgctggataaaaacaaagccaactgtactgatgccgaattattacaggaaagacaaaataaagttgccgaaaaacaacgtaaagtctcagaacgtgaacaagaactggcgatcgccggcgagaccggggatcagaaaaagataaagcaaaaacagaaaaaactggcacaggcaaaagaagagcttgccgaagcacaggagaagtag

SEQ ID NO: 385858 - DNA, 252 bp, Salmonella enterica
atgctccaaaaggaatgggacgctccggtcattaatagcgaaatatatcatgaacaggccactgagggaggacaattatttattcataacctgtttaattgcttcctgtgcgcagtactggtcatcggcaggaccaccagttccggccacgccaggtgcgccaataaccatgtctccggacttaacgggtacgccgtcacccagcaacagaagctgggggacagtgttcaggttttgtgtttcaggatttga

SEQ ID NO: 385859 - DNA, 201 bp, Salmonella enterica
atgaataacggattctcctggtctgccctgtttatgtcaggggtgacctttctgatcagcctgttccgtcccgaagagtggatggtcattggcattatggtcggtatcgtcggcacggtctttacctgctgggccaactggtattaccggcgcaagttctttcagctacagcgtaaccgctggcaacgtccacggcggtag

SEQ ID NO: 385860 - DNA, 258 bp, Salmonella enterica
atgacaaactacgcaaaattgggtgaatacatcgcgttaaaaagacaggcagaagatgcggccataaagcgaagccagattctgcatgatgtcatcggggagatacaccgcctgagtgggcgtcatgatgagccgcttgattttacgcttgtccgtcgggagcttgagcgcgccgtcagtgcagataaagagatgcgggcggcggtaaaacaggccaatgaggccgcgccgctgtgcggtgagcctgagattaaatga

SEQ ID NO: 385861 - DNA, 174 bp, Salmonella enterica
atgagcgacaaactaaaacgttatcccgataacgacagaagcaacgacaacgacgacgtccgcatcggacacgggcaacaaattattcccgaccacaccgagccgttgtcatccaatcacaagccgtgcgtcattcccaggccagatgacaaagggaaagattcagggaaataa

SEQ ID NO: 385862 - DNA, 462 bp, Salmonella enterica
atgtccagaccatccgatgaacaaaaatttaatttgtattacaaccagtacctggaattcatgatcgaaacatttaaccgtcgctttgagcgttggttgtgtttcttacagttcctgttaggtagtgccatatttgctcaaagttcactcggatggctctgcggcgctgccgtagcgctctgcgctgcaatccagtactcatggaaccccggcaagattgcgtctaacgcaaaaatacagtcataccgctatcaacaacttcgtaataattttgataaattaaccagtgaagagctgtcacataaaataagtatcattgaagagaacgacagccctccggttaattcattacttaatcccgctcgttgtcgtgcttatatcgctctgggttggccccaacaagaagagttaacccgatgggaaaaactcatgtcattctttgccgggggtattccacggtaa

SEQ ID NO: 385863 - DNA, 585 bp, Salmonella enterica
gtggcaggagagctggtcgccgcgaaaaatctgcagtcagccactgtctcccttcaggacagtctggcggccagaacggaagaggaaggcgtggtccggcatcttctggacagccttcagcaacagttgaaagacgcgcaggaaaaagagactgcaggaggcactgtactgtcgggaattcagacacaactggaaagtctgggccaacaacagcgtttatacatggaagcgctgacgtatatccggcagggtcttgcaacggtcagccaggacggcagtatcccggtggacggacgacaggaaaacgtgaacagactgcagacggcgctgtccggggtctccggagtatcaggtatgcaggtcagggaactgggcagacagctacagcaggcgaagaccggatatgcacaactgattacatctgttcagcaacaggacagcgtgaacgtgcaggcatcgtccctgactcgtgaggtgcaggaaaaataccctgaaccattaaaggatacgatgattagtgtatgcacccgggaagacggatgtcagtcgtggtcgctgaatgtatcgcatccttcggcagagtag

SEQ ID NO: 385864 - DNA, 891 bp, Salmonella enterica
atggataacggcaacgcccgcatggcaaaagaccgtaacggctcagatatccccaacaaggcgcttttccgtcagaatcttgaactcggcaacagtgccacccgtaatgtcggcacgactacaggcactgtagccgcaggcgacgacgtccgtattaccggcgcaatgcaaaaggctatgaacggctcggatattcccgacaaggcggcattttgccgggcgctggggctgggagcgctggcgacaagcgacggtattgatgcgttaataaaaagccagaacggcgcggacatcccggacaaggcgctgtttgtacaaaacctcggtttaacggaattgtaccccgctggtgcgcccatcccctggccgtctgataatatccctgccggttacgccctgatgcaggggcaggcgttcgataaatcggcgtatccaaagctggcactggcctacccatccgggataattcctgatctgcggaggctgattattaaagggggctatgttggccgcgcggtactcagctatgaggcggacggcatcaagtcgcatacccacagcgccagtgcatccagtgccgatctggggacgaaatacacctcttcgtttgactacggctggaaaagctccaatacgacaggtagtcacacccacgcgttcggcagttacgtaaattcatactggggagactcgaatcacacgtcttttcttaccggaagtagcgcgcagacaggagccgctggcgatcacgcccatacaacctatattggcccgcatagtcactccgtatatattggctcgcacagtcacagcgttacagtgtcagcggtcggtaatgcagaaaacacagtcagaaacatcgcgtttaattatattgtgaggctagcataa

SEQ ID NO: 385865 - DNA, 411 bp, Salmonella enterica
atgaacacacctcgcggcattcgtaacaataaccccggcaatattcgctggggtgatgactggaaagggcttgtaccgaaagagcagcgcaccgataaatcattctgccagttcacgacgccggaatacggtatcagggcgatgattatcatcctgcgaaattaccagcgcaggcacggcctgaacaccgtctccggcattatcaaccgctgggccccgacgaacgagaacaacacgcaggcgtacatcaacagcgtggcgaaatcgacggatgtgacgccagaccagcccatcaacaccaccgacagccggttcatgatgaaactgctacaggccattatccggcatgagaacggcgtacagccttacggctttgatgtgttcgtcagagcgctggatcttgccgtgtga

SEQ ID NO: 385866 - DNA, 339 bp, Salmonella enterica
atgagtaacgatccgcatagctggacggactggtggacgatggtaaagggctggcttaacggcgacattcccctcgacagtctgctaatgacagcggtcattgcgacgctgagagtgctctataccggaagaagctggcggcggcttttgcttgaagtgccgttgtgctgtctgctggccgttgcggcgttctccatgattaaaccgatccccgtatcctggttatccgaagactggcgcgttggtattggcgcagcaatagggcttatcggcgttgagcacatccgggcgcttggcgtgattatcacgaagaaatttgcagggaaaacagaacaatga

SEQ ID NO: 385867 - DNA, 195 bp, Salmonella enterica
atgacctgcggcatcgtaaaaccgcataccaatacgcggcggcaaatgcggcatctcatgcacaacagaaccattattcatgatgtacacatgccgctcgccggggcgcgggtattgtgcgctggtgacagtaagcaccatattcaccccctcccgataagagccgggccgtcgccgcttcccccgacgccgtga

SEQ ID NO: 385868 - DNA, 708 bp, Salmonella enterica
atgaacaaagaaagatatctccagaaaattaaaaaattactgaataaggcgaaaagtaattccagtgccgaagagtcggcgactgcgttgcgtatggcgcagacgctgatgcgtgagcatggtcttggtgaggctgatgttgagtttattgatatctccgaatccctctccaaaggcgcgccggacaacgccataaagcccacgcgctacacctcgatgctgttaacactgatacgtaaggcgtttggggttgaggcgattctggactggcgctataccgcgcgcggtattccggttcgcatcgtccggttctatggcccggcagaacggccggaggtggcggcgtatgcgtttgacgtattgtcccgccagctacgcaaggcccgcgctgatttcattggtgggttgcgtaagaacatgaagccatccacaaagaccggccgggcggataattactgcgaagcctgggttaacgggctgtggaataacctgcaggctttcgcctgtacagaagcggaaacaaccctgatacaggcatatcgcgcaaagcactacaacaatctgggtaaggctgaaccgcgcgaggctgcaaaagtcaggggatcggatgagtcgcgttatctggggtatcgcgacggtcagagagtgacgttgcgtcacggcgtcgggggaagcggcgacggcccggctcttatcgggagggggtga

SEQ ID NO: 385869 - DNA, 513 bp, Salmonella enterica
atgcaggggcaggcgtttgataaatcggcgtatccaaagctggcaatagcctacccatcagggacaatccccgacctgcggggacagaccattaaaggggccaggaatggtcgcgcggcactcagctatgaggcagatggcaacaaatctcatacccacggtattaccattaacggcgttgatttggggcgtaaatacaccaacgtatttgattacggaactaaatcaacttctgaaagtggctggcatgcacataattttaaatattgcagtacatcagcctacaaagatacccccggtgcggggttgggaatgcactcgtcgaatacatcatggacggcatcagatcgcattgaggggagtggtaatcacgttcataccatttatatcggcggtcacagccattatgttgacctgggctatcatggtcacactgccactattgcggctgaaggcaatcctgaaaacacagtcagaaacatcgcgtttaattatattgtgaggctagcataa

SEQ ID NO: 385870 - DNA, 345 bp, Salmonella enterica
atgaccacacgtccggggaagcatatccacaacccggtcctgcgggccttttcctgtgactttatgcgtctcacctttcagtgccagcaaccggttagccacattcgccacctcaggaccgaaacggaaactgtttgtcagccacagccggtcagcatgttccagttgtggcgtatccatcgcattgtccgctccacggaaacggtaaatctgctgatgccggtcaccgaccagcaccacccggcaacgctggctgaggacaatagcgctggtcaccggattcgcatcctgggcctcatcaaaaaggagggtggaataacgggaggagaggtccggccggcttaa

SEQ ID NO: 385871 - DNA, 924 bp, Salmonella enterica
atgctcagcttcaataaagtgttcagtctcggcgaccttcaggggctctcagcctcggtgtcgtttgcccgtaaccagtacaccggcgggggcagccagaaccaggtctacgccaccatcagtatcccgtggggcgacagccgtcaggtgagctacagcgtgcagaaggataaccggggcggcctgcagcagactgtgaattacagcgatttccataacccggacaccacatggaacatcagcgccggccataaccgttatgacaccggcagcaacagcagcttcagcggcagcgtgcagagccgtctgccgtggggccaggcagcagcggacgccaccctgcagcccgggcagtaccgcagtctgggcctgagctggtacggctcggtgacggccaccgcccacggtgccgctttcagccagtcgatggccgggaatgagccccgcatgatgatagataccggagacgtggccggtgtaccggtgaacggcaacagcggggtgaccaaccgcttcggggtgggcgtggtgagcgccggcagcagctatcggcgcagcgatatttcggttgatgtggccgccctgccggaggacgtggacgtcagcagctccgtcatcagccaggtgctgacggagggcgcggtgggctaccggaagattgacgccagccagggggagcaggtgctcggtcatatccggctggcggacggcgccagcccgccgtttggcgccatggtggtgtccgggaccaccggcagaaccgcggggatggtcggggatgacggcctggcttacctgaccggtctcagtaaagaagaccgccggaccctgaacgtgtcctgggatggccgggtacagtgcaggctcagtctgccggaaatactgactattagccagggaccgctgttgctgccctgtagataa

SEQ ID NO: 385872 - DNA, 513 bp, Salmonella enterica; identical to SEQ ID NO: 385869

SEQ ID NO: 385873 - DNA, 492 bp, Salmonella enterica
atgcaggggcaggcgttcgataaatcggcgtatccaaagctggcactggcctacccatccgggataattcctgatctgcggaggctgattattaaagggggctatgttggccgcgcggtactcagctatgaggcggacggcatcaagtcgcatacccacagcgccagtgcatccagtgccgatctggggacgaaatacacctcttcgtttgactacggctggaaaagctccaatacgacaggtagtcacacccacgcgttcggcagttacgtaaattcatactggggagactcgaatcacacgtcttttcttaccggaagtagcgcgcagacaggagccgctggcgatcacgcccatacaacctatattggcccgcatagtcactccgtatatattggctcgcacagtcacagcgttacagtgtcagcggtcggtaatgcagaaaacacagtcagaaacatcgcgtttaattatattgtgaggctagcataa

SEQ ID NO: 385874 - DNA, 207 bp, Salmonella enterica
atgttcctcggcatggggttcgtgctggcgtttctgttcctgctgattttcgccatccgcggcatgtccgccgccgtcaaccgtttcttccctgaaccggctccggcgccaaaactggcacctgccgccgccgcgcccgtggacgacttcacccgcttaaagccggtgattgccgccgccattcaccatcaccgccttaacgcttaa

SEQ ID NO: 385875 - DNA, 516 bp, Salmonella enterica
gtgcgccggactggtggtatagctcagcgtaccctgggcatgtgcgccgtggctgcgtaccgcgctgagcgccgctttcatattgcgcgggtcgttcatggcatcgaagacgcggaacacgtccatgccgtttttcaccgcccgctcaacgaagcgttccaccacgtcatcggcgtagtggcgataaccgagcaggttctgaccacgcagcagcatctgcaagggggttttgggcatggcttttttgagttcgcgcaggcgcagccacgggtcttcgccgaggaaacggatgcaggcgtcaaaggtggcgccgccccagcactccagcgacccgtagcccacatcgtcgagctcggcggcaatcggcagcatatcgtcaaggcgcagacgggtggcgaaaagggactggtgggcgtcacgcaggacgacgtcggtaatggaaatggtcatggatccctccgggaattaagcgttaaggcggtgatggtgaatggcggcggcaatcaccggctttaa

SEQ ID NO: 385876 - DNA, 573 bp, Salmonella enterica
ttgcagtatatacatccacgcattttccgccatttccgggtgcattaccctgtaatccgttacaccctggtgccggttgtactgaccggactgctgaccgcctctgcaatggcggccctgacggtggtggcagatctcgggggagagtccacggtcccgctgtttgatgccgtgaacaatgagataagtgaattcacgccaccgcgcaccctgacgccgccttcgccttcagcatctcccgtgacggtggatgagatgctgccggtgagcacaccggagatgactcccgggcgtgtggaaaaccgcaggtctgaacttaccggtatggcaccggtgtttctggtcggagacgacgcgctttcacgcagatggctggaacaacgccggggagacctgcagcaactgcatgcgacggggcttgtggtgaacgttactgatggttcagccctgcggggcctgcagacgctggccccggggctgacgctgttgccggcgtcagccagtgatattgcccgacggctgggcctggcacattacccggtgctgattaccgccgacggtctttcgcagtga

SEQ ID NO: 385877 - DNA, 573 bp, Salmonella enterica
atgttccgcaacctcattcagatgatgctggccgttaacggctacggggatatcccgctgcaccgtcagccgcgtctggtgtttgatacccgcgagcgcgtcgatctcgacagattctcaaacgccgtggccgtgctggtcaacggcgtcgggatggagaccataccggttgcgtgggtgcataaaaaaggcggtatccccgttccgcagggtaacgagccggtgctggttcctcgccagatggcgaacccgttcgcgagcctcagccgggcgctaccggtcagtcccggcgtggggcgcgcggcactcagtcagaccgtcgatatcccggaggatgacccggtgcagcaggccattgacggcatgaaacccatttcagatcagattggcgaggccatgcggcagatggttgcgccggtgatagccgcgctcagtcagggaaagaccgccgatgaggcgatgaacatcgccgctgccagttatccgctgcttgatgacagtcagctacaggcactgctgaggagtgcgattgctctcggtgatattctggggcgcatctattatgacaagtaa

SEQ ID NO: 385878 - DNA, 513 bp, Salmonella enterica; identical to SEQ ID NO: 385869

SEQ ID NO: 385879 - DNA, 573 bp, Salmonella enterica
gtggaaaacctcggtttaacggaagcggtaaaacgagccttaaatgccgtccagaaaaacggcgatacaatgaccggcaatatcttcctgaaaaatgacgcccgtatacatttcgtcattgcggatgcagatggaaacgcgcgtatgtggctctttaaggataaaggcggcaatggtgtctgcattaataacggttatgacggcggcggggattttattctgcgaaaggacggtggcctgacgctgggtagcggcgctcaaattgcccctaatggtgacattctgggtggagtatgggggagtggctggttgagcaccgcaatagccattcgcgataacaatataaatggccgcgcgacgattgactgggttaatcaaaatttcattacacgcgtgaaacgtggcgagccggttaaccctggtaaggtgaacgagtacggcccggcagaagcgcctgctggctgcgtggtgacaagtgttcgccacgacccgacaaccgcatatggaatatattttacgtatcgccccctgagcatttttatcaatggaggctggcgggttattgaggggtaa

SEQ ID NO: 385880 - DNA, 297 bp, Salmonella enterica
atgaaagcacggcatatcgcaacgtcttcagttgcttttaaaattaatcaaccctggctattattggccaatcaacttattgaacgagggattcaggaaggcaatattcgcccgaatattaatgcaatgcaactcaatataagcatttcggcgttgggattcttttacttaattaatcaatctacgctatcctttatttataataaagatctaatgagccaatccgcactgaaagagcgattagcggtgataaaagagactattacttgctggatttctccgccggagcagaaataa

SEQ ID NO: 385881 - DNA, 507 bp, Salmonella enterica
atgtcccggttgctggatgtggtcacggacggactggaattcagtccgacggatttcctgggccagttgatgatgacgctggagctgggaaaccagaatctggggcagtacttcacgccctggagcgtgagctacatgatggccagaatcaacatggcggacagactgccggagctggaggaaggacacggctcgttcattacggtctgcgacccggcctgcggcgcggggggcatgattgtggcgacggcggaaaccatgctggaagcgggttataacccccagaagcagatgctggctttctgcacggatattgatccgctggcggcgatgctgtgctacatccagctgacgttgatgcatattcctgcggtggtttcaatcggtaacagtctgacgatggagatgacgcgggagatggcgacgccggcataccggctgggtctctgggatctgaagctgcaccggcaacagtctgagcatgaacgcaggcaacaggcggcgtga

SEQ ID NO: 385882 - DNA, 507 bp, Salmonella enterica
atgtctggtctgctggctgcggtcactgacgggctggaattcagcccgacagatttcctgggccagttgctgatgacgctggagctgggaaaccagtatctgggacagtacttcacgccctacagcgtgagctacatgatggccagaatgaacatggcggacagactgccggaactggaggatggcagcagggagtatattacagtctgtgacccggcctgcggcgcgggaggcatgattgtggcaacagcggaagccatgctggaagcgggttataacccccagaagcagatgcttgctttctgcacggatattgatccgctggcggcgatgctgtgctacatccagctgacgttgatgcatattcctgcggtggtttcaatcggtaacagtctgacgatggagatgacgcgggagatggcgacgccggcataccggctgggtctctgggatctgaagctgcaccggcaacagtctgaacatgaacgcaggcaacaggcggcgtga

SEQ ID NO: 385883 - DNA, 351 bp, Salmonella enterica
atggtaaagcactttctctggcgtgagcgggtgtttatggccatcattctgggtagtcatgataatgacgcgctgaagcaggtctgtgtcagaagctgcgcactgggcaggtggtatgatggcaggggtaaaacgtattctcatttaccggtgtaccgctcactcggggaagttcacttccgttaccataaattattaaatgaacttattgaccgtgatgtggaacacatgacgttccgtgagttgtctacggaattaacaacgctggagatgctgagtcagcagcttgtggggcttattggtcagatacaacatcatgtgacgctgttgcaaaatacacaggacaggtga

SEQ ID NO: 385884 - DNA, 240 bp, Salmonella enterica
atggcaaaagccaacaaattaccggacggttttatctggacggacgccgataataatgacgtccctatgacggcgggcgaactgctcaacctcagtgacgcaatcgaccaggcgatgtttactaaaggtctgcaaatccacatgcgccagcgggaaatgaaagaggaaatcgacaaactgaccgaagtaaaagccattctggattacaaaatcggttggccggatatcccaacaaaataa

SEQ ID NO: 385885 - DNA, 198 bp, Salmonella enterica
gtggcgaatcgtcgcaaggcgctactcgccaaaattgaggcgctgctggctgaaggtggtctgtcgtgggcctatgccgagggcatagcctctcatatgtataagcagcacgttattgaatggcttgatgacgatcagttgcatggcgttatggtggcgctcataaaacagttcaggcgaaaaggacgatccggttga

SEQ ID NO: 385886 - DNA, 135 bp, Salmonella enterica
atgactaaaagccctgacattgcgttcagggctttttattggcctgtacaggcgatcagttgtggttataataacagcattccttatctgctgaatgtctttaccggaggtgttcatgtcggccgatatcactga

SEQ ID NO: 385887 - DNA, 468 bp, Salmonella enterica
atgtcggccgatatcactgacctttccagtgtgaaacaccatctgcccgcgtccgcgcttgagctggttgacgtgcttggctggcctgcggcaatgcgtctggtctcgctctttggtggcgtgtccctgtcgggtaacagcggcagagcgcgcgggcgtaccggtggcgttcacaagatgctgcgcgaggcgctgacggaggatgaggtcaaaaagctgatcagccactttggttgtgaaggcttctacattccccgctgtgacgttgcgctgcgtgagctgcgtaacagtcgcttctttaccgagctggatgcctgcgttgctgatggtttatcgactcgtcaggcgatggcccggctttgtccccggttcggattcagcgaccgctacgcctggtcgctgaggcgaaggcaaaaacacaatcagactccaccgaaaggccccgttcagacggggctttttgattaa

SEQ ID NO: 385888 - DNA, 543 bp, Salmonella enterica
atgggaattgtgctgccgcttggtggcgtcagttcgcacggtatcgtcatcgccaccgagcacggcgcgtaccgcctgaaaagcctcaaacccggcgaggtggcactctacaccgacgagggcgctaaaattgtgctcaggcgcggtaagctcatcgaggccgactgcgaaacgttccgggtaaactgcaccgactttgaagtcaacagcacgaatcaggcgtcagtgaactgtaccggctttgaggttaacagcaaacaggcagcggtcaactgcgacacctgggcggcgacagccagcgacagcgccacctttaccacccccgaactgagcgccagtgcgctactgaccgctgaggggcttatcagtggtaacggcggcatgagcgttaagggtggcagcggttcccgctttgagggtaatcttaaccagaccggcggcagctttaacactgacggcgacgtcagtacggccagaacctcgcttaacggtcaccggcactctaacggtcatgacggcgcgccaaccggcggcccgatgtaa

SEQ ID NO: 385889 - DNA, 240 bp, Salmonella enterica
atggcaaaatctaacaaactgccagccggctttatctggacggacgccgacaataatgacgtaccaatgtctgccggggaattactcaatctgagcgacgctatcgaccaggcgatgttcacaacggggttgcaaatccacctgcgccagcgggaaatgaaagaggacatcgacaaactcaccgacgctcaggctgtactggactacgttatcggctggccggataacccaacaaaataa

SEQ ID NO: 385890 - DNA, 480 bp, Salmonella enterica
gtgaagaaaatcgccgggttgtatcgtcttgagaagaagatcagtagtcgccccgtggaaaagatccgtcagtggcgacagcgttatgcccgtccgatactggaagatctgtggtcatggcttgaagagcaggaaccgaaatgttctccgggaagggcattacacaaagctatcgtctatgcgctgtctcatcgcgtggaactgagccgcttcctggaagatggtgcggtgccgctggataataatgtgtgcgaacgggccatcaaaaacgtggtactgggccgtaaatcgtggctgttcgccggttcacagatggcgggagaacgcgccgcgcagataatgagcctgctggaaaccgcgaaacgcaacggtctggagccgcatgcctggctgacggatgtcctgaaacgactgccgtcgtggccagaagatcgtcttgaggaactgctaccgctgccggggttcgtcttctcagattaa

SEQ ID NO: 385891 - DNA, 249 bp, Salmonella enterica
atgctggaagcgggttataacccccagaagcagatgcttgctttctgcacggatattgatccgctggcggcgatgctgtgctacatccagctgacgttgatgcatattcctgcggtggtttcaatcggtaacagtctgacgatggagatgacgcgggagatggcgacgccggcataccggctgggtctctgggatctgaagctgcaccggcaacagtctgagcatgaacgcaggcaacaggcggcgtga

SEQ ID NO: 385892 - DNA, 249 bp, Salmonella enterica; identical to SEQ ID NO: 385891

SEQ ID NO: 385893 - DNA, 234 bp, Salmonella enterica
atggcggcatttctcccgctgttgcgggttctgctccgtcacctcatcgagcaggaagcgcatcaccgccagcagacggtcacgatccagtaccatatcggtgttaacataatcggtgtccctgtcgtccacccgaaagaaaatttcctccgcataaacctcaagacccagaaacgtcataaactgccgctggatataaatactctccggcatgttcgttattcctcctggtaa

SEQ ID NO: 385894 - DNA, 405 bp, Salmonella enterica
atggtacagcgctttggtgagcgccactgcgccgagctgacccgctccccgcgtgacgggattgacgaagtggtgatgacgaacgcgctcattcaggcgagcgctgaaatcgacggctacctggtgtcgctgtaccccacaccgtggccggacacgccgcgcattctggtcgggcgctgctgcgatatcgcccgctaccagatgaccacggcgggccgtccgctgaccgacgagatccggctgcgctatgaggacgcgatccgctttctggagaaggtggccgcaggcactatccgcctcggacgcgatgacagcggcagtgtctatcgaccgacggcgcaggcccgtttcacctcaacgccccggcgcttttcccgcgatgatacgaacgggggcgcgttttga

SEQ ID NO: 385895 - DNA, 528 bp, Salmonella enterica
gtggtactgaatggccgcacggtggcgacggtgggacatggcgtgaccggacgcagtgtggtggtggaggttatccgcccggatgcgcggctgttccgtctgctgaaaaccgggagcaaggaagcggcccgacgttactggatggcgaacggcggtatcacccgccgtactcatctgctgcacaaactcggggccggtctggctgacccgctggaggcggatgagaccatcccgctggacgaggacgatgtgctgcaggtggaagacagtttttctgcacaggctgcgggtaccgcagccatttccggcagtgccgtcttgagcgaagagctgaaattgctggtcagtcaggcggtctcatccgggattgaggaggggctggcgcgggggctacaggaagccctgaaggtggcgctgagcgccctgcgccagaacgcggcgacgcggacaaaccagagtgggagtcaggaaaatcataacgccggtcattctggcaacagcaacagcggaggtgggcatggcaaatga

SEQ ID NO: 385896 - DNA, 264 bp, Salmonella enterica
atgcgactgattaatcactactcaccacctgcagccgaaaatctacaggcactaaaagacagcctgggctacagtggcgcacaaatggcagaactggcgggggtatcgggtaacagccagtggcgtaaatataccggtaaaaccagccagcgggatatgtccctgcatattctgttttatattgccgcgcaactggcgctgacggaagatgagctgttacgcgttataagaaaaatgcaggatataggcgcaacaacagactaa

SEQ ID NO: 385897 - DNA, 177 bp, Salmonella enterica
atgagtacacacgaaatgaccaccgccgagcttgaaaagattcacgcggaaattgcaaaactcatggctgaaacagcaaagattaaccgcgaaacgatgtggtatccgattgttgtagccactggcctgattggtgcggtggcgacaattacaacggtgttacttaaaatgatttaa

SEQ ID NO: 385898 - DNA, 573 bp, Salmonella enterica
gtgcaaaacctcggtttaacggaagccgtcaaacgagccttaaacgccgtccagaaaaacggcgacgaaatgacaggtaacctgacgcttcgcggcgatgaccggatgcactttattattattaacgctgacggctcgactcgcgcctacatctacaaagacaaaggcggcgacggtattcgtattaataacggtgctgatggtggcggtgattttattctgcgaaaggacggtggcctgacgctgggtagcggcgctcaaattgcccctaatggtgacattctgggtggagtatgggggagtggctggttgagcgccgcaatagccattcgcgataacaatataaatggccgagcgacgattgactgggttaatcaaaatttcattacacgcgtgaaacgtggcgagccggttaaccctggtaaggtgaacgagtacggcccggcagaagcgcctgctggctgcgtggtgacaagtgttcgccacgacccgacaaccgcatacggaatatattttacgtatcgccccctgagcatttttatcaatggaggctggcgggttattgaggggtaa

SEQ ID NO: 385899 - DNA, 456 bp, Salmonella enterica
gtgactgataccaccgccaaccgccgcgctgatatcagcggccgatgggggtttgatggtcagaacgttatagacctgatgacgccggaaaaggcccgccgcacgaagcgtgacgagattaaccgctggcgtggcaggcaggaaggcgggaatgtctcttttgactggaacgggcataagtgggatgccggaaaagatacgctcgcccgcataacccctgtactgatagttgccagcacaggtaaactaccggcaggttttttctggacagatgcggatgataataacgtgcctgtaagtgcagatgatctgattcagttaaatcaggaaattgcagttgccatggtgatgcaggggctgaaaatccacgaacgccagcagaaaatgaaactggatattgaggaactgaccaggattaacgacattcttgaatattccgttggttggggtgagtaa

SEQ ID NO: 385900 - DNA, 648 bp, Salmonella enterica
gtgccgtgggcgcagaagaaagcggaactgagcgaagagcagcgcgcgtatctggagaaatactgcagcgagccggggctgtgccgtccggagaatttgtacttccgccatccggaaggctgtgagcactgccggaaggcggtggtgctgaacggccgcacggtggcgacggtggggcatggcgtgaccggacgcagcgtggtggcggaggttatccgcccggatgcgcggctgttccacctgctgaaaacggaaggcaaggaagcggcgcgacgttactggatggcgaacggcggtatcacccgccgtacccatctgctgcacaagctcggggccggtctggctgacccgctggaggcggatgagaccattccgctggacgaagacgatgtgctgcaggtggaagacagtttttctgcacaggctgcgggcaccgcagccatttccggcagtaccggcctcagcgaagaactgaaggcgctggtcagcctggcggtctcatccgggattgatgaggggctggcgcgggggctgcaggacgccctgaaggtggcgctgaccgccctgcgccagaacgcggcgacgcggacaaaccagaatggcggtcatactggcaacaacaacagcggaggcgggcatggccggtga

SEQ ID NO: 385901 - DNA, 483 bp, Salmonella enterica
atggccaccctgaaatccggaacactggtgaaagtgctgattccggcagttctgctgggtgcggccggtatcggtctgcacgcctgtacgtccggctccctggataagatggcggtaccgtgggctgccctgccgccgctgaccccggaacagttgcgggaactgggtataacaggcgacacgccgcaggatacccgggcgatatctgacccttctgacatcgtggcccgggggagatacatggccctgtggagatacaatgtggaaatcctggtggttcgtaataaccgggagggagatgtggtggtggatccacaaattctcagcgggaagtttgtgctggcggcgttccggcaccagtgggtgagagcgtccggacagccggaagacatcaccattctgtatctgatgaaaccggaacatccggaggcggcgtttgctgctgaaccgccgttacctgttacgacgggaggtaagcgctga

SEQ ID NO: 385902 - DNA, 207 bp, Salmonella enterica
atggcggtaaaggttgaggcggtattcaggcgcgttaacgggcagacgttcgctgaggttagcgtgtccacggcgtcagtcgatttttgcagtgaagaaatgcagcaggcgacggtagcggctcagttgttaacggggcgctttgctaccgtcaccgggtttgacagtgttaattttatcaacggagaaggtcactatgtcaactga

SEQ ID NO: 385903 - DNA, 153 bp, Salmonella enterica
atgtcgggcgaggtcacgcaaggcgaaatagaccgggcgctaagtattgcgatgatagttaaagacgcgctggccgcgagcggcggtcagatttcgttgtttaatgtagatatagatgcggcgctgaaaagagccggtcagtcggttaactaa

SEQ ID NO: 385904 - DNA, 222 bp, Salmonella enterica
atggcaatagatataaaaattgttatcaaagaaggtaataaccagattagcgctgatgttttggggcgaccggatgcatacgttaccccggcagaaatgaagtatgccagtgatgttgtcggtcttctttcccggtggatggaagaaaacagtgacggggtaaaagtgtacgagtctgatatggataaggtttttaaaagagacggttactcaattaattaa

SEQ ID NO: 385905 - DNA, 441 bp, Salmonella enterica
atgacggcagaactgctgaccagccagttgcctgaagtggatgtgtacaccaaaaccctggtttccggcttcactgatatctcgaatccggagcagggggcgcacttcacctcaaacacccaggaccgggtgagcagcgtcagaatgccgctgatttcgacagcggagcttatcagcctgccgaagggacaggcattagccctgctggagggagggcggctgtggaaaatcaggatgccgttgccgtctgatgccggtgatattgtgatgccgccggatatgctggcgatggttacggatatgcagaagggttaccgtaccggtgacgcctggtggccgtcgataacgaccctcgcggatccggtcacactggtcagcgaaaatacgcagccagacccggcacctgttacggagacagagcccgaaggagacgatgagtaa

SEQ ID NO: 385906 - DNA, 603 bp, Salmonella enterica
atgacggcgtatctggcgatatatgctgacgtcaaaaatctccgcagcacgaatattggtggcaaaagcgtaccgttcatccttgtcaatcagataaaacaaatcacggatctccctacaggcactttcgttgaagtacagagtatgacagggctacttccgttagtcgacacggcctaccttagcgttattgctaataattttggcagtaataaaaacgtatttgttttatacggaaatggcgatggtcgcgtgtggactggatacaggaacggtgcagcagtggactggaaagagctgggaggcagtggcggcggtgctgctccgggctttggtgaagtaggaagctatgtcattgcaagatttccccatcccaacggtaacggagcttttcccgatgaatttgtcagaaccggagaggttgctggtgaaaagctgaagattgagacgttcatgcctgattttaatggtgtacgcagtgtgtctacatgggacgaagaccctgggtcggggactctttgcggaacctggcgatttcaggttttaaccccaccttcaggtggagtagggtatgtaggtggcttatggcaacgggtaaagtaa

SEQ ID NO: 385907 - DNA, 456 bp, Salmonella enterica
gtgggctttcttcccggcaggcatccagccgtaagccagttttgttccctgtgtcgggtgaacaccatcgatgaacaggatcggttcatcatcatcggcttcctgtttcagcttttcgtaagtttccacgaacgcctgctgtgcttcggcactgcatttatgtggaacgccaacgggttttctgtagctgaagccattgcggtgcagccatttggtcatgcccgcaacggtataacggacaccccaccattcatcaaccagcgcgataatagcgtgtgtggtgggcagaaggttattcgtcagatattcagtgagttcagacgtttgagcctcactaagatgactgtcggaaccgccattttcgggcttcagtttttcatcattaagccagtcattcagatggcgacgaactgttgtttcgtgaattcgctgagactgcgcaatcattgccgttga

SEQ ID NO: 385908 - DNA, 594 bp, Salmonella enterica
atgcgtaataaaatactactcgccatggctgctgccggcatgatgtgcggtgcttcagctttcgctgccggaacaacaacaccgacaaccggtccattcggctcaggtaaagtgactttcaccggcaccatcaccaactcgccctgcgatattgcaccgggcgacgatgccattaccgtgcagtttggacagatttcttaccgtaaactgagtaccgtcgacgcaactacggaatcaaagcccttcacaatccatctacagaactgcgccttcgatccggatgatgcgactaccaataaaaacccggttgggaaaatgtccaaagtcacagtgtccttttctggttcgggtgataccacacatcatgcatacatcagcacaggcagtgctcagcatgttggcgtccagttgctcaaaaatgacaactccacacttattgagcctaactcaactgcttcagatacaacagacgcccagcaactgcagaccggtaataacgaactcaaattttttgcacgtctgatagcactggctactgacgtcacgcccggtgatgtcgatgcctccgtcacctacaccctgaaatacctgtga

SEQ ID NO: 385909 - DNA, 264 bp, Salmonella enterica
ttgagcaccgcaatagccattcgcgataacaatataaatggccgcgcgacgattgactgggttaatcaaaatttcattacacgcgtgaaacgtggcgagccggttaaccctggtaaggtgaacgagtacggcccggcagaagcgcctgctggctgcgtggtgacaagtgttcgccacgacccgacaaccgcatatggaatatattttacgtatcgccccctgagcatttttatcaatggaggctggcgggttattgaggggtaa

SEQ ID NO: 385910 - DNA, 267 bp, Salmonella enterica
atgaataaagacggcggtcaggacgcgataccgccccgcgcggttccccgtccggcagccggtcaggatattattcagcccggccaggttcccggcgttaccccggggcgcagcgcgtcagataccgctgctgatatcagcgccaataatgccgatcgtcccctggaggttcacacccacctgcatcttgacgggcgtgaaatagctgaaatcgtgaacgaatacaacggttatgacgtactgcgcagtaccggaggtggcttttga

SEQ ID NO: 385911 - DNA, 273 bp, Salmonella enterica
atgctcttcgccagatcgatacgtcagggcggcgttcgccagcgcctgttgtgccggtggcgggagcagcagcgactgcatggcctcgcgcttttcttccacccggtcaaacacgcccaggacctcgtaagcgccctcaataaccttgccgacgatatcgccccggtgcggaactctgatttcgccaaaggactgcccgcagacgagcgaattcgtgcacacgcttctgaacacgccgggcaaaagctgaaaactcgattcgcctccatgtga

SEQ ID NO: 385912 - DNA, 279 bp, Salmonella enterica
atggaggaaataagcaacttcaacaccgcgctgatgggctttatgcgctgtacaggtaatgtccccaacgaacccgatcctaaatggccgtggggtacggtctggacgatatcatcaaaaggcgttggttcaacgggcaggcgttatattcccgccgttctggaacagggcgaggtgacatatcagttgtactacgcaacaaatggttcgctctattcgcggggcggtatctggctgacaggctggggtaactgggtaaaaagatggagtcagacatga

SEQ ID NO: 385913 - DNA, 210 bp, Salmonella enterica
atgtgccggcatttcaccgctgaacaccttctggcagcaggggcagctgtactgcggacggatataacggttcaccacgaagtgagcggggatatactccagcttttcactcactgcatcacggatatggtgcagcggctcgtcacattcagggcaatggtcagtgtccggctggataattttttccacccgtggaagatgaaccggtaa

SEQ ID NO: 385914 - DNA, 132 bp, Salmonella enterica
atgtcccgcattccgctcagcagtcagctttctttccggctggtcactgctgcttctgataatggctttcggacggtaaaacagtttcagctggctctgcatggccagttgcaggacgttgtcgtcttctga

SEQ ID NO: 385915 - DNA, 456 bp, Salmonella enterica
atggaaacgccgggcgtcaccagcgcctgggtatacccgattcgccggggtgtggggacggtggatatcgccatcacgtccgccggtgggctggcgtctgacgagattattcgtaacgtgcaggcccatattgacgacgtgcgcccggtgacggccagaaacgcgctggtgctttccccgcagatagtacgcgtcgattttgacgttatcgtccaggcgcagggcgtcatgctggaagtattacgcccggaggtggaaaacgccatccggggcgcgatggcgcgtatcgcacctgggcaaccgcttatccgcagcagcattgaaacactgatttccctgctgcctggtgtaaccgaccgcaccattgtcacgccagcggccaacgtcattgcgcaggtggacggtaaacaccttgagtggctgttacccggccagattaacgtgagggctaagtaa

SEQ ID NO: 385916 - DNA, 567 bp, Salmonella enterica
atgacgcctgcggatatggtcaagccgatagacaaagaccgtgacgcgctggttggtgaaatcatcgagcgtgcgcttcccttgcataaggggctgactgagttcaaacaatccgtgttcgctgacacgcaggcgtttcgtgagctgtccggggagctgtacggcgcgaaggttggcggcgagaaaggcaatatgactttctattcgtgggatggggtctggaaggttaacgtcgctatcgctgaacgtctggcctttgatgagcgcctgcaggcggctaaagcgctgattgatgagtgtctgaaagagtggacgaaagactcgcagccggaagtgatatcgctcatcgatgaggcgttccaggtggacaaagaaggcgaagtcagcaccagccgcattctgcgcctgcgtcgtctggatattgcagacgagcgctggctgaatgcgatgcgggccatcaatgacgccatcctgattgtgggtagcaagaagtatgtgcgcatctataagcggtctggcgacagcaatcagtatgtgccgttctctctcgacctcgcggcggtgtga

SEQ ID NO: 385917 - DNA, 426 bp, Salmonella enterica
atgagtattcaacgtttcaggccggttgcgccgtcagcaatcatgttgtcggagcagggtgactacgtgcgctacagcgattacctggagcaccttaacctgtcaccggcagcggctgatgttctggcagaacggcagcgccagattaccgctgagggctggacgctggcgcatgatgactggcaaaaccagtatggcgatctcgttatcgcggcttcctgctacgccaggcacgcatacggtcgagggtgggtttaccctgaaaaaccagagcggtatcaggatgaagaggccccgaatgactggccgtgggatgacacctggtggaagcctgacagcccacgtcgcgatctgattaaggctactgccctgttgctcgctgaacttgagcggctcgatcgtctgtctcagcgcaaccagaaataa

SEQ ID NO: 385918 - DNA, 306 bp, Salmonella enterica
atgcagccgcgggatatgagcggttgtgaacacattctggagtatgacgatgcttcggtcgcggattacctggaggaagtgatggccggcagactgacgccagttcgcatggaggccagagtgatttaccgcaatgacgctgaagtgtgtgttttccggagaaatgcagacgttatcgatgtaagccatccgcacgtcagtgactggcgggagccggtcacggaagcgctcgactggatacgacgtgaacgtacatcgctggttcagacggtaacgcgcaggccggtactgaaactggcggcctga

SEQ ID NO: 385919 - DNA, 528 bp, Salmonella enterica
atggcatctgaaagcattctgcaggaactggaggacacccgactggccgttgaactgatatcgctcggcgcacgaatgcagttactggaacaagccgtcagactaagccggggaaaaatgacccggctgtacagggagctgcggggaactccaccgcctaaaggtatgcttcccttttcatctgactggtttatgaactgggaacacaatattcactcatccctgttctgtaatatatttgactgcataaagaaagaggctcccggtgagtcatccgtaaaaatacttatccgggcttatcgcgcatatttaaaatatgccggcaatacagagacactgtccctcacccgggcgtggatactgaggcggttcgttgattcgggagtgttgtgttataccccctgctgcaaatgtggcgggaaatttataacccatgccggtgaacccgcccgtggttaccactgtgtcatgtgccacccgccatcacgggcagtaaaaaaagccgtcgcggactacccacacaggtaa

SEQ ID NO: 385920 - DNA, 372 bp, Salmonella enterica
atgtgtatttcattaaacgtccggctgacaccaccgcagacaccacgccgggagcaggacgaagccgtcggctattaccgcaagttcaacgccctgctcaactggattgatgccaacgccggggaggtggagaactgcaccgatgtgccgctgacacgtcatgacctggaaaaactccggggcaccctcgaccgcctcacgccggaaaactgcaacgacctgttcccgaccaccgaagggttcttcttcggctcacaggagtacaacgacgactactggtctgacgtggagaatctgaagcagttcgtacagcaacagttggcgtcgtttgattttgacgcccaccgcctgtgcttccacgcctggtggtga

SEQ ID NO: 385921 - DNA, 513 bp, Salmonella enterica; identical to SEQ ID NO: 385869

SEQ ID NO: 385922 - DNA, 312 bp, Salmonella enterica
atgaatactgaacagagcctgtatgaaataaattacacctggctgagcctggcgcaaaaaatgttgctgaaagacaaaagcgtcgccatgttcagactggggctgaatgcccggattgccggtatcattggcggaatgacggaaaaagaactgcagaaactctccgcacatccacatgctgtctttaccctgcgtattcaggaccccgccgccctggagtgtctgcttcaggattccagggttgaccatctggcccccatgcatgccgcgatgctgtgcctctcaggtaccggaggtcgccatggcatctga

SEQ ID NO: 385923 - DNA, 408 bp, Salmonella enterica
atgcggcatgtaccggttcgccatcaggttatagtcgagcagcgctgcgctgacgccatcatcccagcgggcaggcggcacccagtccgggtcctgatattccatccaggcctggggcagcgtgacggtcagggactgattatccggcgagtactgcacccggctgtccgccgaggtcaggttcagacaccggccgtctgtcccttccaccggagcaagctgacggcggctttcctctttcaggcccagcatatctgtcagcgccggagtgatacagaacaacgaacgtccgtcgccggcgtccaccgcggtgaccgtatactgactgcggatgaatctgtcattgagataaatatccagcaggtaatcgcccggcgcgacataaccgtcccggctgaaggcagataa

SEQ ID NO: 385924 - DNA, 492 bp, Salmonella enterica; identical to SEQ ID NO: 385873

SEQ ID NO: 385925 - DNA, 213 bp, Salmonella enterica
atgcagacggcgggtacacaaccacaccccgtgcttatcccagcgcagaactttgatacgcgaacgggctttgttgacaaagacgaaggcggccccctcgtgccacgtcgatttcagctcatcctgtatgtactgtgtcagcgtgtcgatcccgcgccgcatatcgacgggtttgacggcgaggaagacattatcaggcctgagcatatttga

SEQ ID NO: 385926 - DNA, 273 bp, Salmonella enterica
atgcgccatgttcctgctgatgcccgtcagaccgggatttatccggtgttcctggaaaaccagccgggctgccgctccgtctccgacgatgacctctgcgcctggtgctctcacctctgttaccgtcccggggagctcagcctgtgccggctgttcattactgacgctatctggcccgtgcgcgttgacactgacggctatgcacagtcctgcccggcattccgcctgaaccggaatactcctcccggcaaacaggcagacctgccttactga

SEQ ID NO: 385927 - DNA, 243 bp, Salmonella enterica
gtgcatttattgacctttcagagcagcaaaggactggaatttccttttgttgccgtcatcaatgcctcttttgtacctaaaggaacagacgatgagtctgcagccattccggcattatatgtcgcttttacacgctcaacccgggaactgctggtgacgttttaccgggaaaacagcataagtcgccatctggcgcactttgctgaaatggatctggaatcgcttcagtgcaacgggcaataa

SEQ ID NO: 385928 - DNA, 249 bp, Salmonella enterica
atgctggaagcgggttataacccccagaagcagatgctggctttctgcacggatattgatccgctggcggcgatgctgtgctacatccagctgacgttgatgcatattcctgcggtggtttcaatcggtaacagtctgacgatggagatgacgcgggagatggcgacgccggcataccggctgggtctctgggatctgaagctgcaccggcaacagtctgagcatgaacgcaggcaacaggcggcgtga

SEQ ID NO: 385929 - DNA, 264 bp, Salmonella enterica
ttgagcaccgcaatagccattcgcgataacaatataaatggccgcgcgacgattgactgggttaatcaaaatttcattacacgcgtgaaacgtggcgagccggttaaccctggtaaggtgaacgagtacggcccggcagaagcgcctgctggctgcgtggtgacaagtgttcgccacgacccgacaaccgcatacggaatatattttacgtatcgccccctgagcatttttatcaatggaggctggcgggttattgaggggtaa

SEQ ID NO: 385930 - DNA, 231 bp, Salmonella enterica
atggccccggaggcgaataacggggatgacgtctggtctctgtacaacggcatgaacggcaacggcacggacatgagtcctgaggctgccgggatcaccgcctgtctgctggagtacagccatcacgcctgccgcacgaacagcgacctgatgaccgcgcactattaccgcctgcgggattatgcccttaaccatcctgaatgcagcgccatcatgtacatcaccgactga

SEQ ID NO: 385931 - DNA, 186 bp, Salmonella enterica
atgactatagataatatattgaggcttctacgaaaatataaaatagattttgatcctaatgagttagtcaaggaaagttttaacattaaattaatatactataaagttagatcctccctttactcagagccaactgtcaaatctcagtgtgtgctttttcatgtaagcccaccgaatatagcttaa

SEQ ID NO: 385932 - DNA, 297 bp, Salmonella enterica
atgaccgccgagcgtctggaagacggcaagcccaacctctaccggggggccgctgaggtcgtggtggagcctcgcctgctttccccgaccgcctggttcctgctggacaccagccgcgcggtgaagccgttcatctaccaggagcgtaaagcgccggtgctggttgagcagaccagcgaggaaaacgacaacgtgtttatgcgccgtaagtaccgcttcggcgcagaagcccgcgctgccggggggtattccttctggcaactggcttacggctccaccggtgaggaggcagcatga

SEQ ID NO: 385933 - DNA, 321 bp, Salmonella enterica
atgatgattgatgaacaggatgatattgagcacaagctgcgcattgctgattattatgagtcgaaagaaaaagcagaacagtacgcatacacggtgacgggaataaagcatgagctgaaaacccggatccagaaccttattgatgatgcagacaaagcggttgacccctttgatatccgtcatatccagcagttgctggttaaactcgaagatcatgacggtacgctgcgaaataccattgcgcatgtcaatgtggttgccgcattatgtggcaagcccgcactgtcaccacaccagttgcgcggcctgaatcgcttataa

SEQ ID NO: 385934 - DNA, 243 bp, Salmonella enterica
gtgcatttgttgaccttccagagcagtaaagggctggaatttccttttgttgccgtcatcaatgcgtcttttgtacatcagggggctgaagatgagggagaggccattcctgcgttatatgtggcttttacacgctcaacccgggaactgctggtgacgttttaccggaaaaacagcataagtcgccatctggcgcactttgccgggatggatccggaagcgctcaggtgtaacggggagtaa

SEQ ID NO: 385935 - DNA, 192 bp, Salmonella enterica
atgaaggatgctgtctggctcagtgtgatcgtggtgatcgtcatggtggcggttctgggcgtggggtcgtttgcgacgtggcgaaataccctgcgggagttcgggtacggttactggctcaggttaaccgttggcctgattgcgctcgtgtggattatctacggcatttccttgttggggagcacgttatga

SEQ ID NO: 385936 - DNA, 186 bp, Salmonella enterica
atgcaggcggttcttcatccccattttgaccagcaggcgatatttgtcctgccagatttgcttctcgtttttattcagtctgtttttaagcccggacaatgtgtatttcccggtgtaaacttcctgcagcaacttctgctggtcaggcgtgacaccacggcttgcggtggcccggtacatcagtaa

SEQ ID NO: 385937 - DNA, 315 bp, Salmonella enterica
gtgcgtaccctgttcagccgccagcttgcagataacgccatctcggtactggcctgcgagtttgacgccgactggatagcgcacacgttggaaaacggccgctggccggaggaagaacaggacggcacgaaggccgaccatcttttcaccctgcacaacgggcgactcgatgagccggttcccgatctggtacgtgtggatattcgctacaacccgcccggacttggggatattgataacccggccgaccgggtagagcttgggagagaccaggatgaaggtaagagcagcgacgggcctgcaggttccgtatga

SEQ ID NO: 385938 - DNA, 291 bp, Salmonella enterica
atgacagccggtcaggcggcagagcaaatcagccgcctgaaagacgcactcgatacggcagagcatgaggtggccgtggtcaccgctgagcgtgatgtgctgcatcaacagctcgctgacatgaccaccgagcgtgacgcgctgcgcgaacaactggccgccctgacgccgacgtctgcggcgaacgctcaggacgaaaccgcgcccggtgaggatgaggacgtcgcggatgcagaagcgaagcctgacgctgaggacgcccccaaaaccacccgcgcgaagaaaaaataa

SEQ ID NO: 385939 - DNA, 264 bp, Salmonella enterica
atgaaccgctcgcgccgcgccaaagggatcacccgtggcattgcgacctatgagctggacgtgacggcggttattcccgtcccggataacatcgtctgggaagatatcgagggcgcgcgcatcaccatcgatccgatgatcaaaggcgggcagcgcacgacgtaccaggactgcttcacgatttccgtcggtgaaaaatacaccgtagacagtgaggcccgcgtggatatcaaaatgggcgcgctgcgcaaggtgcttgaatga

SEQ ID NO: 385940 - DNA, 264 bp, Salmonella enterica
atgaaccgctcgcgtcgcgccaaagggatcacccgtggcattgcgacttatgagctggacgtgacggcggttatccccgtcccggataacatcgtctgggaagatatagagggcgcgcgcatcaccatcgatccgatgattaaaggcggtcagcgcacgacgtaccaggactgcttcaccatttccgttggtgaaaaatacaccgtggacagtgaggcccgcgtggatatcaaaatgggcgcgctgcgtaaggtgtttgaatga

SEQ ID NO: 385941 - DNA, 183 bp, Salmonella enterica
atgctgtatacgctgcgcggtgcgatgtgtgaagagtccgagccggcgcaggtgatggtgaaggagtccgaagagaaaacgcgcgagtttatcgcccggcttgaagcggactatcccgacaaaaaaggtcttgtgggcggcatgattgcggcacttgattaccttgtgaagaacgggctttaa

SEQ ID NO: 385942 - DNA, 252 bp, Salmonella enterica
atgacagccggtcaggcggcagagcaaatcagccgcctgaaagacgcccttgatacggcagagcatgaggtggccgtggtcaccgctgagcgtgatgtgctgcgcgaacaactggccgccgtgacgtcgacgcctgcggcgaacgctcaggatgagaccgcgcccggtgatacggatgaaaacagcgcggatgcgggggcaaagtctgatgctgaggacgccaccaaaaccacccgcgcgaagaaaaaataa

SEQ ID NO: 385943 - DNA, 234 bp, Salmonella enterica
atgaccactacagcaaaaatgattaaccgggactggcagcagataacggatggtacgcagtcggcgctggtgcaaatattcggctcggcggacgtgtgtgacagccaggttaagccaggagaagaacaggcggcgcacagtttcagtaacacggtattgactgtcacgcccccgacagtgatgtggatacgttcgtcatggtttgagggcaacatccgtgtagttgtgtcatga

SEQ ID NO: 385944 - DNA, 267 bp, Salmonella enterica
atgggctatcgcatcacgatagacgaacccgaaccgttcagggcgggagcggggcgcgccggtgaccgtatctacacaccggacatcatctttatgtggcgggtcaatgtctttacgacgctgctgcaaaactaccgttttcgcgcgggccagtctgcggccggtgaacggctgtcatggttcgccgatgcggtaattgagtcggtctttaacaacctgaaacccgcgcacacattctgttatttcacttaccaggaggcgcaatga

SEQ ID NO: 385945 - DNA, 222 bp, Salmonella enterica
atgaaaattatcagcaaacgccgggcgatggcgatataccgccggcatccgcagtcccgcctgtttcgctactgtagcgggaaatacccgtggtccggcagcgtctgtcactggtacggccaggacgtgcaggatattcgtggcgtactggcggtgtacgctgaacgtcgccgggaccatcacggcccgtacacccgcctgatgtgcgtcaccctgaattaa

SEQ ID NO: 385946 - DNA, 168 bp, Salmonella enterica
gtggcgctcaaactcgaagaggaagaagtcatcgagaacgtgatggcgatgaaagatgcgctgattgtggataaaggcaaggagccggggacgttcctggcacaaattccgtgccaggtcgttaaggggctgcacgttatcgccgcccgtatcgacctgtacctgtga

SEQ ID NO: 385947 - DNA, 168 bp, Salmonella enterica
gtggcgctcaaactcgaagaggaagaggtcatcgagaacgtgatggcgatgaaagacgcgctgattgtggataagggcgaggagccggggacgttcctggcacaaattccgtgtcaggtcgttaaggggctgcacgttatcgccgcccgtatcgacctgtacctgtga

SEQ ID NO: 385948 - DNA, 123 bp, Salmonella enterica
atggctgatgccgggccgggtaacaacgtaccgccagccattaccagcgccatgaccgacaccaggaaaggccgggaaaagcgtgttgtgtatcgtgttgttctcatcggaaacctcagctga

SEQ ID NO: 385949 - DNA, 177 bp, Salmonella enterica
atgacaatgttcaatgaggcggagttaatccgccaactggaagagcagagatctgtaattgtattgcgtgatagcgagatttcacgattgcagggagaagttgaaatgctggctgaggcattaaaaaatacaccgccagcgcagacagaatgtgattatcttggcagaaagaaatag

SEQ ID NO: 385950 - DNA, 276 bp, Salmonella enterica
atgttaaagctattcggtcgttatatttctgttggtgtgctgaatactgccatccactggctctgcttcggcgttatgttcagcctgataggctttagccaggcgatatcgaacgttatcgcattctgcgtagccgtcacgttcagctttttcgtcaatgccaaatggatgtgtaagatgaaagcaatcacagatggtgcatggcctttgccgttaaaggtcaatcaaacttatggcctgttttttatcaagataaataccaatcatggttactga

SEQ ID NO: 385951 - DNA, 168 bp, Salmonella enterica
atgttactccacaataaggatgtgaaaatgatttcttttattcttgttgtgttggcactcgtcgcacttggcgtaatgaaccgtaaaggtatcattgaagatggggaattttccgtcgcagttgttttaatattatctggcatagcagggtacataggtttgtcatag

SEQ ID NO: 385952 - DNA, 2475 bp, Salmonella enterica
atgagacaggaatgtattcaggccgtgcaacaggcagcacagcgcactcttacagccagagaaatacagaatatcgaagaccgcatttaccgcaatatgcgagctattgcccgtgacgatccgatgtcatggcgtcaacttactgatgctgaacgcctgcgccgcgccgggcaactggccgctgaagatttgcagcgagaggcggcactgaaaaaacgccgtgtctcgcttaccatcgcagcgcgtcagcgcctggacaacttcattaacagttatcatggtgctgacggaaagctaggcgcactcaaccgcacgatcgccttcagcgctgacgggaaatcaaactttctgtctgttgagtcacgcacgaaagcgacacgtgattacgcattaagccagttacaggaggcgttcgaggctgttgatcctcgtttcttcgggctgtttgaagatgaggctggagtccgtgatctggtgtttgagatgcgcggccagaaaactggaaatgcgaaagccatgaaaggggcgaaagcctggggtgaagtaactgaactacttcgccgcagattcaatgatgctggtggagatatcggctacctggaaaactggggtatacctcaacatcactcgatggaaaaggttggggcggtatcgaaggataagtgggtaagtgatgtgatcggtaaactcgatcgcaaatattacacccgatccgacggccagttgatgaatgatactgagttatcatcttttctcggtgaagcctataacacgattgccacaggtggccttaataaactgactgataccggtatgcgtatttccggtgcgcgggcaaaccgtggcaacgcctcacgccagatccactttaaagacgctgattcataccttcagtaccagcaaatgtacggcgaccgttcactctgggaaatcatggtagggcacctggaaggtatcagtaaagacattgcgctggtggaaacctacgggccaaaccctgatcacgtgttccgctctctgcttgatcagacgaaatcagagacagctacggctaacccgcaggataccggtcgcatagagcgcctggcaaacaatactgagaacctgtataactttatttctggtaaaactcagcctgttgcaaacccgcatattgctcgctggtcggataacatccgcaactggatggttgccagtcgtctcggttccgcactgttatcatcgttctctgatcttggaaccatgtacctgtcagcgaaggttaccaaccttccgatgaatcagctattccgtaaccagcttgaagctatggacccaacgaatcgcactgagcttgccagggcacgtcgtgctggcctggctatggaatcactgctcggcagtgttaaccgctgggcgatggataatatggggccgtctgtctccaggtgggctgcaacagcggttatgcgcgctagtggattaaccgcatggtccgacgcgcacaagcgtgcctacggtgtcactatgatgggtagtcttggtgatgttgtcaccagaacgccggatctgaaaagcctgtctaatgacgatttccgcatactgaaaagcaaaggaatcaccgataccgactggagcgtgtggaagttggcgcaacaggaggactgggggaaaggcaacgatacgatgctgacgccggaaagcatcatgcgtatacctgatgctgctgtagagcacctaggatcaccggagcgcgtgaagtttgaagcaatgcgtaagttactcggagcggttaccgaagaagttgacatggctgtgataactccgggtgcgcgtgagcagatggttaccggttcaggtatccagcgcggaacatggaaaggtgaattaacccgcagcgtattcttgttcaagtcattcccgatctctgtcgtgatgcgccactggtcgcgggctatgggtatgccttctgctggtgggcgggctgcttatatcgcgacgtttatcgccagcacgacaatacttggcgcgctttctcagcaactaaatgacatagcatcaggccgtaatccgcgggatatggctggtgaagatgctgctaaattctggcttggcgcattgctgaaaggcggtggtctcggactgtacggtgattttttgctatctgaccacaccaggtacggaagcggagcgctggcttcaatgctagggccggtggctggtctcgtagatgatgtcattaagatcgggcagggcatcccgctgaatgcggtagaaggtaagagcgagcaaactggtggtgatctggttaagcttggaaaaggtctgacacctggtgccaacatctggtacctgaaggctgcgcttgatcatatgatctttaaccagatgcaggagtatttttcccctggctatctgcgcaagatggagcagcgttcgaagaaagaatttaaccagacatactggtggcgacctcaggatgttactccacaataa

SEQ ID NO: 385953 - DNA, 1803 bp, Salmonella enterica
atgagttactttggtctcaacgcagttaaccagaatcagcaactggatgaagcggcatctaaccctgcagggtttaataccgatgtcggtttcttcgataactcaggtactgctgctgtttctggcctgtactctggactggttgccaaaccagaccagcttctttgggctggaatggataagatcgtttcacccatcgctaagtttgttaacgaaaacacttccatcaatgatacatcggctgaatacatcggcgaacagcgaaaactcgcagagcagcaagttaagcgcctgactcctgatgcagcaacgacaggcactgccgggcaggttcttcatggtcttttcgatatgggcggacaggcggtagtaggaacactgctttctggtcctgcaggtggtgcggcggccgtcactgcgttgcagggcttctctgagtttgagaaattgactgctcagggcgtcgatttcaggactgctcaggaagctggtctggtgcagggtgtcactgctggtgctggcacattgatccctatgagtctgggtttacgtgccggtggtgcgctggcagaaagtgttggcgcacaactggcgaggacaggtgaaagtgcagtacgtaatgttgcagctactgctgttcgcgcagctccagatatcgcatacgcagccggaactaacattgccttcggaatggcacagcgtggtctgaccgcaaagacgctgcgtgatggcggttataacgaaatggcggctcagtatgatgtgtttgatcgccagtctatcgccattgatgcggttcttggtgtggcatttggtggtgtgggtaggttcctgaacgcccgcggtgagagcgctgcaactcctgaattttccccggctgaggtggatgcagcgctggcagccaatgcctcacatcacgctgagattgatgttgctcctggtgttccggttaatgttctgtcacgtgatgcgcatatacaggcgctacagaaggcgatgaatgacgtaagccagggccgtgcagttgatgtggccagcattgcggagccggcttcattcactgaaattacagggcgcagaaacctgatttctcaggcgatcgatgaaaccctgtatcgcacagatgaaggtagcactcaggttgcagttgacacaagattgcttgagcagcaggcagcgcaggctttagacgttgagcaggttaatcagttgcagactgatatcaccggtattgagcgatacattgaaacactcaaccaggaacgctccggagtccttaacgaacaaccttcaggcagcagacgtgagttatcacgtgcacgtgcagcgcgtcaggaaaggctgcgtgatattgaccagcgtatcaatgacgagtcggtcagactacagacggcaaaggataatctggcggcgaatgttgagggaggggttaactttgaagcgcgggcggaattagccagacgccagcaggcagaaagcgatcttaacgcacaggctatgtcattctataaaacagcagaagtacggactcctgacgaggctgcaccttttgaacttggtgctgtattgcgacaggcagagcaaaagccaacggctgaacaggcaggagatatggatcttcgtatcgctgaagattcactggttgagtctccggacatgatgatcaccgtcctggatgatgaaggaaacccgcagtcgagaagcgctagggaagtgctggacgaagcgagcaaagagaatgagcaggcaatacaggattccagcctttttgacgtggctgtagcgtgtttcttgagaggataa

SEQ ID NO: 385954 - DNA, 2814 bp, Salmonella enterica
atgccaacagtaccaacagtcgccgggcgtcaggttgaaagccgcggcgtttccactcaggggtttcaggcattcgatcaaccaaacaccagcgatgcgctgctgagcacaggaagccaggcgcttgacgtattcggccaggctaaacagcgcgctgatgtcgctatggctcaggatgcatcgctgcaactgacacagaccgcaagcgatctgatgaccaacccgcagaatggcctgcttaacctgcagggtaaaaatgccctcggcaaggggcaggaatacacccagctctttgacgcaaagactcaggagttggcgatgcagttgccggagtctgcgcgccagggattcatgcagcaggctcagcagcagcgcattcagtttacatctcaggctggccggcatgagatagggcagctcaatgcgtatgaagaggggcagttccaggcgacgctgaccaccggcgccaaaaccgcttcggcaatgtacggagataacgccaactatgtgctggctaatcagcaggcgtttcagcaaatagaaagtttcggcgccgcacacggctggagccctgagcagatacaagccaaaaaggtggaattcaaagagaaggtagctgatggcgcgctttctcagtggtcagcaaataacgcgatcggattcattcagagcaacggtgagctgagcgatacggccgccggttcacggcgggctactgttaacccttatggtggtgagccatcatctacgaaaggaatggttacccaggggaacattaacttattcaaccgaccatctgtaaaaaacgaagatggtactatcagcacggtaagaactatttccataggcacagatgctggtgaagtcctgataccaacggtcagtgatgacggtaaattactttcagatgatgaagcaatcgcgctatatgaaaaaacaggaaagcaccttggaatatttgataatcctgatgatgcgactgcatatgctgaaaagttgcacgagcagcaagatcagtattatgtgaaaggtgatagcggcgatgccaggggtatccgcaacaacaacccgggtaacctcgaagccagcgcatcaaacccttgggtcgggcagactggtagtgatggccggtttgcaaaattcgagacccctgagcatgggatccgcgcgctgggccgcaacctcatatcctaccagcggcaggggattgataccgttggagagatcattaacagctgggcaccgccttctgacaataacgacacagctgcatacatcaaagcggtttgtgcgcagttaggcgtaacggcaaaccagcctcttgatgcttccaatcctgacacgctgcaggcgctctgcgccgccatcattaaacatgaaaatggcagtcagccatatagccaggatcagttgtccaccggcgtcagcgcagctcttgggctgtcacaactgccaaccagcaataaacgctacaccggcaatgcagcattcgacgccgccacgccggaagcacaggccacttttctgcgccagtctgaccagatccgccggcagcagcaggccgaatacagaacggctatcgatagccaggttcgcgacgccaccgcggcttatatgcgcggcgttgagtttccaaacccacctggacaagctgaatttatggctgcctacggagtgcgggagggaaaccatcgatacatcgaattcaggaatacgcagattgccgggcagtatattggctcgttccgcaacatgccgaccagcagcatcacagcctatgttaaacagcttgagccgactccggagcagaccggggaagggtatgcgtcgcgggccgcgctttatgacaatgttgtcaccgctgctaaccaggtgatcaaacagcgcaaggctgatccggtgcagttctcacttgccgccgggcagacgaagccgatcgacatgaataaccaagcaaacttcggtcagagtatcgcgttgcgagctgcacaggttaatgatctggcaaaagcatacggcactccgctgacgttcttttccaaagaagaggcgaatcagatcggggctttcttccgcgatgcaccagtttctcagcagtctgcatatctcgacaccattcggcagagcaccggcggcgggcaggtgtacatgtcagcgcttcagcagataagcaccaatgcgccatcagcagcggtagctgggatcctgatggataagccaggaggagtggtagctgagaaaaactggtttaaccctgatgtttctgtatcaccagaaacagcagcgcaaaccatcctgtccggtgcagcggcgcgtaaaggaactgatgatgctaagggcatcccaatgccgaaggataacgatctgcgactagagttctctgacatggtgaaggatgcgtttgccggtgacgcgcagggtgcatcaatggcctatgagatagcaaaggactattacgctggggtgatggcgaagaagggtgtggtttcgggtgaaattgacagtgactcatggaagcaggctgttaacgtagctactggtggcgtgcacgattataacggcatgggcagtgttctgttgccttgggggatgtctgccgaacaatttgataaacaagttgatcaggcatggaaaactcaggtgactggcgcaggaattaaagcaccgccaggccagtacggtctgcaaagctatggagatagccagtatctggtgaaactcggcactgggtatttgctgaaagatgatggaactcctgtcgtcatcgaccttacccaacagcgccagagattctcagaggggatcccgcaatga

SEQ ID NO: 385955 - DNA, 1209 bp, Salmonella enterica
ttgcgcggcaaacctgtcgtcgttctcagtaacaacgatggctgcgttattgcccggagtgctgaagccaaacggctgggtataaagatgggaaccccctggttccagctcaaagaggcgcagtttcctgaaaaattgtacgttttttccagcaactacgagctctacgcgagcctgagtaaccgtgtggtcgccctgctggaagagctgtcgccccgcgtcgaacaatactcaattgacgaatgtttcctggatgcccggggaattggccactgtatggatctggaggattttggcaggcagctgcgtgggcatgttctcagtggaaccggactgacgatcggtgtcggcttcggcgccacaaaaacactggccaaatcggcgcagtgggcgtcaaaggaatggccacaattcagtggggtgctggcgctgtcgcccgaaaatccacgcagaacggcaaaattactcagcctgcagccggtggaagaaatctggggcgtagggaaccggatagcgaaaaagctgcacgttatggggatcaccactgccctgcagctgtcgctgacgaaccctacatttatccggaaaaacttcaacgtagtgctggagcgcacggtacgtgagctgaacggcgagagctgcatttcgctggaggaagcgccgccgccgaaacagcagattgtctgcagtcgcagcttcgggcagcggatcaccacctacgaagaaatgcgccaggccgtctgccagtatgccgagcgcgcggcggaaaagttgcgcggtgagcgacagtactgccggcatatcagcaccttcatcaagacatccccttttgcggttaatgagccgtattacggtaacgtggccacggaaaaactgaacacccctacccgtgacacccgggacattatcgcggcagcggtcaggtctctggacaggatctggctcgatggccaccgctacgcaaaagcggggataatgctcaatgatttcagtccgaacggcgtcgcgcagctgaatctgttcgatgacgtgcagccacggccgcacagcgatgcgctgatgaaggtactcgacggcattaatcattccggactcgggaaagtctggtttgccggacggggtattgcgctggactggcagatgaaacgggagatgctgtcaccggcatataccacccgctggaaggagctgccggttgcccgtttctga

SEQ ID NO: 385956 - DNA, 252 bp, Salmonella enterica; identical to SEQ ID NO: 102168

SEQ ID NO: 385957 - DNA, 306 bp, Salmonella enterica; identical to SEQ ID NO: 102167

SEQ ID NO: 385958 - DNA, 258 bp, Salmonella enterica
atgttacccacacggttatcccccgttactgtggataatcaatatattgtgtctcagacagctgctttttctaccatatgttgtgtccctgatatcccctcggacggcgtgacaaacgacatcatactggagacgctgatgacgggaccatgttcatccagggtcgtaagaacggccgggactggttaccggccggacgaaggaccggccaacgcgcagcggcggcagctggttttaaaaatgctggcggaaatttaa

SEQ ID NO: 385959 - DNA, 324 bp, Salmonella enterica
atgacaaaacataaccgatttccccctgaagttcgtcaacgcgctattcgtatggttctggaaaaccagaatacctacaactcacaatgggccgctatctgctccattgcccctaagatcggctgcactcccgagacattgcgtatctggatccgtcagcaggagcccgttgatgatgagcagaatgcgctgactgccagcgaacgccagcgtctgaaagaactggagcgggaagtccgcgagctgcgccgcagcaatgatattctgcgtcaggcttcagcgtattttgcccaggcggagctcgaccgccactggaaaaaataa

SEQ ID NO: 385960 - DNA, 888 bp, Salmonella enterica
atgccgcttctggaaaatctgagcggtgaacacggggtcgggccagtctgtcatgagctggatattgctccgtcaacgtactactggcatcagcaacgccggaagtgtcctgaacgacgcagtagtcgggataaacgcgatgccgtgctgatacctgagatacagcgcgtatacgaagaaaactacagcgtttacggtgtgcgtaaggtctggcgacagctaaaacgtgaaggtgtcggcgttgcccgctgcaccattgagcgcctgatgaaagccctgcagctacgtggggtgacacgcggcaaaagtgtcagaaccacccgcagcaacaaagccgaaacaccgcaggatcgggtgaaccggcagttcgtggctgaacggcccgatagtctttgggtggccgattttacctacgtcagcacctggcaggggttcgcatatgtggccttcatcattgatgtgttcgccggtgttatcgtgggctggcgggtctcatccacgatggaaacgtcgttcgtgctggatgcactggagcaggcgctgtgggccagacgcccgagcggtaccatccatcacagcgacaaaggttcgcaatatgtgtcactggcgtacacgcaacggctgcaggacgcggagctgctggcttcaacaggcagcacgggcgactcatatgacaatgcgatggcagaaagtatcaacgggttgtacaaagcggaggtgatccacaggcaaagctggaaaacccgacaggatgttgagctggctacgctgaaatgggtggactggtacaataatcaccgattgatggaacggaccggatatatcccgccagtggaggcagaaaaagcctattacgcttcgctgaatgaccgggatgtggcagcctga

SEQ ID NO: 385961 - DNA, 1011 bp, Salmonella enterica
atgacgagcgaaaataacagcttacttctgaaccttcaggaagttgataagacaaccggcgaagttgttaagctggatgtcaacagcaccagtaccgtgcagccagtagcgctcatgagactcggtctcttcgtcccaactctgaaatcaacagggaagagcaaggcgaaccggaaaaacgttacagacgcgactgaggagcttgtacagctgtctattgccaaaagcgaagggtacactgacgttaagatcaccggttcgcgtcttgatatggacacggattttaaagtctggctggggataattcgttccatgtcggagtatggggtaaaaagtgacaccctggaactgtcgttcgtcgaattcgttaagatgtgcggatttaactcccgtcgttcaaacaaaaaaatgcgcgatcgcatcagtaattctctgtttaaacttgcctcggttacgctgaagttccagagcgagaccaaaggatggaccacccatctggtgcagtcagcctattatgacatcaccgaggatatcgttgagataaaggctgaacctaagctgtttgagctttaccacatggacagaagggtactgctgcggctgaaagccattgacgccctgcagcgcaaggaatcagcccaggcgctttatacctacatcgaaagtcttccccagaatcctgcacctatttccatgaaacggatgcgtgaccggctaaatctcacctcaaatgtctatacgcagaaccacacggtgcgtaaggcgatggagcagctgcgggatattggttatctggattacaccgagtttaaacgtggccgagccacctatttcagcgtgcattatcgcaaccccaaactcatcagtggtcctgtgaaggttccgcgcaaagaggaagaagagaaggcgccagagcaaaattatgacgaagtcattaaggcgctgaaggctgctggcatcgatcctcttaaactggctgaagccctctcagcgatgaagccagaaaattga

SEQ ID NO: 385962 - DNA, 135 bp, Salmonella enterica
atgagccatcaactcaccttcgccgacagtgaattcagcagtaagcgccgtcagaccagaaaagagattttcttgtcccgcatggagcagattctgccatggcaaaacatggtggaagtcatcgagccgttttaa

SEQ ID NO: 385963 - DNA, 804 bp, Salmonella enterica
atgctacgcattcactgcatgcagcattggtacaacctgagcgatggcgcgatggaagatgctctgtacgaaatcgcctccatgcgcctgtttgcccggttatccctggatagcgccttgccggaccgcaccaccatcatgaatttccgccacctgctggagcagcatcaactggcccgccaattgttcaagaccatcaatcgctggctggccgaagcaggcgtcatgatgactcgaggcaccttggtcgatgccaccatcattgaggcacccagctcgaccaagaacaaagagcagcaacgcgatccggagatgcatcagaccaagaaaggcaatcagtggcactttggcatgaaggcccacattggtgtcgatgccaagagtggcctgacccacagcctggtcaccaccgcggccaacgagcatgacctcaatcagccgggtaatctgcttcatggagaggagcaatttgtctcagccgatgccggctaccaaggagcgccacagcgcgaggagctggccgaggtggatgtggactggctgatcgccgagcgtcccggcagggtaaaaaccttgaagcagcatccgcgcaagaacaaaacggccatcaacatcgaatacatgaaagccagcatccgtgccagggtggagcacccgtttcgcatcatcaagcggcagttcggcttcgtgaaagccagatacaaggggctgctgaaaaacgataaccaactggcgatgttattcaccctggccaacctgtttcgggtggaccaaatgatacgtcagtgggagagatctcagtaa

SEQ ID NO: 385964 - DNA, 249 bp, Salmonella enterica
gtggatctcggacacgaactccgtgacttcatagaatctctcattgaatcaggtgattatcgtacgcagagtgaggtgatccgcgagtcacttcgtctccttcgcgagaaacaggcagaatcacgtctccagaccctgcggaatttactggcagaaggcctgagcagcggcgagcctgtggtgtgggaaaaggacgcgttcctgaaaaaagttaaagcaggcacaaagcctgccggtgaaaaacgttaa

SEQ ID NO: 385965 - DNA, 162 bp, Salmonella enterica
atgaattttcatcagactggcacgtttgatttcattttttgttgttggtgtactgtctctgaatgcccatttgtaaggtgtcaggctactaatcttgaaacctacaattccaactgtataaagacaaagcattatttcattaatgacatcctgttctcttga

SEQ ID NO: 385966 - DNA, 1071 bp, Salmonella enterica
atgagcataaaccctataataataaggcaaaattttaaaatcggcgaattggacgctgaatcagacacacttctcttggaaaactgttttattgatagtggttatctttctaaactattaaacccatctgatacatcatctatagttataggaagaacaggcgcaggaaaaagtgctttgttgcacatggtggcaaacaaagcacataaatataaaaaacttgaccctaatgatatttcaataggttttctagagcattcagatataatttcattttttgaagagttaaatgttaatcttgatatgttttataaagtattatggcgacatattgtaattatggaattattaaaaatacgccatgacattaagagtgaatctgatacgaatagctttttctcaaacttgcttagcaggctaaaaaaagatgagataaaacgaaaagcccttgagtattttagggagtggggagataaattttggatagatactgacacccatcttagggaaataacatacaaactggaacgtgatactaaggcttcgattggcacagaatacagtgctgtaaatcttagtgctgaatatgcaaaaaaactaaccgaagaacaaatacatgatgttaagaaacgagcaaatgaggttgtcagtaggttacagattcaaaaacttaatgaaatactttcattgcttgctgaatattcttttgatgacccacaaaaaaactattacatcattattgatcaactggatgataactgggcggaaaatgatacaagatataaatttataagagcgctaattgaagagattaaggtgtttcgtaaaattaaaaatatcaaaataatagctgctttacgcctggaccttttacgatcagtatttaatattacaagaggctctggttttcaggaggaaaaatatgagtcatatatacttgatataaaatggacctctcaacaactaaccgaattagtccaaaaacgagtgcgagaggtatacaaaagacaatatactcgagaagatgttactattaaagatatatttccaaaagcaaaggggggcatttag

SEQ ID NO: 385967 - DNA, 204 bp, Salmonella enterica; identical to SEQ ID NO: 170106

SEQ ID NO: 385968 - DNA, 810 bp, Salmonella enterica; identical to SEQ ID NO: 170105

SEQ ID NO: 385969 - DNA, 363 bp, Salmonella enterica; identical to SEQ ID NO: 170104

SEQ ID NO: 385970 - DNA, 2622 bp, Salmonella enterica
atgtatcccgtatttgagaatggatcctgctgggtcaaggtggattttcacctgcatacccgggcagataaggaatttcgctatgccggagaatccgacagatatattcgcgactacgtcagtgcccttaaaggggcggaagtgggcgtcggtgtgatcaccaatcacaataaatttgatcccggcgagtttaaggcactgcgtaaagccgcgcgccgtgaaggcatggaactgcttcccggcgtggagctgtccgttaatgatggccagtccggtgtgcacacgctcgtggtgtttgctgatgagtggttcatcaatccgcagcagacaaaccatattgaaagtttcctgacggccacgtttgcgggcgttgataattttgagaacgaaaatgcccgttcaacagaaaatatcacacagaccatccagcgccttgaccggtacgaacgggattactttattgtgtttgcccacgtggaggcccataacgggttatggggtgggctgagccctggcaggatcggggagctttttgataacgagctcatccgccggcgcgtgtcgggatttcagaaggtgatgacccatgacctgcgggtcaaaattcatggcgtgctcggtaagcgctatcctgctgaagtccagggatgcgatgccaaaacgctggatcatattggtgccagaaaagccgccagctatctgaaactgggtcattacagttttgaagctgtccgctttgcgctccaagattttccccatcgcgtaagcgtggagaaaccggctctgatccacagccatatccgccagatagcattcgagggagccggttcgctcggtggaaccgtggtgaaattatctccggaactgaacaccctgattgggatccgcggcagcggcaaatcctccatacttgaagggatccgttatgccctggacattccgtttggtgagaaggcttctgaccgcgattacaaagaaaatctggtcagtaatttactcaaaagcggagggaaaattaccgtagacgccgtgtgccgtctcgggcgggcctatcagataactcgcattttcggccaggagccgcaggtcatttttgacggtcagcccacgcaaggtgtcgcgctccgggaaacggttctgcacaagccggtgtattttggccagaaagatctctccaataccggcgcgggatttgaatacgacctgattgaaaaactggtcggggagcgtctggccgccgtgcggaacaaaatccggcagcagaatgaagtcgtcctcgacaggttacgcgagtatcgtcgtctgaaaacatcaggagaaacactcgccgaatggcaggcgaaagagaaggatgcacagttccgcctgcgcttttattcccagcacggtatggaagaaaaactggcgcgtcagaccaccttcggacgggatgagcgctatctcagcagtaccactgaacgggcaacccgggcgctggacagtctgcaggacgggatcagggaaactctcgatgggctgaagcaggagcagaaatatgagtcagcgcataaccaggaagacattgatgattactgtgcgggatatgatcgcttcacggcccacctcggttccctgaacaccatcgtagacggcgcccgccggctcctcacagaactcgatacgaagcagcaggcttttctggagaaaaagctggcgctgacggaggaatttgccgaaatagagcgtggcctggctgaagagctgcggctggcaggtgtggaaaaagccgatccggctgactttctgaagctgaaggccgagctggaacttgcggaacagaaaattgacgagctgacccgggctgaaagcagtcaggcgttactggagaaaagtcttacagaggcgctgagccgattgtatgaactgtgggtggaagaatataaggaaattgaagccgtgttggccggcatcagccaggccgactcgcccctgaagatcgtggcgtcttttgcaaacgacaaaaaagccatgcaggccgttctgaaagaggcctttaccggcagccggctgcgggaaagtacctaccagaccgtggctgacaccttcagagactttggtgaactctggctgaacagggacaaactcccggggattatcagcggctctgcagagacattcagcgagtatctgaaacagcagattgaatcgctgattgcctggcaaatacctaatacctactccattgaattccggggcaaaccccttgaacaacattcgctgggtcagcgcgcctcagctttaatgctgtttgttctgaatcagcaggataatgatgtggtgatcatcgatcagcccgaagacgacctggacaatcagacaatttatgacgacgtgattaaaatcatccgggcgatgaaaccccgtacgcaatttatctttgccactcacaatgccaatattccagtgctgggagatgcagagaatgtctgtgcctgtgaatactcagacggaaagatccaggctgccggtggaggcgtggatgcccctcttgtacaacagcacattatttcagtgatggagggaggacgggaggcattcgagcgacgcagggaagtttacggttcatggctaagtaaaacctga

SEQ ID NO: 385971 - DNA, 2208 bp, Salmonella enterica
atgaatagagatcaattttccatatcattaagtaacttaaaaaaatctgactgggaacgatttgaagaattaagctctagttttttatcggttgaatttgcaggattaagaaccatggcttcaccatctggtgatggaggtcgagattctgaaatatttaatcctaatggtgtttctcatattgcaattcaatattctgttactgataattatgaagataaaataaaaagaaccgtaaaaaaattaaaggataatttcaaggaggttactcttgttatatactgcacaaatatagtaattggtgcgaaaggcgataagataaaagcagcctgcatgttggataatatttacttggatatacgagatgcaaactggtttttagaaagatttgagtctgatgaagtttattcagtagcagctaaaaggctttttgatgccgtgggaaggccagttttagaagatttaaaattaattgaaactgaacctaataagttaagcagcgttgaagctaaggctgctttaacgtttcttggtttgcaatggagcaatgaggataatggtaagggattaacaaaaatagcgtttgagtctttagttagagctgcgttaagaaatacaaacagcagtaacagaatgaaaagagttgacattcataaaactattatgaattatctaccaacaacaaacaaagaagatattgtaaagtatgctgatgctgcattgtcaaaactggtaaataaaacggataagaaaaactcaattgttaaaatttgggataaggatgatgagttttgcttgtcctatgaggaaatacagaggatagagattaacttagagaaaaataaggttgaagagagtatttttaataaagaggttagtgcattaatcgttaatgaggtgtcagatggagatgtaagtgatgatactattgaatttttaacagttaagatattaaaagtgttagatagatttctatttaattcaggagaggaatttgctttatctgtgataaaagaaagtatcattgtgaaaaatgaaagtgagcttaaaaattgtatttttgaagagatagatcaagagggttttaaccttcctgactttcctgatatagctctaaatgtaatttcacacatattaaactctaggtctagagtaataattcagcatttaaagaaagcttctgacatatatacattattttcatttttgaaagaaacgcctgatattcaaaaggttacaaggaaaatatttagttatggaactatttggttggataccacgattgtactccctcttttggttgaatcaatttacaaagatgaaaaaacaaaaaaattcactgaaaccttacttcttttaaatgatagtggaattaaattaaaagtaactgaaggtgttgtagatgaaataatacagcatatcaatttgtcgaagcattgttctcgaactttaacttcagaatggagcggtagaattccatttttatattatcattatcttgaggaagggcataacccatcggatttttcttctttcatcgagttgtttcatggtgaagaaagaaagttcgacgatatgacagattatttgaatagattttttaaaattcaagttgagtcattgtatgatgctagtcaggaagttgatgaagatgtacgattttctatagagtcaatgtggagaagagcacatgaaaccagaagatcaaatgttaattcagatagaaaaacagagccccacgtaactgatattttaattagaaatgatgttgaaaattaccttggggttattgggaagagaagaaaggaaacctcttctgaattaggttataaacactggtggttgacaacagataaattggcttggatgataagacgtgatatcagagagaaaattaaaaaccctccgtcttctccattgatgtcattaaattttatatcagtaatgctttcatttagtaccattaggcataatataaaaaaagatgacaggagaactttacctttgtttttcaatatcgactctacatattacatgcctaaagatttaattgatattgcaaatgaagtcagaatgaataataaagataaacctgagcatattataagacgaaaggttagagatgcttgtgatcatatgaagaggcgatatggtaagtatgcatcttctggtaatgatataatgaatgaaattttggatgtcaaatga

SEQ ID NO: 385972 - DNA, 441 bp, Salmonella enterica
atgggtgcaatttacaaaggactacagttcaaaacagcgctggaagcacgatgggcagccttttttgaccttgctggttgggaatggcatgtgaatcctgcatgcgttggtgactggtctcccgatttctgggtcagttttccgtgcgatcactcggaatgtcatcgccacactttacttatagcagtattatctattgataatattaaaggttttgattatcacccaagcttaaagcatgctttctctatcgaagaggatcctcagaggattcataaatttgttgaggcaggtgccgcttttggtagtaatccagatgtaaccacttggcaatcagctcacggctccggcggcggaacgcacaatgttccattcttcgtgccagacgccagtgagctgtggcgaaggactgaaaacttagtgcttcgccaatcggtttaa

SEQ ID NO: 385973 - DNA, 636 bp, Salmonella enterica
atgtgtgatttatgcagggcggatgagaattacttccatacggcagaatgcgtgtatgaccagctggtcagtgaataccccgtgatgtggctgcgggactcgacccggatcggggcctgctacacccttcgtgaactgctgtcgccggaagggatggtgctggccatacagaactctctcccgatgaaggggtggcggcttcgcatgcgttacaacgaagccattgacgaagaaattaacccacagcatggtgactgtattgaactgccctccagagcggatgccctgcaggctttcgtggggtcagggtcattaccacaattactgaaaaccgataatggctctgaatttgcagggaaaatgctggacaaatgggtatatgaacgagggatccgtatagacttctcacgcccgggaacaccgacggacaatgccactgtggagtcgtttaatggcaggctgcggcaggaatgtctgaacgagaactggttcatgtccctggaggatgcacggtgcaaaatcgaggcctggcgcatacactataatcagagacgtccccattcagcgctgggctggatgacgccatctgaatttgccgagaagtctgtcggttgcaagaatattcagccaacatga

SEQ ID NO: 385974 - DNA, 378 bp, Salmonella enterica; identical to SEQ ID NO: 383344

SEQ ID NO: 385975 - DNA, 219 bp, Salmonella enterica
atggcatcagatgatagatacagtattaacttcacgctatctgttttggaaaaaacagaagcaagcaaattgataaaagagcatgaaaaacaagaaaatatagaaccttatggctatattttgcttataaaaaaggcagcattgttagttctttcatttgcagcattatttgattttataatacttttgtttgattactctagccccaaaagcccctga

SEQ ID NO: 385976 - DNA, 861 bp, Salmonella enterica
atgatgaatatagtaaacacaatcgaatttatggtaaaagacattaataaatatctggatgatatcactctgaacgccatcacagtggatggcaaaactatattaaaacttgaggatatgtccaataaaaatatatcccctcgccttgaaaagatactcagaaagcttataaaaattgaagttgaacatatacataactttgatttcagtaagctccagtctcttgaaaactccaagagtttcgaacatcttccagctaaaagtaaaaaccctagttgctacagagacctgtattcgtggggaaagggaatgcgtcacacagaaaaactcagggcagaagacgagtccgactggaaaaagaatatacaacatatagaagaagaaggattccgtcgtaataggccaattgaaataacatactacacatggcttgataggtattttgtatcaaatagtggaggttctcatcacgcagcccttgttgtctggcaatcagttcgagacaaacttgaatacaaaagggaagccaatataactaaactcagcattgataaagactccataaaaaaactgaatagtgattactggtcttttatactaaacttcagatatcaaaccaacataaatacattatttaatctgttcaatagcctggtcagcaagcatacagacatgctggaaccaagtcattatcatggcaattacagattgttttttgtccctaaaagccagctaaagatgaacaagtatgcttttgaatactggtacagaaattctgttaaaaataaaaagataattgcactacctgagtacttagaaaacccacttcagtttcataccgggggcattctcatccagtag

SEQ ID NO: 385977 - DNA, 357 bp, Salmonella enterica
atgaaatatcaggtgagaaaatttattactgataaatatgcgaaggctgttaatattttaaaggataatcttaaagaacactatcatgttttttatggtgttagattaagtgagattctttttcctgccggtgagtatggctctgaacaattttttagtgattttgaaaagataaactcgattttattacctcttttagtgtttgatctcaaaaccgatgttcctgtgattgtcattagccttgatgatgtcagttattgtgatgttctgaacgaaatagatattgattttatgaaatgtaattcgctggcagaattgcttaccagcgataagctggatgcgttatttaaggattga

SEQ ID NO: 385978 - DNA, 318 bp, Salmonella enterica
atgatatccattaagagctattttaactggaataagttatttatgtttttagctgtggccttatactggttttggcgtgttctctccagaagcacaaagctgatgccagtaatgctgttagttacactggttatagcattttactttgcgcctgaacaactttttactgatgttattaatacatgggaaagtgctactacaaagcagagaattacactagcaaggcttttctttaaatccgcatttctcttgtcatttgcatcctgttttctggatgaacttattacatatccacaaaaaggtgaacataagttatga

SEQ ID NO: 385979 - DNA, 342 bp, Salmonella enterica
atgaatgattgtttcggttgtatgcatccatatccggctggtcactggttttattctttacaggattttacaccactacttgaaaattctcttttctacgtctttttcttttttttcgcgggtatggcaggtgtaattatatcaagaataactaatttaattaagtcgatgagacatgacaataaaccatcaatagataattatgaacaaatagaaatagaacgctatatgacaaatgaggaggtaggcagactcgttatcaattttatgaaacgcaccaatggtgaaccgttgctgattgtttttcctgaatatgataatggagacgagaacagaaattga

SEQ ID NO: 385980 - DNA, 1263 bp, Salmonella enterica
atggggaaattatctcttgtagaacaggcgttactcctccataaagaatattatggtgaaggtgactttggcactgttgtaaaggattatgattattatcctaaagttgctgagatttttataaatagaaaaaaccgtaaaatttactccaatctggatattgaacctgttgcctcaactgttgttcatacgggaagtagtccagtgatggctaaagcaggacgaataaaaaaacttatgtttaaagatggttctggtgcatacaggattcatcttggtcaaaatgaagtggttcatattattcgctttattcttaactctaaagtcaggatggagtacgccgttggtactactaaaagtatgtcaatgctccataatctttgcgaggcaggacgggctaaattaaaccgttccttaccacgtaaaggtatctggaaacttgggtattatgatggggtttattatcacggaaaggcaagaaaagaagagattgaaaatgctatgcgtttctcagttcatccaaaatttgacgagctggaaaacgactttaatcagttcttttctgatattgatttctatacccggtatggtcagtcaggtatgcgaaaagtgctctttactggccccccgggaacaggcaagacaactatcgcaaaagctttgggggcaaagtatcaggataagtatgtttttgtttatgccgacgattacttcaaagatgtttgttacgccgctgctcagaagaaaatacctgtcattattatagccgaagaggttgatgagctttatcgggctgatgccggaacgctaagttttctcgatggagctgatactccgcgaaatgttgccggaacatatgtgattttttcaacaaactatcctaagcgtattgacccacgcattagaaaacgtcctggtaggattgacaggataatctctgttggtgctttcagaactaaagctgctgccgcttgcgccaaaatgtacttaccagaagatgtagaaattgatcttaaagagcttggcgcagtgctggacagaactacccctgctgaaattaaagaaataattaatatcgcaatcggaatgattcgaggaaccaaaaatgaattatcagttgatgtaataaaaaatgctcgtgcctttttgaaaggaacccttgatctgagtgtgcaggaagcagatgaagatatagaagaaagggaagaattttataaacagaatggggcgcaacctgactatttaagttacctggaggattaa

SEQ ID NO: 385981 - DNA, 207 bp, Salmonella enterica
gtgaaaacaaagcaggaatggctttttcagttaagaaaatgtacatcgagagatactcttgaaaaagttattgagataaaccgttacaaactgcctttatcagaatcagaggcattttattctgccgcagatcatcgtcgcgcagaactggttatgaataaactgtatgataaggttccttccggcgtctggaagtacgtccactaa

SEQ ID NO: 385982 - DNA, 156 bp, Salmonella enterica
atggcgcttgtcatgatatatctgctgttttttacattttggcaaaggaagttggatttgaaccaacacttcttattggagaagttcgtaaccctgcaacaggttcgtattttgatcactcatgggtttgtattgatgagaaaatctatgatgtag

SEQ ID NO: 385983 - DNA, 201 bp, Salmonella enterica
atggaatttggttttcatagtgagcatgggttggatgatactgcatcaaaagtatcaaagtggactctcagggagtatgataaagaagccgccgcatgtgtctggaaacactccatacaaattggtaagtgtatcgggttgcatttaacagaaaagtatcttgttgatacgtatggcgatgtttcaagaacattagcataa

SEQ ID NO: 385984 - DNA, 249 bp, Salmonella enterica
atgtccccgcaaaccaacggcatctgcgagcggttccataaaacaatcctgaacgaattttatcagataacgttccgtaaaaaactgtacggcgatcttgatacattacggtcggatcttgatgaatggctggctcactataataatgagcgaacccatcagggaaaaatgtgcaatgggcagacgccaatggaaacgttacttgatggaaagcgcatctgggccgagaaaaatttaagccagatgtaa

SEQ ID NO: 385985 - DNA, 348 bp, Salmonella enterica
atgcttcatactaccaatcccgttatcaaacacaaagccggtttgctcaatctggctgaagaactcagcaacgtatcaaaagcctgtaaaatcatgggcgtttcgcgtgatacgttttatcgttaccgcgaactggtcgatgaaggcggtgtggatgcgctgattaatcgtagtcgccgcgctcctaaccttaagaaccgtaccgatgaggcaactgaacaggctgttgttgattacgccgtcgctttcccggcacacggtcagcaccggaccagcaacgagctgcgtaaacaggacgtttttatctccggcagtggtgtccgttctgtctggttggttaccccataa

SEQ ID NO: 385986 - DNA, 2532 bp, Salmonella enterica
atgattgatttcacaaataaactcaagaaaaaagaactcccaaagagaatcaacccagttgaaatatatgagtcattagatagacgtagcgaagctggtccattacggccttcccaaaaaaccattctagaacaatggtttaacagtaggcgtaacgaaagggataatataattaaactacacaccggggaaggtaaaacattaattgggttgctaattttgcagtctaaaatcaatgagaccaatagcccttgtttatatgtttgtcctaatatttacttggcaaagcaagctgtcaaagatgcagagaaatttggcatcccttattgtataatcgatcatagtaaaatgataccggatgatttcctttcaggaagaaaaatactaatcactcacgtccaaaaattattcaatgggaaaactgcttttggcttgggcagtaagtcaattcatgttaattcaattattttagatgactcacaagcatgcattgactcaattaagaacagctttactattaaagtagataatgaaagcgatctttacaaatcaatattaaatattttttctgatgaactacgtgaacaaggtgaaggtagttacttagaaatgcaaaatggagttggaaataatacattacttccaataccatattggtcatggattgataaaaaagagttggtagcgcaagaattacttaaaaatattgaagataaaagagtgtctttcatttggcctttgataaaaaatgaaatacacaactgccaagcatttctatctggtgaatatttggagatttcaccaattttttcactaatagattcctttggtagcttcagtaaggctaaccatcgttttctaatgtctgcaactacacaagatgattcattttttatcaaaggattaggctttgacgtcgaagcggttaaaaaacctttggtgaatcctgatcttgtttggtcaggagaaaaaatgattctaataccatcattaattgatgagacattagaccgtgaaaagatcataaactggttgcttcgtccaaatgataaacgaacatttggaacagtatgtttagcacctagctttgctaatataaaacaattccagcgaattggggctattgtagcaactacagagacaatttacgactgcattgaaaagttaaaaagaggtgaattttccaattcaatggtctttgcaaaccgctacgatggcattgatttacctgataattcatgtcgtattttaattattgactctaagccatactctgaaactttaacagatagatatgaagaggaatgcaggccaagcagtgatatcattaatgtaaagacagcccagcgtgtggaacaagggttaggtcggagcgtgaggggcgaaaaagattatagcgtaattataatcaccggtggtgatcttgttcaatttttaaaaagcccattaactacaaaatatttctctcctcaaaccagaatgcaaattgaaataggaggtcaaattgtaggttttgctaaagatgaaattgatgaaggtgcagaggctgataaattattcgtcggattaattaataaatctttgcaacgtgatgaaggttggaaagagtattatgttgaaagcatgaatgaaattgacattagagatagaaaagataatctttatgatctaatttcactagaatacaaagctgaaaaattatttatcaaaggtgatttagacaaagcatgtgatgtattgcaagatatttgtgatagatatattgaggatgaaatggagaaaggatggtatcttcaacttcaagcgaggtacaaatatagtataagtaaaattgaatctaataaaattcaaaaatcagcgttccagcgaaactgcaatctactcaaacctaaagatggtgttatatataaaaaaattgacaacatcaatgctaccagggcaaatagaataaataaatgggttagcgcacatactgattatcaatctcttatgatttccgttgatagcatcttgcaaaatatttcctttggcattcaatctgacaaatttgaagatgctttgcataacttaggtgtttctattggatttgtttgccaacgacctgataaggaaatcaaaaaaggacctgataatctatggggggatgtagatggacagtacttcctctttgagtgcaaaaatgaagttgatgaaaaccgttctgaaattaataaaatagaagcaggtcagatgaataaccactgtggctggtttgcagatgaatacggtaatgcaaagtgcaaaaaaatcataataataaacacaagaacactttcatatcatggagatttcaatgatgaaatatttgttatgcggaaatcaaagcttaaactattaaaggataatgtaagatcttttttcaaagagttcaaaaattatgacttgcaatcattggatgagaccattatccacaagtttattaagccacataatttagatattgaaagtctaacttccatttacactgaatcaataatcaaggcaaaaaaataa

SEQ ID NO: 385987 - DNA, 186 bp, Salmonella enterica
atgttcatgcaaatagacagacgcatagatgttaatggtaattcatacttagttagatgcgaagagaggcctaacggtgagtggcgtgtatatgatattgaccgtaaggtcaatatcagcaccatgaacaaagacactgcctttgatgaatggaaagctgaagctaaaaaacaacataattcgtag

SEQ ID NO: 385988 - DNA, 393 bp, Salmonella enterica
gtgtcctgtgcggtaatctgctgctatcgagaacgacagacatcgctaacagtatatatggaaacatcaaaagagaagacgataacaagcccagggccatacatagttcgattacttaacagctcactgaacggctgtgagtttccattgctgacaggccgaacactctttgtggtaggtcagagtgatgcgctcactgcttcaggtcaactccctgatatacctgccgatagcttttttatcccgctggaccatggcggagtaaattttgaaatccaggtggatacggatgcgaccgaaattatactccatgagctgaaagaaggaaattctgaatctcgttcggtgcaattaaatacgccaatacaggtcggtgaaggctttgttgaataa

SEQ ID NO: 385989 - DNA, 873 bp, Salmonella enterica
  misc_feature (846)..(855): n is a, c, g, or t
atgaagacacatattcttttggccagagtgctggcatgtgccgcgcttgttctggttacacctggttattctagtgaaaaaatacctgtaacgggaagtgggtttgttgcgaaagacgatagcctgcggacatttttcgatgccatggcgctacagctaaaggagcctgtcattgttagcaaaatggcggcacgaaaaaaaattacgggcaactttgagtttcacgatcctaacgcattactggagaagctttccctacaactggggctgatttggtatttcgatgggcaggctatctatatttatgacgccagtgaaatgcgcaatgccgtggtttctttacgcaacgtctcactcaatgagttcaacaattttctaaaacgctcaggtttatataacaaaaattacccgctacgtggcgataaccgtaaaggaacattctatgtttcagggccacccgtctatgttgatatggtggtcaacgccgccaccatgatggacaagcaaaacgatggtattgagctgggacgccagaaaataggggtgatgcgtctgaacaataccttcgtgggcgatcgtacctataatctgcgcgatcagaaaatggttattcccggtattgctacggccattgaaaggttattgcagggagaagagcaacccttaggtaatattgtcagtagcgaacccccggcgatgccagcgttttcagcgaatggagaaaaaggtaaagcagcaaattatgccggtggcatgagtctgcaggaagctttaaagcaaaatgccgcggcgggcaatattaaaatcgtggcctatccggataccaacagtttgttagtaaagggnnnnnnnnnnagtaaagggaacggctga

SEQ ID NO: 385990 - DNA, 756 bp, Salmonella enterica
atggcggaaatagcggttataaaccataaaaaacgtaaaaatagcccgcggattgtccagtctaacgagctgactgaggcggcatatagtctctccagggatcaaaagcgtatgctgtatctgttcgttgaccagatcagaaaatccgacggctccctgcaggaacatgacggcatctgcgaaattcacgttgctaaatacgctgaaacattcgggctgacctccgctgaagccagtaaggatatacgacaggctttaaaaggttttgcgggtaaggaagtggttttctatcgccctgaagaggatgccggcgatgaaaaagggtatgaatcctttccctggtttattaaacgtgcgcacagcccatccagagggctttacagcgtacatatcaacccatatctgattcccttcttcatcgggttacagaaccggtttacgcagttccggctcagtgaaacaaaagagattaccaatccgtacgccatgcgtttatacgaatctctgtgccagtaccgtaaacctgatggctcaggtgtcgtgtccctgaaaatcgactggatcatggaacgctaccagctacctcaaagttaccagcgtatgccggactttcgccgccgtttcctgcaggcaagtgttgacgagatcaacagccggacaccaatgcgcctttcttacatcgagaaaaagaaaggccgccagacgacgcatatcgtattttccttccgtgatataacctccatgacgattgaatag

SEQ ID NO: 385991 - DNA, 276 bp, Salmonella enterica; identical to SEQ ID NO: 190696

SEQ ID NO: 385992 - DNA, 2196 bp, Salmonella enterica; identical to SEQ ID NO: 222351

SEQ ID NO: 385993 - DNA, 1317 bp, Salmonella enterica
atgtctgtaacacgcataagagtgaaagaacgcgacgctattattcagtcacttaagtcaggtgtaacgccaaggataggcattcagcatatccaggttggccgcgtgaatgagatcaccgctctccatcaggatattgagaggattgctgacggtggtgcaagcttcagacttatcatcggtgaatatggttctggtaaaacgttctttctgagtgttgtgcgctctattgcgctggagaagaagttggtgtcagtcagtgctgacctttctcctgacagacgtattcactcatcgggaggtcaggctcgaaatctttattctgagctcatgaaaaacatgtccaccagaaacaagccggatggtaatgcgttacttagcgttgttgaaaggttcgttacggaggcaaggaaggaagctgacacggacggctccgaggtttcatcagttattcataaacgcctggcagcactatcagatatggtcggtggatatgactttgcgaaggtcattgatgcattctggcgggggcatgagcaggataacgaaacgctaaaatccaatgccattcgctggttgcgtggagagtacactactaaaactgatgcccgtcacgatctcgacgttcggactattatctcagacgcatcattctatgattctttgaagctgatgagcctttttgtccgccaggcaggctatgccggtcttttggtcagcctcgacgaaatggtgaacctcttgaagctgaataatacgcaagcaagaacagcgaactacgaacagattttgcggatcctgaatgactgcctgcaaggctcagccgagaacattggttttatcctcgggggtacgccagagtttcttttcgatccgcgtaaaggtctttacagctatgaggcgctccagtcgcgtctggcggaaaaccggttcgcgcaaaaagcaggagtgattgactactcatcccccactttgcatcttgccagcctcacccctgaggaactgtatattttgctgagaaatcttcgtcatgtttatgccggtggagatccagagaattatctggtaccagatgaggcactgactggattcctgcatcactgtagtaaaaccattggagacgcttacttccgtaccccccgtaataccataaaaggttttctggacatgctggccgtgctggaacaaaacagaacgatgaactggcaaacactaatcgagggtgtggcgattgaagaggaccggcccagcgatatggatgacaccactacggaggaaagcgatgacgacgacggactggcgaacttcaaactatga

SEQ ID NO: 385994 - DNA, 2310 bp, Salmonella enterica
atggagttattgaagtttttggcggcgatttttgtcatttacttgttgttttttagaaagaaaaaacgtaaatctccaaagtcttatgcttcagaccccgtgaaagcaccgccaaaagaatggctcgctgacatcaagaaaaaagaggcggttgtgcgaaacgatgatagtgaagacgataaccttgcaacttttacattgagcggtggccggggtgttgaacttcgggtgacaaccaatcattaccgcaacacctcaaagtcagcaggtgcactagctcgatgggtacttccgggtgagatgataactgtagctggtgtagcaattagcggtggccacatttacgtggggcaacgtatgaagccctccggtcaggaatcaggcggctattatgacgatggaagtgaggcatcattaattgatgacacatgtaagataaaacctacttcttatctttacgaggacagttcattaggatactggcccagtttttcctctctttccccagaagcacgcggtgcgtatgtcagttggcttgccagcgataggtctgatccatcgtgtcctatcggctatgtttttatctacctctacggcctggaaagaaaagcgctcgtagattccactgacccaaaattccctgatgctgagttccgtaatctgttcaatgaagtcgctcggttaagatcgatattcattgagaaccgctccttccgtggatattcgacccaattactcgaagccatgtctattctgcgcccgaacatgggcttagccactgagctcgatagcaattcaggtttcagcaacagcatgcaatttaagctggctcttgcaaaaactgtacatgaaggagttcctgtatcagctgaactggcgttgaactgggtaataaaccacaccgagtattcgctgcgtaccccggctcgccgctgtgctaaagagtttgctgcacttttcaaacggcgttacaccctcaaatatggtgaagggatggtcgttaaggcgaataaaacgcgcctaaggttagattacacaccagcaagtcctagtttgcgaggtgttcgacttcctgttcccgacctgcctgatccaagtgcgttgaagagccctgtccagaaaattatggctcttgccgatatatgtacagatgaacttgatgcttatagtcgctaccttggtaggaaaggtacgtcagtcaatgatacggctgcaattatgctgctcccttcagagatcgttaatgaaagcgcagaaaaaatattaagctcattcaaacgctgggctgatgaggcgatcctcgtcaaggagggattagtctcagttgctgacttttgggcacatatgaatgccagttgccccaataagatcaataaaaaagaggccgatttgatgcaggcctttgctctgaagatgggttacggtctggcacctgacccgtattatcaccatgtgaaggcggatgttgatgggacacttgttctattccctgccgccgaaggtggacgcttctcaccttctcctgaatttatctcagccgtaatgacgctcagattaggggcgatggtcgccttgattgacgattctcttgatcaagctgaacagaaagtgcttgagaatgccatcaacaacaatcctggcttcaccgatgatgaaaaacgctctctacatgcgtatttaacgtggcaacttcataccccagccaatatgacaggaatgaaaagtaggattgagttgatgggggccgcggaaaaagctgctgtgggtaaggttatcgttagtgttgcctgttcggatgggacaatagcgcctgccgaaatcaaacagcttgagaagatttattcaagtttggggctggatccctcatctgtctcgagcaatatccatcagcattccgcaactgaacatgatctcgtctcgtctgtaccaactgatcagccagcagcagggttcacactggatgctaatgtacttgcccaccacgaatctgccacggatgatgttcgtaaattgctgaacacaattttcaccgaagaagaaccggaagagccagaaagcgctccagcctcatcaacggaggcggggggacttgactccgcacatagccagctttatcgcagtttgctggagaaagaacagtggtcccgaaaagaggcgacagaattgtgcggaaatttgaatttgatgctcggcggtgcgcttgaggtgatcaatgactggtcctatgcggtggttgatgctccagtactggacgatgccgatgatgatatctgggttgacctggaaattgccaaagaattagagggatag

SEQ ID NO: 385995 - DNA, 858 bp, Salmonella enterica
atgaatcttcgtgaaaatattgtgagccaattcagcctgctgtcgccagaactccagcgcgcggcggaattttccctgcaaaatgccaaccaactggtggtgcaatcaatgcgcgccttcgccgcggaagccggcgttaagcctgccacgctgctacgcctggcgcagcgtctgggctataacggttggcgggagctgaaaagcgcatttatcgacgatctcggcttaggaaatgatacatatgtatctaaggctgaaaaattgatcgccaaaggaacgcagcccgcgctgtacgaagaggtgttcctcgcgcatcaggccaatctggcattcactcaggcagagaatcaacacgctatgcagcaagcggtgacgttgctggatgaagcgaagcaggtctatatttgcggcttccgcgccagctttcctatcgcctggtcgttgttttatgtctatcgattgttcaatcgtcaggtatcgctgattgacgggctggccagtaatatcgaagtcttcacccgtgagatcaatgcggaagactgcctgctattgaccagcttttctccctattcccgcgaatctctcgacgttctcaatgcagccaggcaggccggggcacggattatcgccatcaccgactctccggtttcgccgctggcgcaagcggcggactgcacgttgcttttctccctcagcagcccctcttttttcccttcgatagtgtcaggtatgggcgtcgccgagtgtttgctggcgatgctggttgcccgccacggtagggaggcggtgaataaaattgagagcgcagaacgttatctgcaacgctccggggcgtatgtgatgcccgataaatcctga

SEQ ID NO: 385996 - DNA, 1344 bp, Salmonella enterica
atgagtcaaatcattcaccgcagcctccgtaccaccccggcagtggcagtcagtgcccagggcgcttacatcaccgatgccagtggtcaacgctatctggacgcctgcggcggggcggcggtttcttgtctgggtcacgcccatccggatgtgctggcggcgatgcaccggcagatcgatcggttggcctatgcccacaccagttttttcaccagcgatacggtggaacaactggcagagcagcttgtccgcaccgcgcccggttctctgaactatgcctatttcgtctccggcggatcggaagcggttgaaacggcgctgaagctggcgcgccagtattttgtggagatcgggcagccggatcgcacgctatttattgcccgtaaacaaagctaccacggcaatacgctgggtgcgctggccgttggcggtaacgagtggcgccgccgccagttcgcgccgctgctgatggatgtggtgcgcgtgtcggcctgtaatgagtaccgtgaccgtgaggcgggtgaaagccagcagcaatataccgagcgcttacttggcgaactcgaagcggcaattctggacgccgggccggaaaaaattatcggttttatcgccgaaacggtggttggcgcaaccactggcgcaatgccgcctacgccgggttatctgcaaggcgttcgtcggctgtgtgataaatacggcattctgtatatcgccgatgaggtgatgtgcggcatgggccgtaccggcacgttgcacgcctttgaacaggatggcgttgtccctgacatcgtgaccatcgcaaaaggtttaggcgggggttatcagcccattggcgcagtgctggccagtgagcaaatcgtcgccgcgctgcaggccggtagcggaatgttccagcatggtcacacctacatctgccacccgacagccgcagcggctgcgctggccgtgcagcaggttatcgagcgagatcgtttgctcgagcaggtgcagcagcagggcgcgtatttgcagcaggcgctgcatgatgtgctcggcggattaccgtatgtcggtgatacgcgcggtcgcggtttgttcgccggcgtggagctggtatgcgataaagagcgcaaaacggcattcgatccgctgctgaagctgcatgcggctatcaaagcgcagtgcatggcgcacgggctgctggtctatccgatgggcggaaccattgatggccagcggggcgatcatattctgattgcgccgccgtttattgtcagccggtcagaactcgatttcgtggtggatacactgcacaaggtcatcagcgaagagacgcataaactgatgagacgtcagccatga

SEQ ID NO: 385997 - DNA, 552 bp, Salmonella enterica
atgaaccgtttacctgcgctgtcagaacagcagtggagcgatgaacaacgccagcttgcggaggagattatcaacgggccgcgcggcgcgctgctgccgccgtttgaaccgttgttgcgcagcccggaactgatggcccatgcgcagcgaatgggggagtatctgcgctaccgtagcgcgctggggcagcggttgtcggaactggccatcctgctgaccgcgcgtcactggtcgcagccggttgaatgggctattcatgcgccaatagccagggaaaaagggatcccggcgcaggcggtgcaggcaatcaatgaacggcgtcaaccagaggcgctggcggctgatgaatgggtggtttaccatttttgccagcagctgcatcagcataaaaaagtcagcgatgatatctggcaacaggcaatcgatctctggggggaaaagggcgttgtcgatctgattggcatcaacggttattacagctttctttcaatgatcatgaacggcgcgcagacgccagtacccgacaccagggattttattcttcccgcataa

SEQ ID NO: 385998 - DNA, 753 bp, Salmonella enterica
atgtctgcattattgaaaaaattaaagattaccctggcactggttgcctgttcggcgagttttgccgtcatggcacaagataaattattagtcggtgtggataccgccttcgttccctttgaatttaagcaaggcaataaatatgttggttttgatatcgatttatgggaagccattgcgaagaaaatgaatgtcagctacgaattacgccctatggattttggcggtttaattcctgggctgcaatcgcgtaatttagatgtggcaatggccgggatcaccattaccgatgcccgcaaacaggtcgttgatttcagcgagggttattacgatgcggatctcttaatggcggtgaaaagtggtgataattccatcaccaaattcagcgagctggccggtaaaaaagtggggctgaagcagggcaccgccgcggccagttttatgaaatccaaatataaagccaactatgtcgaattccccaatattgataacgcctatctcgacctgcaggcaggcaatctggacgcggtcgttcacgactccccgaacgtgctctactacgtgaaaaccgcaggtggcggtaaggtaaaatcgaccggggaaacggacagcattctgccgcagaaatacggttttgccctgcagaaaaacagcagcctgacgccgaaggtcgatgccgcgttaaaggcattacgcgcggatggcacctacgacaagatttatttcaaatggtttaacaagcaacctaaataa

SEQ ID NO: 385999 - DNA, 657 bp, Salmonella enterica
atgaatttcgaaacgaaatatatatgggaatccctgccgttattattacaggggctgcagctgacaatattgatctctatggtcggtttggcgggcggctttatcatcggtctgctggcaggaatctgtcgtgcactgggaggcggtatcgcgaaaacgttatcattaatttttgtcgagctgattcgcggtacgccaattatggtacaggtgatgtttatctattttgccttgccaatgattctgcctgttcgtatcgaccctatcacggccgcgatggtcaccattattattaactccggcgcgtatattgcggaaattacgcgcggcgcaatttggtccatcaatagaggatttaaagaagccagtctggcgatgggattatcgcagcgcgcaacgctatggcatgtgattatgccgctggccctgcgccgcatgatcccggcgttgggcaaccagtggattatcagcattaaagacacctcgctgttcattgttatcggcgtcgcggaattaacgcgccaggggcaggagatcatcgccgggaacttccgtgcccttgaggtctggacagcggtagccctgatttatcttgccgtcaccctgtgcctgagctttctgctgaagcaactggagaaaaggatccatattttatga

SEQ ID NO: 386000 - DNA, 729 bp, Salmonella enterica
atgagcatggttgaatttagcgcggtcgctaaacatttcggcaccacccaggtgctgcacgatatcaatctgaaaattgatgccggtgaagtggtcgtgattatcggtccttcaggttcaggtaaatcgacgctgctgcgttgtatcaacaagctggaagagatctcctccggcactttgttggttgccggaatgcacctgaccgatcctcacgtcaacgagtgcgaaatccgccgcgaagcggggatggtattccagcagtttcatctgtttccgcatctgacggcgctggaaaatgtgatgtttgggcctattcgcgtacgcaaaatgagtcaagcggcagcccgcgaacaggcgctggcgctgctggaacgtgtcggcctgggcgaacgggccgagcactatccgtcggagctttcaggcggccagcagcagcgcgtggctatcgcccgcgcgctggcggtgaaaccgaaaatgatgctgtttgatgagccaacctctgcgctcgatccggagttgcgccatgaagtattaaaagtgatgcgttcactggcggatgaagggatgacgatggttatagtgacgcacgagattggctttgcacgcgatgtggcctctcgattgatttttatcgatggtggaaccattgctgaagatggcccacctgatatcctgctgaatgccagtagcaatccgcgcctgaaagaatttttacagcacgtttcctga

SEQ ID NO: 386001 - DNA, 1044 bp, Salmonella enterica
atgagactgttaccgggcatggtgatgctgatgctggcgctggttatctccgggtcagcgcgggcaaccaccgacgtgatgccgtttaaagatgaagcgcaggagcagcagttccgccagctcacggagcagctgcgctgcccgaaatgccagaacaacagcattgcggactcgaacgcgatgatagccaccgacatgcgccgcagggtgtatgacctgatgcaggaggggaagagccgccaggaaatcatcgattacatggtggcgcgctacggcaacttcgtcacctacgacccgccgctgaccccgctgacggtgctgctgtgggtgctgccgctggccgccatcgtggcgggcgggtggataatcgtcgcccgcacgcgccggcgggtgcgtatcagacaggacgtcctggccgacgccattcctgcggcgggaccgcgcgccgggtggggtgcttacgtgccgggcgtggttatggcgctggtcgtggccgccatcagttactcacagaccggcagctatccgcaggtcagggcctggcagcaggcaacggcgcagacgccgggactgctggcgcgggcgctggacccgcaggcgcagccgctgaatgaggaggagatggcgcggctggcgctggggctgcgcacccgcctgcagaatgatgccggcaatgttgagggctggctcatgctggggcgcaccggtatggtactgggtaatgccggtaccgccaccggggcctatgcaaacgcttaccgtctggacccgaaaaaccgcgatgcggcgctgggctacgcggaggcgctgacgcgctcgtccgacccggaggataaccgccgcggcggggagctgctgcgccggctggtgagccgcgaccacacggatatccgggtgttaagcctgtatgcgtttaacgcctttgagcagcagcgctttggcgaggcggtggcggcctgggagatgatgctgaagctgctgccggcgggtgacgcccggcgggcggtgatagagcgcagtatccggctggcgcaggagaaataa

SEQ ID NO: 386002 - DNA, 612 bp, Salmonella enterica
atgagtggacgaatcacaaccttatgcactgcatttggggtggttatcgcagcagtgggactttacctaccatataaaaatgaattgaatgctgctctttatcaaagagaattccttaccggaaaatggtcaacagatgctgaatatattattaatagtggggatcttggactagataaaccgcaatcaattatgactgtacaattatttgttgataaagatggttctattgatggtgaatttatctcagaaggattatgtgatgcaatgcctttgacgtggaatataacttttaatagtgacagtccatctctaattaattttatttttgcgagaaaattccaaattagacaactagttaacggggcaatggataaaagccctgttgtagctacattaaaattagttgatgaagatcataaacataattcgatagtgtttgatgtagtcaacgattctaccggaaccttacctaaacaaatcactttagctaaaaaccttccgaaattcgaagaaaactataaatacctacagagttattgcgctaactcaactgaaaagatgtacgaaaagatgatgccagagatcaggaaattgaacaaaggtttataa

SEQ ID NO: 386003 - DNA, 447 bp, Salmonella enterica
gtggccttcatcattgatgtgttcgccggtgttatcgtgggctggcgggtctcatccacgatggaaacgtcgttcgtgctggatgcactggagcaggcgctgtgggccagacgcccgagcggtaccatccatcacagcgacaaaggttcgcaatatgtgtcactggcgtacacgcaacggctgcaggacgcggagctgctggcttcaacaggcagcacgggcgactcatatgacaatgcgatggcagaaagtatcaacgggttgtacaaagcggaggtgatccacaggcaaagctggaaaacccgacaggatgttgagctggctacgctgaaatgggtggactggtacaataatcaccgattgatggaacggaccggatatatcccgccagtggaggcagaaaaagcctattacgcttcgctgaatgaccgggatgtggcagcctga

SEQ ID NO: 386004 - DNA, 972 bp, Salmonella enterica
atgaagcgtgcccctgtcattccaaggcataccacacatactcaatcgactgaagatacttcatcaccggcgccggccgcgccgatggtggattcattaattgcgcgcgtgggtgctatggcccgcggtaatgctatctctcttccggtatgtggacgggaagtaaaatttacccttgaggtgctccggggagagtctgttgagagcgcctcacgcgtatggtcaggaaatgagcgtgatcaggaactacttaccgaagatgctctggatgatctcataccttcatttttactgaccggtcagcagactccagctttcggccgctgggtttctgatgtcatagaaattgcagacggcagccgtcgccgtaaagccgcaatcctgacggaaagtgattatcgcattctggttggtgaactggacgacgagcagatggctgcattgtcccggctgggtaacgattatcggccgacgagtgcttatgaacgtggcctgcgttatacaagccggctgcagaatgagtttgccggaaatatttctgcgcttgccgatgcggaaaacatctctcgtaagatcattacccgctgtatcaatacggccaaactgcctaaatcagttgttgccctgtttgcacatcctggagaactgtctgcccggtcaggtgaagcccttcagaaggcttttgcagataaagaagaattactgaagcagcaggctgagactctccacgatcagaagaaagcgggactaatctttgaagctgaagaggtcattagtcttttaacatccgtactgaaacaatctcgcgcatcaagagttaatctgagttcacgtcatcagtttgctccaggggcaacagcattgtataagggcgataaaatagtgcttaacctagatcggtcccgcattcctgcggagtgtatagagaaaatagaagccattcttaaggagcttgagaaaccaggagtctaa

SEQ ID NO: 386005 - DNA, 450 bp, Salmonella enterica
atgttagccgggcgtgactatgtcaaacatgcgcgctgggttgaactgtggcgtgagtgcctgcgggtcagctacgatccgaatgttgatgtccgggcagtgaaaccccgcaagccgaaggacggcgaatcgctggcctgcgcgaccgctgaactggtgcgcggcgcagtggccgaaaccctgaaatattccacgaagccggccgacatggtggccgatcctgaatggttcctcgaactgacccgccagacacacaaacgccgctttgtggcgaccggcggcgcactcaaagacgtgctgaaactcgatcaggaaaccgacgccgacatggtgatcggggatgatatttccgagggcgatgatgacggttcccgcatcgcgttcgagtggaagaccgaggtcaaaaaataccggcgttcgccgacgaaagataaaaccgaatcagggtaa

SEQ ID NO: 386006 - DNA, 171 bp, Salmonella enterica
atgattatcaacgatgccctacaccacagcgaaactccagctaccgatgcattcctggctgaagtgtgggcgcagggggtagagatgtttgctgacaatctgttgtgtccagaccttgatgacactatccgtgactttgctgcccagcttcgcaaaggaggcaaccagtga

SEQ ID NO: 386007 - DNA, 300 bp, Salmonella enterica; identical to SEQ ID NO: 383321

SEQ ID NO: 386008 - DNA, 324 bp, Salmonella enterica; identical to SEQ ID NO: 385959

SEQ ID NO: 386009 - DNA, 777 bp, Salmonella enterica
atgccgatctgtcggatcacctctcactccgacgaattcctgattaaaggtattcaggagagcgcgaagcacgcctggtacaaagatgaagcgccgcaggcgccgtgggaaggcactacgatcccggcttacgacggttggtcggatgacggtaaatactcatgggtcaagtcgccgacattctacggcaaaaccgtcgaagtcgggccgctggcgaacatgctgtgtaaactggctgcaggtcgtgaatccacccaggccaagctcaatgaaatcattgcgctttatcagaagctgaccggcaaaacgctggaaatggcgcaacttcactctacgctgggtcgtatcatcgggcgtactgttcactgttgtgaactgcaaaacatattgcaggatcaatacaacgcgctgattgtaaatatcggcaaaggcgattacaccacgtttgtgaagccgaacattccggcgacgggcgagttcaaaggcgtgggcttcctggaggcgccgcgcggtatgctgtctcactggatggtgattaaagacggtattatcagtaactatcaggcggtggtgccatcgacctggaactcaggtccgcgtaacttcaacgatgacgtggggccgtacgaacagtcgctggtcggtacgccgatcgccgatccggcgaagccgctggaagtggtacgtaccatccactccttcgacccttgcatggcgtgcgcggtacacgtggtggacgccgatggcaatgaagtggtctcggtgaaggttttgtaa

SEQ ID NO: 386010 - DNA, 963 bp, Salmonella enterica
atgagccagagaattactattgatccggtaacccgtattgagggtcatttacgcattgactgcgaaattgagaacggcgtcgtatccaaagcatgggcgtccggcaccatgtggcgcggtatggaagagatcgtgaagaaccgcgatccgcgcgatgcgtggatgattgtgcagcgtatttgcggcgtttgtacgacaactcacgcgatctcctccgttcgtgcggcggaaagcgcgctgaatattgatgttcccgtcaacgcgcagtatatccgtaatattattctggcggcgcataccacccatgaccacattgtccatttctaccagctctctgcgctggactgggtggacattacctctgcgctgaaagccgatccggaaaaagcttctgcgatgctggatggcgtgtcgagctggcacctgaacagcgcgcaagagttcacgaaagttcagaacaagatcaaggatcttgtcgccagcggtcagttaggtattttcgccaatggctactgggggcacccggcaatgcagttaccgccggaggtcaacctgattgcggtcgcccactatctgcaggcgctggaatgtcagcgtgacgctaaccgcgtggtggcgttgctgggcggtaaatcgccgcatatccagaacctggcggtcggtggggtggcgaacccgatcaatctcgacagtatcgggacgttgaaccttgaacgcctgatgtacatcaaatcgtttatcgataagctgagcgattttgtcgagcaggtgtataaagtggataccgcagtcatcgcggcctactatccggaatggctggagcgtggcaaaggcgcggtgaactacctgagcgcgccggaattcccgaccgacggtaaaaacggcagtttcctgttcccgggcggttacattaccaatgccgatctgtcggatcacctctcactccgacgaattcctgattaa

SEQ ID NO: 386011 - DNA, 426 bp, Salmonella enterica
atgaaagccatggaggaggcgctgatcaacgtgccggacaactggattgttcagggcgacttcgagccggaatccggttaccacgcgatgcagcaaatcttatcgcagtcacatcgccctaccgccgttttctgcggcggcgatattatggcgatgggcgcgctttgcgcggctgacgaaatggggcttcgcgtaccgcaggacgtttcggtgatcggttatgacaatgtgcgtaacgcccgtttctttaccccggcgctgacgacgattcaccagcccaaagactctttaggcgaaaccgcatttaatatgctattggatcgcatcgtcaataagcgtgaagagtcacagtctattgaagttcatccacgcctggttgagcgtcgctcggtcgctgacggcccgttccgcgactatcggcgttaa

SEQ ID NO: 386012 - DNA, 1587 bp, Salmonella enterica
atgatgggatttaaaaaaaattatttttggcatgtatctgtaatcattattggccttgccattggcttagtgcatcacatttatatttatccgaatttttttcacgcagattcagcagcatatcaagttttagcttcagccataagagatgaaggggctttacttccacatgattttttctacggcaaccaacttattatgctaaaaataagcccattcatagccttagccaactacattggtttttcaggatataaggcttatgcaataggcggtgcaatagcgatctgcgtttggttttatatttgcaatctaattatctctaaatattgtggaaataaatatttttcacttttactatcaacttgcttattcattccgcttggtatggatgatattgattttttacttggtcaggaatcgcatctttcgaatgtagtactttctattatgatatgcctaccggtcatcatatatattcaagaaagcaaaaagagttttttgtgtatttctgcccttgctgttattctaatgactgcagagcagccaattagaactttgattattatagcaccttttattttattcatattgattatattcagatcaaaaacttcagttgtgtcaatgttatctatagctgtatcttttgttatcggcaagatggcaaatgattatcttttaggcagacatttcccactcaaggtcgactattctcaagcatccttgttaatatctccagataaagcaattgacaatctttttataattttaaagtcaatcctggtgtactcttcatcctctagcttggctgttggaggtaatgcaataggaatattgacacctttctactttatgggcttattgtatatacttttatttattgcaactattgtatatggcttaaaaatatttcttcatattttgattgatggcagaaaaactaaaactagtatttgtcgactagatctgttatgtgcattgggagctacaggttttgttttaggactgctacttatatcatgcctcaacccagaagggcgtcatattttctgggcaacttgtatactaaaaatttctgtatttgccaccatttttaaaatttttaaaagtaatataaaaaataatgtatattcatattcattaactattgcaatggctatatgcatgtcagcaatagcaccagtactatatacaacaaaagcagagtcttttagttataaaaaatccaatatgaattcagaaataaataaaaaaattatttcaattgtaaagttaactggaataaaatatatttatggagaggatttctggagaatgcaactattaaactcgattgatgcagaagtacactcctctgaactcacagactcttatgataaatttgtaattcctagaacatggttgtccagaccaagttggtactgcattaatggtgaggttttatattacacaaaagatggcaaggcggataaaataatagagtcagaattaaagagtaaaaacggaaaaatattgtataacggtgcggaaggaaaaatatggttagggcctgtaatatggagcaagcctaagtggtgtaattaa

SEQ ID NO: 386013 - DNA, 261 bp, Salmonella enterica
atgctttcactgtttacgcgtaataaatccaccaaccggcagacgccggttgatgacggccagtccgttcaggcagatgaaaccctgaccgcggccgtgaagggccggcaacccctgaagcgccccgggaaaatgacgcgccaggatgaggagaaggtttatcacgccaatccgtccatcattgactttttgccctgggcagaatttctcgatgaagagcagtgtctcctgcttgatgacggcgtgtcggtgggggtgtga

SEQ ID NO: 386014 - DNA, 195 bp, Salmonella enterica
atgggacaagagagtgatattcagtcagtgctcttcgacgacaaccatcgggcgttacagaccgatatcgtcgccgtccagtcacaggtcgtgtacggaagcgtaggcaacagtatcgctgttccggccattaaagcagggattacgcgtgacggcggtcccgacggtgctgttcagcaatacgccgcactataa

SEQ ID NO: 386015 - DNA, 762 bp, Salmonella enterica
atgtcagccaaacatccggtgatagcagtaacagggtcaagcggcgcggggaccaccaccaccagcctcgcgtttcgtaaaattttcgcgcagttaaatctgcacgccgccgaggtggaaggcgacagttttcatcgttacacccgcccggaaatggatatggcgatccgcaaagcgcgtgacgccgggcggcatatcagctatttcgggcctgaagccaatgacttcagcctactggaacatacctttattgagtacgggcagacgggtaaaggccagtcgcgtaaatatctgcatacctatgatgaagccgtaccgtggaatcaggttcccggcacgtttacgccctggcagccgcttcccgaaccgaccgatgtgctgttttatgaaggactgcacggcggcgtcgtcaccccgcaacatgatgtcgcgcgtcatgttgatctgttggttggcgtggtgcctatcgtcaacctcgagtggattcagaaactgattcgcgacaccagcgagcgcgggcactcccgtgaagcggtgatggattccgtggtgcgttccatggacgactacatcaattacattacgccgcagttctcgcgtacccatattaacttccagcgcgtgccgaccgtcgacacgtccaatccgttcgccgcaaagggtattccctcgctggatgagagttttgtggtgatccatttccgcaacctggaagggatcgctcctggcgatgctccagggctcgtttatttctcacattaa

SEQ ID NO: 386016 - DNA, 1248 bp, Salmonella enterica
atgataataatcaggatttttggtgacagtatatacctgatgtatgtgttaccagccgtattctacacgattactattatgctggcctttgctctgtcacatacagatgggaaaatgaagtggtcaatcgcagcgctaattccatgcgtaatcatttcatctcctatggcgtcaaccatgacactagagacatgtgtacatgtaggaactatcatatttgctctggtgtgcttaaatatgcttaggtatgataaacatacaacaattaaactggcaagcgtcacgactctcactgctgcatctgtattcagcgactcgatattcaactactatatcactataccgatagttgttacttttgttgttcatgtattgataaacaaagactttagcaagtggcgctatgtatttgcagttattgttggcgttgtcatagcaaagtttcttgctttagtggcaaattattttggtctactaaacacccccgggactcaacctccagcatttgttaactacgagaatatatcatctaacctcaatcttttcattgttggcatcatccagtatttcgacgccttcattttcggaaaacagctttctgcaagcaatgcgatgatatttagtagatttgcagtgatgatattttggctagctcttttagttgtagctatcaaaaacaggtttaaagcttcgtttgttgatactgcattatccatttcctcagtattgctaccagccgcatatgtagcaagcaacatgcctgtagaccttggcactacaaggtatctggttttctcttttattactggatccgctctaattgcacgttatctaaattcacaagccgatcaaagactctatgcttttgcttcaactatcatactgatttttattttcatcccaagcggaagatacgaactaccgaattcgagagtacaagatattagtaactttgttcgtgataataacctcggtgatggttacggcacatactgggttgcgtctgccgtgactctgtttaaaaacggagacgtaaggccaatcacgtttactgatgaaaacaaagcggttaggttaaactggctgtccaataaagcatggtacggttttaaatcaagatatatcgtcacagagttcaagcatgatattgataagatattaaaccagtatggacgggaagggcatataaaagagattgataacgcatatataatttactatgatgatgcaagaattgttatagagtag

SEQ ID NO: 386017 - DNA, 1251 bp, Salmonella enterica; identical to SEQ ID NO: 384659

SEQ ID NO: 386018 - DNA, 375 bp, Salmonella enterica
gtggtcgcggctcaccagccggcgcagcagctccccgccgcggcggttatcctccgggtcggacgagcgcgtcagcgcctccgcgtagcccagcgccgcatcgcggtttttcgggtccagacggtaagcgtttgcataggccccggtggcggtaccggcattacccagcaccataccggtgcgccccagcatgagccagccctcaacattgccggcatcattttgcaggcgggtgcgcagccccagcgccagccgcgccatctcctcctcattcagcggctgcgcctgcgggtccagcgcccgcgccagcagccccggcgtctgcgccgtcgcctgctgccaggccctcacctgcggatagctgccggtctgtga

SEQ ID NO: 386019 - DNA, 300 bp, Salmonella enterica
atgatgtttttcgtgtccgctatggtcagcagccaggcggcaacgacgttaattctgttgccgctggggctggcgttagggttgcccgcttatgcgttaatcggctcctggcctgccgttaacggctatttctttattccggtggcggggcagtgtctggcggcgctggcgtttgacgacaccggtacgacgcgtatcggcaaatatgtgcttaaccatagttttatgcgtccgggattagttaacgtgattgtctcggtcattgtcgggctgttaataggaaaaatgattctggcctga

SEQ ID NO: 386020 - DNA, 165 bp, Salmonella enterica
atgtttggctatcgtagtaacgtgccaaaagtgcgcttaaccaccgatcgtctggtggtacgtttagtgcatgagcgtgatgcctggcgtctggccgattattacgcggaaaatcgtcattttttaaaaccctgggaaccggtccgtgatgaaagtcattcctag

SEQ ID NO: 386021 - DNA, 585 bp, Salmonella enterica
atgagcattaccaatgcaactattagccagcgtgcaaaaaaatggcttgaagatgaccgtatatttattgacaccgaaactacaggtttgggtgatgatgcggaaatagtagaaatctgtttaatagatagcgctggttttatcatgttaaatacattggttaaaccaaccaaaccaattccagcagaggctacggccattcatggaataactgatgaaatggttatgtatgcgccaacgtggaaagatattcacggcgcagttgcttctttattctttgagtatggctttgttatctataacgccgattacgacacaaggcttatatatcaaactgcaaaattatatgggcttgagaatgacggcttttgttattttttaaatgagcgttcggcctgcgccatgatgctatatgcggagtatcgcggcgagccagggcgatttaagggttataaatggcacaaattagttgatgccgctgcacatgaaggggttagcgttgaaggaaaggcacaccgtgcattagctgattgcaaaatgacgctagggcttgtccatgaactggctaaaggtggtgctaaatga

SEQ ID NO: 386022 - DNA, 858 bp, Salmonella enterica
atgaccactatcctgaaatgggcgggaaataaaaccgctatcatgccggaattgattaagcaccttcctgctggctcgcgactggttgaacctttcgcgggttcctgtgctgtgatgatggcgacagactatcctcattatcttgtcgcagatattaatcatgatttgattaatctttatctgatgattcagactgaccatgaggctgtcattcagatagctagggagttatttaaagattttaattcggatgttcagtattaccgtgtccgccagcatttcaattactccatttctaatgaagtagaaaaagcagcatatttcctatatttaaatcgccatggctatcgtggtctttgccgttataaccagaagggtgaatataacaatccatacggacattataaaaagccgtacttccctgaaaatgaaatacgcacatttgccgagaaggctaaacgtgcaacgtttatttgtgccagctatgacgaaacactggcgctgctgcaggctggtgatgttgtttattgtgatccgccatacgatggcacatttagcggttatcacactgccggttttacagaggacgatcagtgtcatatggcgtctattcttgagcgccggtcatccgaaggtcatccggttatcgtgtccaacagcgacacgtccctgacccgttcgctttatcgtaattttacccgccatcgcatcactgcaaagcgcagcataggtgtggctgccggtgagagtaaatctgcagcagaaatcatcgccacaaaatcagcaggctggtttggtgtcgatttggcgtccggtccagatatctcggtggaaactgaggtgcgggcgtggcagtga

SEQ ID NO: 386023 - DNA, 741 bp, Salmonella enterica
atggctgtgcacaagctctctggtgcgtttttccacgatatgcaggttgagtggccctgccctaaatgccatcagaaaaccctacagatcattaaagaaagtttcgtcttgaatgacacacatgacacccaaaaataccgaagtgaagattggtttgaaccagaaatggattcatctgttttcagttgcatggcccgctgctcaagaaggcaatgtggcgaagttgtagcctgttctggtcagagtggatgggaacaaggttgggatgaagaaagaaatgatatggagtactatcaatggcacagacctttcacctttttcccatccctgcatcctttcgaaatacctgaaaaatgcccaaaagaaattaccgaaccacttgaagcctcattttccattttcctaatacagcctggagcagcagcaaacctaatccgaatttcagttgaaagaatgctgaccgctatggatgtaactgaacgtagtgataatggcaaacgcataaccctacaccaccgtttagggatgctgcctaaattatacgaatcgttttcaaagcctcttatggcaattaaatttttaggaaatgccggaagccatacctacgatgaagtaaaaatcaaagacattgaggatgcttttgagattatggagtacgtcgtcaatgacttgttctccggtcgtaaagaatctatcgaggtattgacgaaaagattgagtgaaaaattcaaagaaaactga

SEQ ID NO: 386024 - DNA, 996 bp, Salmonella enterica
atgaacggaatctggtacgaaaacactcatacacgcattcctaattttgaaacaacaacacatcaaaagcaaaaactcggttacgcttacgaaacaacaagtcattttgtacatctgtatgggcgtgacgtgggatttaatgtaatatcagttgggttaactgttattgagcaacgaagcggaactcttaatgactgggttcagagagtatttggggcgcagaacatatcccctttagataatgaggttggacatgtcactaggggagtgtggcggccatctttatattatgtcaatgatacggaaaccgcattaggtatcgataagtttgaaaaaagagcaacagagcaagccctgagagttttgatagaaaagctcgatgatatatttctatatgttgaaccaagtacccatggtttgatttcttacagtcataaatgtagagagttattaattcttgcttgtactgaagttgaaaatcaatgggtgtcaatcattagtgatacaaatttatctcgttcaagcggtcggtattccacaaatgattatgtaaaattacttgataagtgttttttgtctgaatataaaattcaatatctgaattatgacggattaagaaatttcaaaccctttgatggttggaatgcaaataatcccacaaattccttgccatggtatgaagcatataataaaactaaacatgatagatcaggggcattccatttttcaactttagaaaacgtaatggacgcagttgctgcttgtgttgtaatgtattgtgtaaagtatggtccatttagtttattggaagctaatacatctctttcaacgatcgttaatcaaaactttttaatatcattagataatagcaatccagcaagctattacatccctgaaattgaactcccaacgaatacgagatcggatttatttctctatgattgttatcgtgcaagccataataaaaaatggatcactgattccctagtgctatag

SEQ ID NO: 386025 - DNA, 960 bp, Salmonella enterica
gtggtacagcaagcatggtcctttaaggcaattgagaaagacgatcttagatactggggaaatgatggttatcacgatgactcatcagttttctatcgctatgacagttttgtagcgaaccacaaaaatgtaaaaaacggtgatattgttattattaccaacagagaaaatgttttaggtatatctgttattgaaaaattagaaacgcagatcattaataagaagcgtaacaaatgtattcacctgggctgcaaagcaaaaaaaatccttccaaggaaaactataaaaccagagtggcgttgtgataatggccatgaatttgatgaaccaagagtggtttttgagccagctaaagaatttatagcatactacggcaaccagtaccgtaaattatccaatattacaatgtcgcaacttatagatgaaactccacgctacaatgggcaaatgtccatccaagaagttaaccatcaatgggctgttgctttgcttacttcccaacctactatgattctggatctaaacgccagcgaagctgataaagacactcccactttaatggatgaagatcaacggcaaattgtagaacggcaaataaaacaacgacgtgggcaaaaaacatttcgcgaccagctattaaaatcaaatcctacttgtgccattacgggatgtaagcttgtagatattcttgaggctgctcacattgatgcatatcgaaacgatagtcacaatcatattagtaatggattattgctcagaagtgacattcatactttatatgacctaaatctttgcgctatagatccgaacacaaaaaccattcatttttcagcggaggctttgaaaaatgggtattcgaaatttgaaggtttaaaaataagcattaaacacaacatcgcaataaaaccactattaactaggtggcagttatttaagattaaaaaatctgttgatatataa

SEQ ID NO: 386026 - DNA, 936 bp, Salmonella enterica
atgactagcttagcatccttcaaacaaatagattttcaaaccgcagatgatctttgggaatcactatcccctacgagaaacttagatttacagaaaccctacaatttaatttacagagggcaaggaaattctgactggaagttaataccatatgcactaagagataatcacataaataaaagtgttgttcgtcaatataataatgaacataagcaagcaaatgggctagtcagggatgagttattcagccttattcagttcgttaaacattgcgacagaacagggattaaaatccctaatgatacaaaagcatttcgtgaagacttaatgaacttacactcaccggtgaacaataattttataacaaacccgtcatcttggccaaaccgagattatcttgaattgatggcgttggcacaacatcatggagtccctacacgactccttgactggacatctctaccatatactgcatgttacttcgcagccagctcagctgtatctaattatcaagaatgggatgaaaattcgcaattagctatttgggtaattaataaaaatgccattgtggctgaggatttatattatgtattcaaagcacccggttctataagcccacacttagccgcacaatatggctcatttacagttcaccctcataacggagcctatcgcaaaccgtatcagatttttggtctagaagaacttagcattccaaaagaaactcctaatatatttaaattaacactcccatcttttgaagcaggcagattgctattgctttgcaatcattctggatttagcgcagcagacatttacccttctgccgatggtgctggcaaggcagtcaatgatgatagaaatattcaagccgcattatgccactttaaagaaaaaggtttgaaattgtcattttttgagagaaagataatataa

SEQ ID NO: 386027 - DNA, 474 bp, Salmonella enterica
atgtgcaaactgactaaagaagaagaatacagcatcatcagtcggacaatgacgaatattcgttcactacgcacgtatgtacgcgaacttgattttgagcaattactcgacatgcaggaaaagctcaacactgttattgaagaacgccgtgaagatgctgaacgaaaagcggctgaacgtaaggaactggaaactaaatgtcaacaggtatttgagtacatcgtttctgtggggcttgacccggaagaatggcagggtccagtttctgctattgcagggacaacggaaaccaaacgaaaacccaaaggcggtgtgagaaaagcgaaatatatctttgaggatgagaacggcgaaaccaggacgtggtctggtaacggtaaaatgccacttgctttgcggaaacaggttaatggagattgtaccctagaaactttcctcattgaaaaccccaatcaacatgaacaaagtgaataa

SEQ ID NO: 386028 - DNA, 1008 bp, Salmonella enterica
gtgagaaaaaccaaacgcgttactattaaagacattgctgaactggcgggagtgtcgaaagcaaccgccagtctggttctcaatggtcgtggcaaagagttacgtgttgcgcaggaaacgcgtgagcgtgtgctgagtattgcccaacagcagcattatcagcccagcattcatgcccgctcattacgggacaaccgcagtcataccattggtctcgtcgttcctgaaatcactaactacggatttgcagtattttcccatgaactggaaacattgtgtcgggaagcgggcgtccaactcctcatatcctgtactgatgaaaatccttcacaggaaacaatggtggtgaacaatatgattgcccgccaggttgatgggttaatcgtcgcatccagtatgctgcatgataatgactatcaaaaacttagcgagcaattacctgttgtgttgttcgatcgccacatgaacggcagcacattgccattggtcattactgactctgtttctcccaccgccgctctggtggcagatattgcacggagtcacccggatgaattctattttctggggggacaaccccgtttgtcaccgactcgcgatcgactggaaggatttacacaaggcttgcagcaagccggagtaacgctacaacctgaatggattattcacggtaattatcatccgagctcaggctatgaaatgtttgccgcgctatgcgctcgtttaggacgtcctcctaaagccttattcactgccgcttgtggattactggaaggcgttctgcgctatatgagccaatataatttactcgacagtacaatccacctggcgagttttgatgatcattatttgtatgattcactttcggtaagaatcgacacaatacaacaggataatcgccaacttgcttttcactgctttgagcttatttcgcaactgattgaaggtgaaacgccatccccattacagcgttatcttcctgccagtttacaaaaacgctatagataa

SEQ ID NO: 386029 - DNA, 1404 bp, Salmonella enterica
atgccttcacaaatgcccgcgattttacaggcagtgatgaaaggtcagtccaaagcactggcagatgcccactatccttgttggcatctcgctcccgtcaccggactaatgaacgatccaaatggcttttgctggtctggaggccgctatcatctgttttatcagtggaatccactggcttgtgatcataagtacaaatgttgggggcactggagttcgacggatttattgcactggcagcatgaaccattagcgctaatgcccgataaagagtacgaccgtaatggttgttactcaggaagcgcggttaataatcagggcgttctcacactttgctataccggtaatgttaagtttgatgatggcagcagaacggcatggcaatgtctggccaccgaaaataaccagggcgggtttgataaactaggccctgtcatatcgttacctgatggttacaccggacatgttcgtgatccaaaagtctggaagcacaacagccaatggtacatggtgcttggcgcgcaagataaagagaaacgggggaaagtgctgctgtattcctctgtcgatctgaatacctggtcttttcatggagaaattgctggtaacggtctgaatgaaatagataacgcaggatacatgtgggaatgtcctgatcttttcgcccttgatggtgaatacattctcctctgttgcccccagggaatggtgcgcgaacatgagcgctatctgaatacttatccctgcgcctggctacatggacagtttgattacgagacaggcaaatttacgcatggcgctttctcagagctggatgcgggatttgaattctatgcaccacagacgatggaagccccggacgggcgacgattgctggtcggctggatgggggttcctgatggcgaagagatgttgcagccaaccagaaagcatcattggcagcatcaaatgacctgttttcgcgaactctcattccagaagggaaaattgtttcagatgccaatcagggaactcgcgcaactgcgtgaagctgaacacttctggcaaggaaaagcggatcatgcgccgcatgtcgaaattgaacgcctggaaatggacatcattccgtcgggtgagctgtatctgaattttggcaatgcgctggcactgcatcttaatgacgatggtattcaactacagaggagaagccttgcagggcaagagaaactaactcgttactggcgaggaagcgtaacgtcactgaagattctctgtgacagttctagcgtagagatattcatcaataatggtgaaggtgtaatgagtaatcgttattttccccatcatccagcttcgctgatattacagggtgagtctgacgtcatgttacgctactggtcgctacgcgcctgcatggtagaatga

SEQ ID NO: 386030 - DNA, 1518 bp, Salmonella enterica
atgtataaaaaaacaactttggcagtgttaattgctttgctgaccggtgctacaacggtacatgcgcaaacggatattagcagtatcgaatctcgactggcggcgttggaacaacgtttaaaaaatgcggaatcccgcgcccaggcggcagaagcaagggccaaaacagctgaattacaggttcagaaactggctgaaacacaacaacaaaatcagctaacaactcaagaagtagcacagagaacagttcagctcgaacagaaatccgcagaaaacagtggttttgagtttcatggctatgcccgttccgggttactgatgaatgatgccgcttccagtagcaaaagtgggccgtatctgactcccgcaggtgaaactggtggagctgttggccgtctgggaaatgaagccgatacctatgtcgagttaaatgtagaacataaacaaacactggataacggtgcgaccacacgctttaaagcaatgttggctgacggacaaagagattacaacgactggactggcggctccagtaacctgaatatccgacaggcttttgccgaactgggcgcattaccaagttttaccggagcattcaaagacagtactgtttgggctggtaaacgctttgatcgcgacaattttgatattcactggttagactccgatgtcgtatttttagcgggaacgggcggcggtatctatgacgtaaaatggaacgatacatttcgcagtaacttttctctctacggacgtaatttcggcgatcttgatgatatcgacaataacgttcagaattacatcctcaccatgaatcattatgcaggccccttccagttgatggttagcggattacgggcaaaagataatgatgatcgaaaagatgccaatggtgatctcattcaaactgatgctgcaaatactggcgtacatgcgttagttggtctgcacaatgacactttctatggcctgcgtgaagggacggcaaaaacagcactgctatatggccatggcctgggtgcggaagtcaaagggattggctccgatggcgccctgctgtctgaggcgaatacctggcgcttcgcatcttacggcacaacacctctgggaagcggttggtatgtcgcaccagcaattctcgcacaaagcagtaaagatcgttacgtcaaaggcgatagctacgaatgggtgaccttcaatacacgtctgatcaaagaggtaacacagaattttgctctggcctttgagggtagctatcaatatatggatctgaaaccaaaggggtatcaaaaccacaacgccgtaaacggcagcttctataaactcacctttgctccaactctaaaagctaacgatatcaataatttctttagccgtccggagcttcgcctgtttgccacctggatggactggagcagcaaacttgatgattttgccagcaatgacgctttcggcagcagtggtttcaatactggcggagagtggaattttggtgtccaaatggaaacctggttttaa

SEQ ID NO: 386031 - DNA, 921 bp, Salmonella enterica
atgagcacaagagtatgggtacttggtgatgcggttgttgatttattacccgaaagccaggggagactactacagtgtcctggcggggcgcctgctaatgttgcagtcggtatcgcaaggctgggggggaaaagtgcctttattggcaaagttggcgatgatcctttcggtcgctttatgtatcagacactgagtacagaaaatgttgatacacgttatatgtctcttgatcctcaacatcgcacctcaattgtggctgtaggacttgatgagcaaggagaaagaaactttacctttatggtacgcccaagtgccgatctttttttacaacctgatggccttcctgcatttgggccgggtgaatggctccatctttgttccattgcgctcagtgcagaaccttcccgaagtaccgcatttctggctatggagaaaatacgtcaggctggcggaaacatcagttttgatcccaatatccgcagcgatctctggcagagtgaagcgctattaaggaaataccttgatcgcgcactttcgctggcgaatatcgctaaattgtccgaagaagagttgctattcatcagtggcgaaagccaggttcagcaaggcgcatattcattagtacaacgttattcgttgactttattgcttatcacacaaggaaaaaatggcgtacttgtgtattttcaggggcagtttatccactatcccgccaaacctgtttctgtcgtcgatacgaccggggcaggagatgcttttgtcgctggattacttgccggtctggctgattctggaataccaacaaataccagacagcttgaacgaatcattgtacaagctcagatttgtggtgctctggcgaccacggctaaaggcgcgatgaccgccttaccccgacaacacgatctcccttcacaatag

SEQ ID NO: 386032 - DNA, 132 bp, Salmonella enterica
atgactgaacagaaaattaccgacatcgctcaggctaaaacgaacttttatcttttcagtatcaatgctcgtggcaatcacgcgggaaagatcaaactttctcacaaccaactgcttaactggctggtataa

SEQ ID NO: 386033 - DNA, 147 bp, Salmonella enterica; identical to SEQ ID NO: 31846

SEQ ID NO: 386034 - DNA, 1233 bp, Salmonella enterica; identical to SEQ ID NO: 18714

SEQ ID NO: 386035 - DNA, 324 bp, Salmonella enterica
atgagtaaccgttattggatgatttccttccataaaaatacgcgtaatctaatggttcgctctgtaccaaaagaagacattgttcacaatattgagttaatcattcgatcgttgaatattttcattgaaaaatttctcagtatagaatatatcaatgttgagggtattcctcttacatctcgaaggataactatcatgggtcttaaacctggtccaaaaccaattgctaagtcgacaggaaaaccggatcaacgccgacgcgataataaagatactcctggcaatactccgggactaaagccaagtaagtccacaggtaagtaa

SEQ ID NO: 386036 - DNA, 645 bp, Salmonella enterica
atgatgaagaaagggatggcaaacagtatatcaatgacatggcaacttttatgcgatgaatatggttttacccgggagcactacaatcagctgaagaagttcagcccagagacattacgtgaaattattgctgaaatagcctgctgccatccatcaaccagtgtattgctcaggaataagtggctgacaccgccggaggatattctggagcaggttgcccgtgaatacgaacgaagaatacataactgcccatctttcaggagcgagaaggaggcggaatcctggttaaatgaactgttttttgctgtgattgctccgctataccgtgttgcccccgaacaaacagaacaggttgagtcctttgttctgcagcttattgccgagcaggagcgggtttgggagcttattttaaccaatgatggttattcatggcattgcgcactttatgatatattatttcatctggttttacgaaatatggaagaccagcctgaacatcagagacagcgaataacaaaaatacttaatgagtccgatacaaaacgggttgcagaagagattaaatttcggattcaatatcttcaggatgaagaacaaaaaagagttttaagtgaactggtaaatgtcctgacttcaaaaagataa

SEQ ID NO: 386037 - DNA, 144 bp, Salmonella enterica
atgcaaactccggagaattgcatacatcaagtattcttaatctttctgtttctgatagtttatttcccggggcaggccttgatgcacctggtctctgatctgcatgaaccacaccaccctgtatccaacgttgaagtgttctga

SEQ ID NO: 386038 - DNA, 174 bp, Salmonella enterica; identical to SEQ ID NO: 31856

SEQ ID NO: 386039 - DNA, 297 bp, Salmonella enterica
atgcctgcacatgcggtaccaattgatataaaagaacaaggtgttacctggttattaccaccttatagttggtccatacggcatattgcccgtaaactggacctgagcccttcagtaatagcaagatggagacttgaactggtgcaacaaggcctgtttgaaaatgaaaaaatatcttctgtcgatggaaatgaatggacatcagagcgacgattttctgttgtaattgaaactgcaacattatctgaaatggaactggctgattattgtcggagaatggggttatttgttgagtaa

SEQ ID NO: 386040 - DNA, 255 bp, Salmonella enterica; identical to SEQ ID NO: 15415

SEQ ID NO: 386041 - DNA, 255 bp, Salmonella enterica; identical to SEQ ID NO: 15416

SEQ ID NO: 386042 - DNA, 582 bp, Salmonella enterica
gtggacaataatctgacaccggaacaaacacaggctgggctggataagatagcgaaaggtgatatgccggacagtaccaatatcacgaaagtgatcgtggatggatatcaggatggtgtaatgattgccggggcatggtatctggggcctgctgcgtcagcaggtaaagttcttggtggcgggcttcttggactggcggccaatagtggttatcaggtctatgatttgaaccagccgcagaatgcgaataagtcgtgggactatctgggaagcgcgacctcatttacaacaggcatgatggctcccggtcgtggtgtccttgcgaacacaggtatcgtaatgggtggggcattctttactgatggtccaaatacagcttcactggccggggctggtattggtgctggtctgggtggggcatttgggaagtatgcccccacagctgtggggaaaatcttagggaatgatcctgttccgggctttatttatgagcttggcggtggtgctgtctctgagtttaccaatggaattatcaaggatttcaataatcctcaagctcctgaaaaaaaggaaaataaatga

SEQ ID NO: 386043 - DNA, 231 bp, Salmonella enterica; identical to SEQ ID NO: 31855

SEQ ID NO: 386044 - DNA, 4968 bp, Salmonella enterica
atgccggtcagctcggtggtggtggtttccacggaaaaggtgactgagtatcagctcagcggctcagataaacgctggagcgccggtgaaccgggcgtttatgtggataacgattccagtaactcactgaaaaaactgcatacaccggaaggcgccagagataaattcacgcagtacgattacacccgtaccgtggaagaaacccgggtaaaagaatccgacccgggaaaaattctgtccggtgctggcatgacgattgtggcagacaaactgtttaatgataagagtcaggttgtggcaggtggcctgctggatatgcaggccggtgatgtggaaaacgtcagtgtcagcggagagcgccatgttacggactcagggacatccacgtattattaccgtatcaggaaaaaaggaaaggataagcagggggagaaaacctctcagtacacaccgcccactgtaattcagaccatcacgctgaagccgggagagctcaccagccacggacaggttcagggtagccaggtcacgctttctcccctgaagccacagggaacggatgtacagacaggactgaccggaaatgtggatgcgacagtagccgctactgaccggataccgcttcgcccggtggtgtctgccggtgaaccggtcattctgttgccggggcagcagtttgaagtcagtacgccgcagggcagtatccatgttgccgggccggatacccgtctgccggacagcagcctgtttaaaacaaatccggcagtgaatgtgccatatctggttgaaacggacccgcgttttacgaaccagaagacgtggctgggcagtgattacatgcagaaggcgttttctcagaacggggataacatgctcaaacgcctgggggatggtttttacgaacagcgtctgattcgtgagcaggttgtcgctctgaccgggcaacggtacctggacggatacagtaatgatgaagagcagtttaaggcgttaatggatgcgggtattgcatttggtaagcaatacaacctgacaccaggtgtggcgctgactgctgagcagatggcgttactgaccggtgatattgtctggctggttaacaccacggtgacactgccggacggcagcacgcagacggttcaggtacctcaggtgtatgcccgtgtaaaacccggtgatgtgaacagtgccggtgcgctgattgccggcagggacatggtgatgaagctggatggtgacctgtttaacagcggtaaactggccgggaagcagaccgtgcagctcagtgcagaaaacattcacaaccaggccggcaccattcagggagcaaatgtcagcctgacggcccggacggatattaacagtaccggcgggctgctgcaggctacggacagcctgctggcgatggccggacgggatattaacctgaccaccaccacccgcacggcacaaagtgacgccggacagaaccattttgaacgcaccagcatcgacagtgtggcgggcgtgtatgtacagaatgaccagggaagactggtgctacaggccgggcgagacataaacctgacggcggcgcaggtggtgaacagtggtaagggcagcctgacgcaactcagtgccggcagggatatgacactctccacagtgaccacatccgcgcaggacaatattacctgggataaaaataaccggttgtcgcagggcgtcacacagagcacgggcagtacgctttccggtaacggtgatgtcacgctgaccgctggacgggatatgacggcacaggcggcatcgctgtcggctcagaaaggcctgaccctgatggcaggccatgacgtgaccctgaccggtgcgcagaataccagcacgctggatgaataccataaagtgaccggcagcagcgggatgttgtcgaaaaccaccacaaccacgcatgatgtcactgatcgccggaccatgacgggcagtgaactgagtggggggacggtcactatcggcgccggacataatctgaacgttgcaggcagcagcgtggtcggggataaccgtgtctccctggctgccggaaataacctgagtatcggtacgctgacagaaagcaaccgtgaaacgcacctgaaacaggagaaaaaatccgggctgatgagctccggaggtgtgggattcagcgtgggcagccagagtctgaaagtcacggacgccgcaacagacaccacacagaaaggcagcacggtggggagtgttcacggtgatgtttcccttcaggcaggtaaccggttgaccgtcaacggctctgacctgattgccggcagggacatggcactcagtggtaaggaggtcagcattaccgccgccacagaccagcatgtacagacgcatacggtggagcagaaaacctccggtctgacgcttgccctgtccggcacagcgggcagcgccctgaatacgacggtggagaccgtacaggcggcgaaatctgccggaaacagccggcttgaagccctgcagggggtgaaggccgcgctctcgggggctcaggccgtgcaggccggacgactggcagaagcccagggcaaccagaaagagaataacaatgccgtgggtatcagcctctcttacggcagccagtcttcaaaatcagaacagcagtcagagcagacggtggcgaagggcagtacactgaccgcaggtaataacctcagtattcaggccaccggctccggcgtgaagggcgtggatggtgacctgacgatacagggcggtcagataaaggccgggaacaacgttctgctgcaggcaaaccgtgacgtgaatctggtatcagcagaaaacacgtcaaagctggaaggaaagaacacatccagtggtggcagcgtgggtgtcggtatcggtgtggggcccggagggcctggtttcagtctgtcagccagcgcaaaccagggtaagggcagtgaaaaaggcaacggtaccacccatacagaaaccacggtggatgcgggaaaccggctgaccattatcagcgggcgggacaccacgcttaccggcgcgcaggctggcggtgaaacggtgaaagtggatgccggtcgtcatctgacactgaccagtgagcaggacagtgaccgttatgacagcaagcagcagaatgccagtgccggaggcagcttcactttcgggtccatgagcggttcggcgagtgtgagcctcagccgggataaaatgcacagtaactacgacagtgtgcaggagcagacagggatttttgccggcaggggcgggtttgatgtcacgaccgggcaacatacgcagctgaacggcgcagtgattgcgtccacggcaacggcagataaaaacaggctggataccggcacactgggcttcagtgacattgaaaaccgggccgactttaaaacggaacatcagagtgcagggctcagtaccggtggcagtgttgccggaaatttcctggggaacatggcaaacaatctgctggtcggtgcaaatcatgaaggccatgcggacagtaccacgcagtcggcagtgtctgccgggaatatcaccatccgggatacgcagagccagaaacaggatgtggcagacctgaaccgtgacgcagcacatgcaaaccagacgctgtcccccatctttgacagggaaaaagagcagcagcgactgcagcaggcgcaactcattggtgagattggtaaccaggtggcagatattgccagaacggaaggacagatagccggtgagaaagcgaagcgggacccggcagcactgaatcaggcccgtgcagagcttgaggcagcaggaaaaccgttcacggaacaggatgtggcacagcgggcctacaataacggtatggcggcctcaggttttggaacgggaggcaaataccagcaggcgatacaggccgcaacggcagcggtacagggactggccggcggtaatctgagtgcagccctggcaggtggtgcagcgccgtatattgctgaaattatcaaacagaccaccccggacggtgcgggacgtgtggcagctcatgctgtggtaaatgctgcactggcggtggcacagggaaataacgcccttgccggtgctgcaggtgcagccaccggcgaggtggtgggaatgatagccacacagatgtacggtaagccggtgagtgaactgagcgaggcagagaagcagacggtctcgacactggcaacggttgctgccggcctggccggtggtctggtgggagactcgggggcttcagcggtagccggcgcacagtcaggtaagacaacggttgagaataatctgctgggtggcagtgaattgctccagacggaaaaagccaaggagcatggtgctgatgttctctcctgtagtgaaaatccttccggtgaagcctgtaagcgggggcaggctgaaaataaagcttatgctgccgcattagcaacaggcagcgttgccctgttaccggggagtgcccaggctatgtggttacttggtgccgggacaaatgccgggatgcagtatgcagatagtggtgaaataaacccggtcaactcagtggcagcaggctggataaatgtgataaccatggggcagggctggaaagggacaatagcctggaatgcggcaggtggagcattaaccaacgctataaacggagatgatcctcttactgggtcgattacaaatggagcgggggccgggtttggatatggggttggcaattatgtggtgaagcctgttgcaaatacagcaggcaagtggataaccggtggctggaatcctaaattcgatccgactctactaaaatatactgaagttaaagggcagttaggtatctccaaagaaatggtgccgagcaagattccgggggctgcaggtaatatgggggcttctattacatcagaaatgacggggactgaactacaaaaagtcattaatgataaattgaagaaaggagagcgtgaatga

SEQ ID NO: 386045 - DNA, 1785 bp, Salmonella enterica
ttggcagatttattattcagcattctggtaccggttgatgcgggtaaataccggaagggcggtaaccagcagggacgtctgcttgccagcagtgacatcctgattaatacacaggcgctgaataacgacaacggactgatttcagctgctgccggaacgggcaggataaaaacacagcagtctgtcagcaatacggagggacgaatggagtccgccggcaggctggatatttcggcagggagtctgaataaccaccagggtacggtggtgtctgacgggctgtccgtgacgctggatggtgcgctggataatacgtccggcagactgctttcacagaaaacgctgtctgtgtcaggcagcgaactggtctctgatgatggtctgattcagtccgtcagtgacatgacgctggatgtacaggacgggatactcagtaaccgtaacacgaaaacacggggtggtatcagcagcgctggtaccctgacagtgcgggccggtatgctgaataatcagcagggatttatggcgggtcagaaggatatgaccctgaacaccggaacgctcgataaccgtcagggcgtgctggggagtcaggcgtcattgcagatatcgtcaggtacgctgatgaaccagaaaggcgcactgaaggccgggacggatatgttgctgagtggtggtgatgtcagtaatcaggaagggacgcttgccgccggcagagacctgaatgcgcacctgaatgtgctggaaaatcagcaggggacggtggtcagcaacggtaacagcaggctggatgtcacacggtttgataatcagggcggcagactggtggcacagcagtcactgaccctttcctcgacggatatcatcaacgatgccagcggcctgatacagagcggtgcatcgctgaatctccgtgctgacacactgagtaaccgtaacagtggtgaccggggcggggttatcagtcaggggccgatgacgctgaatgccggcacactggacagcactgccggtgtgcttttgtcgggagatgctctgtccctgactgcaggcgtggttaacaatacatccggtcaggtggtggcaaacggcctgctcggctggaacagccaggcgctgaacaatcagtcaggtcttattcaggggaaaggcatcagcattaataccgcaggccagacgctggataacagaggcggtacgctgaacagcctgcaggaactgactgtcagtaccggagcaatggataaccggggcgggaccgtgggggcgaaaacgacagctgacctgagcaccacctcgctggataaccgtgagggtggccggctggtcagtgaaggtgaacttcgtctgcatacgggaggcctgcagaacagccacggacagatacagtctgtgggcgacattctgttcgacagtgtacggggcgttgtggacaacgtctctggtctgattcgcagtggttctgccattacgctgaacgccctgcagtttatcaatcgccacacgcagaataccggccaggggctggaagcgcagacaatacacatcacgacgcaggaccttgataaccaggagggcagtattctggcagacagggcgcttacggttatggcagacaggacgctcagtaataatgatggcgtgctctcttccggcgcgacattgtctgtcagtggccgtcagctgacgttttcgaaccgtgacggcgtggttaaggccgggcagtcagtatctgtggatgccggtcagctcggtggtggtggtttccacggaaaaggtgactga

SEQ ID NO: 386046 - DNA, 234 bp, Salmonella enterica
atggcaaggtccgattacgatattatcaatctgtctctggaacatgaactgaatgagtggctggcagagagaggttatgccggactggcggataaccggaatcgcctggcagaggtggttacccgcagattgcaggacaggttttatatgaacgtttcctgggatgcgctgaacacggcattcagtgaacacccggagtggttttctgggcttgtctccggggatgagaattaa

SEQ ID NO: 386047 - DNA, 624 bp, Salmonella enterica
atgcgtacacgaattgattatctggcggataaatacagttttacagagctgaatgaatccccccgtcttcgccggcagtggcaggatgttctggaggagtgtcggcaggcagaggccgggccagaagaacggttgcgtattgcattgctgaatgtggattacgtcaccagttttgaactgccttttcgcttgctgcttacccggacaccgcaactgattgccgcgctgcgtgaagaatgggacatcagccagaaaaatgtggtgttcaacgataaacggtttggctgtgtgtacagcctgaaggccagtctttccggtgtgccggatatataccggtatcatctgtctcaccgtattcgtcgcgtggttgggaatgaaagcacatcatcgccatatcagcaggttgccagggaagtgaaagcgccccgtgaacggctgaagtatgcgctggaggcaggtttactggtgactgcactggacggcctgttctggtttggcagtcagcgtattgcggctgatgtcctgaggctgagaaaggccggaatgccggtggtgactacgaccgtggaggtgcacgataacctgacgggaacaacccgcaaagtacctgcataccatctctga

SEQ ID NO: 386048 - DNA, 1044 bp, Salmonella enterica
atggcggttaaaatcacgcctgaagagttcagtctgttaacccggcgactgagcacgaaatggcgcgtcctggcgccttctgccgagtttcgcggcgggcgttttgctgatacggacaacattatttatcagcaaatccggggatgggatgacctggtctggcaggagaaatcccacatgtcacccggtacggttatttcaccgataacagaaacgctcttttattttaataaagacactatccagattgcggagacggataccacgccggtgctgatatttgcccgtgcctgtgacatcaatgccatgtcgcggctggattatatgtatttgtcaaacgggaataattctgattacagttatcagcgactgcgcgaccatattcgttttgttctgattgagtgcccgcaaagttttgaaaactgtttctgtgtctccatggggagcaataaaaccgataattacagtgcagcaatgcgattcagtgatgacggcgccagtgtttttatcagggatgctttttttgaagaagccttacagggaatgggacaaagcacagaatatgagcctgtcttcgtcaccgaaaacccggagcaggttaccctccctgaaaaaatctgtcagtccccccaaagggttcgcgacattattatcaatcatccgctctgggatgagtacaacagccgctgtattggatgcggacgctgcacaaccggatgtccgacctgtacctgctacagcgtttttgatgtggcttatgacgaaaatcctcagcgcggtgaacgccgtcgccagtgggccagctgtatggtaccgggtttcagcgatatggccggcggacaccgttttcgccagtctgcgggagaacgtttacgttaccgtgcacttcataaagtcaatgattacaaagcccgcaatggtactgagcatatgtgcgtgggctgcggacgctgcgatgaccgttgcccgcagtacattaaattctcacgtattatcaataaaatgactgccgcagtccggcaggcactctccggggaggcataa

SEQ ID NO: 386049 - DNA, 819 bp, Salmonella enterica
gtgtcaacgtgttcctgtcacgataaagaaaagcacagccttttgcctgctgcataccgcattatatccatcacccgtcatacaccacaggagtggaatttccgtgtggaagtcgattttccggcccgctggggacagtttgtcgaagtctccctgccatgcgtcggggaggcgcccatttctgtttctgactgcggagagggctggatagacctgcttatccgcaatgtcggcaaagtgaccggcgcgctttttaccctccgtgagggcgacagggtatggctgcgtggctgctatggtaacggctatcctgtcgatgccttccgccacaaatctctggtggtcattgccggcggtaccggcgttgcaccagttaaagggttaatgcgctatttcgtcgaaaacccacaggaaatcagccggctggacatgattttcggttacagaaaccgggactgtgtgctgtacaggcaggagatggcgaactggcaccggcaccacaatctcattctgacccttgatgaaggcgaagcggatgaacgttaccgtaccgggcgggtcactgagcatctggctgcactgacatttgaagatgtcagcaccatgcaggcgattgttgttggtcctcccgtgatgattaaattcaccgtacagatgttgctggaaaaagggctgcagccggaacaaatctgggtggattatgaacgccggatggcctgtgcggtggggaaatgcggtcactgccgcatgggggatgtctatgtctgcgtcgatggtccggttttcaactatgccgtagcccgtcagtttgcagactga

SEQ ID NO: 386050 - DNA, 1020 bp, Salmonella enterica
atgatgagtgtggatattgatatcattaaggcccgggcaaacaacgaatatcgcctgtccaaagtccgcggcgaagccatgataagcgtacgtatacccggcggcattctgcccgctcacctgctgaccgtggcgcgcgagattgcggaaacctggggtaacggtcagatccatctgaccacccgccagaaactggccatgccggggatccgttatgaagatatcgacaaagtgaatgccgcactggagcctttcattcgcgaaattgaaatggaactgtgtgatgttcaggttgatgatccgaaagccggatatctggcgattggcggacgtaacattgtcgcctgccagggtaaccggatttgccagaaagccaataccgacaccacaggtttatcccggcggctggaaaagctgatttatcccagtgcctatcacctgaaaaccgtcattgccggctgtccgaatgactgtgccaaagcgtccatgtcagactttggcattattggtgtggcgaaaattcgctttactgccgaacgttgcattggatgtggtgcctgtgtgaaagcctgtgcgcatcacgccgtggggtgcctgtcattaaagaacggcaaagccacaaaggaagaatcgctctgtatcggatgcggcgaatgtgttctggcatgccccaccctcgcctggcagcgtcagccgcaggagttctggcaggttcgcctgggaggaagaaccggtaaaaaaacgccacgggcagggaaagttttcctgaacctggttacagaggatgtcatcaggcaggtcatatcaaacctgttcgaatttgaaaaagaaatgctgggaggtaaaccggtttacctccatatggggcaccttatcgataaaggcggttatctgcgcttcaaagagcgtgtactacgcgacgtacagctaaaccctgaagccatggtcgccgaacgtatttactgggcagaagatgaatccgttgcacgactccaccttaaacctgtcagcacaaagtga

SEQ ID NO: 386051 - DNA, 423 bp, Salmonella enterica
atgacatataagaacatactggttgctgtttcaaataatgatgaagataacatccttttgaagaaagcatatgaaatggcgaaaaattttaatgccggcctgacggccattcatattgatgaagggttaagccacttgtatcccggcgtgtattcacacttttctgaagagatgtttgacggtctgaaaaatgcgtcagacagaagattgtttgaccgcctgaaagatttcaaaaatataagactgagaattgaacagggaacaatacctgaaacactcctcagtcttgtacaggaggaaggatttgatcttctgatatgtggccatcaccatacatttattaacagactgatgcccgcttatcggggactcattaataaatccccggctgatttacttatcattccattgtcagataaatga

SEQ ID NO: 386052 - DNA, 270 bp, Salmonella enterica; identical to SEQ ID NO: 31853

SEQ ID NO: 386053 - DNA, 345 bp, Salmonella enterica; identical to SEQ ID NO: 31852

SEQ ID NO: 386054 - DNA, 165 bp, Salmonella enterica; identical to SEQ ID NO: 31851

SEQ ID NO: 386055 - DNA, 648 bp, Salmonella enterica; identical to SEQ ID NO: 7899

SEQ ID NO: 386056 - DNA, 189 bp, Salmonella enterica; identical to SEQ ID NO: 31908

SEQ ID NO: 386057 - DNA, 366 bp, Salmonella enterica
atggcccgttcagctaaaccccgtaaacgaaaaccttccccacaacgaagcaaacttccccgctatgtcgtgacgcttcatgacgatgacttctttgacgaagaagacgcagaagttctgcgctttgatagttttgacgatgccgttgaatgctgcgcagacctgaatattccgttctttgtggatgtgggaaacaaaaagctggtcttctggtttgtacgtgttgatgacgaagggtatccggaaatcgcccgctgcacggagcgggagtttgcgaccattcttgccggtatcagcgccggcggtatgtactgtccggaatgcggcacggttcactggccggacggagtcaccccgcccttctga

SEQ ID NO: 386058 - DNA, 798 bp, Salmonella enterica
atgcatgagctggaagtcctgctgagtcgcctgaaaatggagcatctgagttatcacgttgaaagcctgctgggacaggtagctaaaaaagagctgaactaccgggagttcctgtgcatggcgctacagcaggaatggaacggcaggcatcagcgcggtatggagtccaggctgaagcaggctcgtctgccgtgggtcaaaacgctggagcagttcgactttaccttccagccgggcatcgaccgtaaggttgttcgggaactggctggtctggcgttcgtggagcgcagcgaaaacgtgatcctgctgggacctcctggtgtcggaaaaactcatctggccatagctcttggcgtgaaagcggtggatgcgggacatcgggtactgtttatgccactggacagactgatcgcgacactgatgaaagcgaaacaggaaaaccggctggagcgtcagctacagcaactgagttatgcccgggtgttgatcctggatgaaataggctatctgccgatgaacagagaggaagccagcctgttcttccggctactgaaccgtcgatatgaaaaagcgagcatcatactgacgtcaaacaaagggttcgcagactggggagaaatgttcggagatcacgtgctggcaacagcgatactggatcggttgctacatcactcaaccacgctgaatatcaaaggagagagttaccggttaaaagagaaacgtaaagcaggagtgctgaccaaaaacacaacgccaatcagtgatgatgaaatggtggaaagcggacagcatcagtaa

SEQ ID NO: 386059 - DNA, 729 bp, Salmonella enterica
atggcagttcagcagccaggtaaagaaatcgccgttaaaacagaagaacagcagtcagttcttgttctgcaccggacccgcagacaacttgtgaagtttcgcacggcacagattaactctctgcacggcacgctcctggagtttggtgaaagcattcacaaaggccgggcagcgatggggcgggagttccctgaagcactggagcggatgaaagagagactgccaccgtatctcattacggttctggaagaccagtacaaccgtctgagtgagctggactcactgatagatgatatcgaaaaacagcttaccagtgtggccaggcagaatgaaacctgtaagcggttgctggatattcccggtattggaccacttatcgcgacggcagcggtggccaccatgggggaagcatctgcatttaaatcagggcgagagttcgcggcttatgttggtctggtgcccaaacagactggctcaggaggaaaaatccgcctgctggggataagtaaacgtggtgatacctacctccggacattgtttatccacggagcaagggcggcagcattactgaccagagaaccaagcccgtggataaccgaactgaaaaaacgtcgtccggccagtgtggcaatcgtcgccatggcaaacaagctggcacgaacagtgtgggcaatagctgcttacggacgtaaatacgacaagaatcacgtcagtatcagaccatattaa

SEQ ID NO: 386060 - DNA, 486 bp, Salmonella enterica
atggcgctgagaaaaatcgccggtctttaccgtattgagaagctcatccgcgatcgtcctgtggaaaaaatacggcagtggcgacaacggtattcccggccgatagtgaacgacctgtttgcctggcttgaagagcaggagccgtgttgtccgactgagggcccattaaataaggcgattaactatattctgaaccggcgcgatgaactgagttgcttcctgggggacggagctgtgcccctggacaacaatatctgcgagcgtgccatccgcccggtggtcatggggcggaaagcatggttattcgccggttcactgatggccgggaaccgcgcggcacagataatgagccttctggaaacggcaaaacgtaatggtctggagccgcatgcctggctgacagacgttctgacgcgtctaccggagtggccggaagaccgactggcagagttgctgccccttgagggatttaccttctccgggtga

SEQ ID NO: 386061 - DNA, 360 bp, Salmonella enterica
atgcgtacacgaattgattatctggcagataaatactgttttacagaacggaacgaatcgccccgtcttcgccggcagtggcaggatgttctggaggagtgtcggcagacagaggccgggccagaagaacggttgcgtattgcattgttgaatgtggattacgtcaccagttttgagctgccttttcgcttgctgcttacccggacaccacaactgattgccgcgctgcgtgaagaatggggcatcagccagaaaaatgtggtgttcaacgataaacgttttggctgcgtgtacgtatcgttccggcgaactcatattgacgcatttttcaggcgagccactggcagcgcatacgattga

SEQ ID NO: 386062 - DNA, 249 bp, Salmonella enterica
atgcgatgcctgttgctgctcagccagacgagtatttgtcacccgcgagccagtgtcacagttgatgaacaatgttcgcaagtggtggatttactgcagcagacctggcgggggatggatacgggcggacaatgtcgggtggaaaggtgttttcgggttacccggcctgatacatcagagcaatacgttgcgttaaaaacggctgttcagtctctgaggccactggttattgcaacaatcatccggtga

SEQ ID NO: 386063 - DNA, 789 bp, Salmonella enterica
atgaaacaatataaaggcggttataacgtgaatagatatgactggaaaaataaaacaactgagcatttattgaatgataataatctggcagataatcacatacctgaatggatcagaaaaaatgaaattgcagcattctggttctggttaattatgtctcatacagttcccgaaaaacttaaacttaataatgaatctgagttcaactctgccttgaagggggtgatcgttatgaaggataaccccatgacaattattccttcaagtcatgaaacacgactgaatgttatagggaaatggattaatgcgttaatcctttatggggaagcagatcggattatctcaataatgcatcaaaactggcagggactcgaaaagagaaacgaagccaaatggcttaaaaagaataccgaacaactgaaatgggcatgggaatatattgatgcacgtatctcacccacatatctttcctggtttaatcctgtaaatgataacgaaagatatattgccattgtagttttactaaaaatgttattccccacagacacgccctgtttactgacgccaaaagaatttcacctaggattcgctgcaaaagaaagatttttcgacaagatgcacaatgcattcagaaaacagtttatcgatggaaaaaaagataaacgggtacaaatcaacgtaaagatatcgccatccgcaaaaagcgctctggacagactgaccagagagcggaaaacaacacagcaggctattctggaacaactgattctgtacggtagactggattaa

SEQ ID NO: 386064 - DNA, 951 bp, Salmonella enterica
atggcatcactgtcgattaatacgctacgccgaatgagcatttgtaaaagtcaggcctggaaagatacccagcgaatactgaagcgtagtggacttgtgtacagaggggaacggtcagaatcgtttgatcctgagaaacattttaatcgttatacggtgcgttatctgtacctgcttaacataattgcgcttaagataaggtcggttagtaaattttcctgttggatcgaggtggggcaatgccatcgtatgactggtaaacatttatctcttaatgccccgccttttatgctgattccgcgtagtatccggagaaaagtggatggattcagacagtcaaaaggtgaagcaaccccaaaatcggctcaaccgttcacgggcagtttgtatgaggttttgagcaaggagagcgattcagctaagctggacgcatggattgctgaactgcctctgaacttgcaggaggagggaaaggaaatctcagtcatgggatttagtccacgggctgtggcccgacctgttcttcggtcagcatccccgacgtttgaactgttttatcaggagtatcaatccctaagattaaaatctgtttttaaatttgaaccaagatttgaacaacttttaacaagactgagctttagaaaacaatcaattctcagaaaacaacaatacagggttaaatcgcaattactggagagactggggaatgtgttgtttttcacgtcgctttataaccaaggatgtttagaggagtttataaatgcacttgtggaaaaggaggacatttatctgaaaatgtcccccggggaggaaaaggtgaaagcacaccagaaaatggttaactacattgaagcgttctgcaacaaaatgacggaaaaatacctgatgcccgcagcaagcagacactacaaaaagaagaaaatcgctaggagcgaaagtggtgaaagttaa

SEQ ID NO: 386065 - DNA, 264 bp, Salmonella enterica
atgcctaccagtgtatccctcagtccttactttgaaacgtttatccgcgaacaaatagaaagtggtcggtataacaatacaagtgaagtcattcgtgccggacttcgtgctctggaagaacgggaacagcagataaagcttgaatcactccagagcgccgtgaccgcaggcatcaacagcggtgaaagtaaaagtgctgaagaggtattcgggcgactgacgcacaaatacaaaaagatggcagaaggtgaacagccaatatga

SEQ ID NO: 386066 - DNA, 327 bp, Salmonella enterica
atgaaactgactgtttcaccattagcagaacacgatcttgaagctataggtgactggatcgctcaggataatcctgtccgtgcaatcagttttaccgaagagctttaccaacaatgtctgttgatagccgaatcgccagtactctacagagaaagacccgagttaggggctgggatcagaggttgttcgtatggtcgttaccttctgctgttcagggtactggatactgaagttcgtatcgaacgtatcgttcatggttcccgggatatcaacagggtacttgcagagccagacgacaaaccatcagatcatttctggcagctataa

SEQ ID NO: 386067 - DNA, 486 bp, Salmonella enterica
atgttaaagcgctttcttaaaagacctgttcttgggcaaatcgcctggcttctgcttttttccttttatattgccgtctgcctgaacattgcgttctacaagcaggtactacaagacctaccgttaaactcgctgcgcaatgtgctggtgtttatttccatgccggtcgtcgcgtttagcgtggtcaatagtgtgctgacgctggcctcatttatttggctaaaccgactgctggcctgcgtttttattctggtcggcgctgccgcgcagtattttattttgacttacggcatcatcatcgatcgctccatgatcgccaatatgatggataccacgcccgcggaaacctttgcgctgatgacgccgcaaatggtgctgacgctgggattaagcggcgttctggcagccgtgattgccttctgggtcaaaatccgtccggcgacgccgcgctctgagagatcccctcataatttccccaaagcgtaa

SEQ ID NO: 386068 - DNA, 576 bp, Salmonella enterica; identical to SEQ ID NO: 34474

SEQ ID NO: 386069 - DNA, 501 bp, Salmonella enterica
atgacgacacgcatcctgtcgtgcctgctcctttttatctgttttctttttcttccggcacacacgcaggctgccgtgcagccatcagtgagaatgtgtttttccactgccgggaaaatgtaccagatagacccactgttactggaagccatcgcccggcatgaaagcggtctgaatccccgggcaatgaatctccgcaaccgtaacggtacggtggactatggactgatgcaggtgaactcatcgcatatcccgctcctgaaacagaaagggattatccgaaacccgcaggacctgctcgatccctgtctgaatattcagataggtgcctgggtactggcacgccactttcagagctgtggtgtgaactggaactgtcttggcagctacaacgcgggattccgcagcacaatgaaccagcgacgggaggactacgcagacaatatttatgccatctaccggaaactgaaccgggagcgccgcaacatggcattacgttaa

SEQ ID NO: 386070 - DNA, 606 bp, Salmonella enterica
atgaaaacgaaaccgaatgtattaccagcgcataatgactgcccgcagaccacgacaactggcaactcacgccgtcgcaaggcacatcgtgggatcgagatgctgtccgcaatggggtggtggagttatgcgatcatcatcgtcgtgtgcgtactcggaatgctgtttggtctgtacatcttcggccgctccggcagtgaagcatccaacctgacccagctggccactgccacgcagcgtgccgcccggacacaggcggggttcggcacagccaacctgaacaccgtgctctacaacgccggacaaatcccgaatggctggacctacaacagcggaaccatctacaaccagtggaacggcaccgtcaccgtgaccgggaaaacctcctatttcaccatcacggatacaggtattccgagctctgagtgtatttctatcgctcagacactggcggccggtggtgtggcgaactacctgacagtcggtggtacgaaaatcaccccggccagcgatattgccaccatcaacaccgcctgcggtaacgccaacagcagcgtcaacagcacgacaaaaaccatcgtcatgtatgttggcgctctccagtaa

SEQ ID NO: 386071 - DNA, 1068 bp, Salmonella enterica
atggccagtgaaatgcaacgcagaatggcccgtctggcactgtccggcagcaatcgtatccgcttctatgaagtgctgaaaatgcaaatcatgagcggacggacacttgagcaggccatgctcaacatccgcgaggtgtacacacggggagggcaacgctttcacccctttggcgtattggcacaggactgtctggactccctgtcggtgaaccgggaaggaaacctgctcccggacgttttccggcgctggttttccggtgaggaggctgcatcgcttgccgtgggcatgcgtgccggctccctgctgacggcgctggacagtctcatccggctgatcaagtccctgcagtccatccgttcaatcattaccggggctgcccttgccccgttcggtgccattcttgccctgagcgggatactgaccctgctgtccgttcagctggttccgcagttcgtcaaaatcatcccgccggagaaagcccgtggtgcccttgccatcacttacggtctggcggacttcgtcaccacagcaggtccctgggtgctgggtatgatcattgtgttttttttgctggcgctctggtccctgccccgctggaccggccggatacggcagtttttcgatcatatccttcccccctggactatgtacaagctgatgcagagcagtgttttcctgctcaacctctccacgctgattggtgcccgcatgacctttcaggatgccctgaaaacgctcagcgacggcggtgtgccgtggctgcaggagcgtctgataccggcacagcatcatttcagcaacggtgctgatctggggactgcccttgaacgcgccgggcacaacttcccctcacaggaaatgatccttcacctgaaggcactttctgccggggaaggcgcggagctggccatcgccaacctggccgactggtggctaggaaggacccgcgcaattgccaaaggcatgctctacctgagcctgctgatttcggtcgtcatggtcttcggctgtctgggcattatggccagcagcatgatggccctgcgcgaccttgtgaacatgtaa

SEQ ID NO: 386072 - DNA, 1539 bp, Salmonella enterica
atggtcagtaacacggatataccggacggactccggcatctggtacaggtgctgccggccgcagcggggaagcccggccaccgagtctgttttcctgtcacggaaaccagcaatccggagatacagacattcatcaccggcctgttgcgcaccaccggtcagcccgtcatccctgagccggtgtcaccggaggagttccgcaacctgcagaatgatgcgggggatgccttccgccacgacggtagcgagcacagtcgttcagaggtgcaaacccgtgtgctgaacatgttccgtgaagcccgccgggtgggggcatcggatattcacatcaccgttttcgtcgcacagacacgcattgagatgcgtatcaacggtctcctctacccggttgccacgctctccagagacgaaggcatcagctggctgatgaccatctatcagtccatgtctgacctgtccgacaacatgttcaaggcctacaaaccacaggatgcgcgtctgaaacaagagttcctgcaggatgtggagctgttcggtgcccgttatgcgcacatcaacacgccgaagggcgtctttgccgtaatgcgtcttatccccgacgacggcagtgccccaccctcgctggagacgctcggctttctgccggcacagattgcggtcatccacgccatgctcgccagtccggatgccatcatcatcaactccggccccaccggttccggtaaatccacgaccgggcgcagcttcatggcgctctggctacagcacggcaacggacagcgacgcatcatcacccaggaggacccggtggagggggaagtcgaaggggccatccacacttcggtgaccgccgaccgctccagcgaggaggacatcaaccttgcctggctgcgtggtcgtcgtgccatgctccgtctggacccggatgcggtctatatcggtgaaatccgcgaccatgactccgccatggccgccatcaactttgccgaatccggccacatcgtgctgaccacacagcacgccaacagtccgctgggaaatctcaaccgcctgcaaatcatcggcgtgccacagggcttcctgcgcagcagtcgtctgtttcagggactgattgcccagcgtctgctgccgacactctgtccgcactgcgcacggacacgggaagaggccgtgctgacaccggagcaacagcagttcacggaccgctggttcacgccacagcagcaggaagccctgcgtttccgcaatcctgacgggtgcagtgaatgcatccgtccggtgatgggcaccgcaaccagtcacggtctgaaaggcaggacggtggcagcggaagtgatgaaaaccagtccggaaatcctccgcacctaccacgatgagggcgaagatgcggcacgcacgctgtggctgcgtcagggtggaatcagcctgagtcagcatgcccggcatcatgtgctggccggacgggtggacccgtttatggccaatgacatcgtgccgtttgaggatgcaaatgcacaggaggcagagcatggccagtga

SEQ ID NO: 386073 - DNA, 450 bp, Salmonella enterica
atgaataacatccctccggcagcacgacggctgctcatcagcaccctgctgctgatgtccgccggcagcagccacgcggccctgaccgtcggtgacgtcgatgacctgcagcagcagaacgtcattctgtcccagcaggcccgtgccgctgaactgcgccagcgcattgcccaggcacagagtcagggggccgccaccgtccccgcgccggttatcagcagcgacggtgcacccgccgcgccacaggaaaatgcccgtccgcaactgacaggcattcagggagcacgcggacaccttgaggcccgtgtgcagcatggacgccaggtcgcgagactcaccaccggccagaactggcccggtaccaccatcaccctgcgggaaatccgtcctgacagcgtgacgctgagcgacggaacccgcctcactccgggggacagctatggtcagtaa

SEQ ID NO: 386074 - DNA, 1308 bp, Salmonella enterica
atgagcacatcagagattattcctgtcactctgcccggaagacgtccgggacgccccggacgtcgcatctccgtcattgccgggcttgagtggaaagatattcccgccggacagtccacaggcagacacatcccgccaggccgggggcagtatgtaaaactgcgcgccggcagcggtggcacacacgtccgcgtgggattcacccggtcaccgggtcgcctgtattcactggccgtgctggccatcccggccctgaaggggaacgggtatgcctttgtccgccacggagaacgaattgctttcctggcctgtctgcatgatatgcccgccctgaccggtgacgtgaccggcagcacggagctggtccgtaacgcctgtacggtgttcaggacaatgcacgatcgggatgaaccgaccgacggctggatgatcctcggctcgccggaggcaccggtggatatacaggacgtcctgccgtccaccctgccgggccgggcacgtctgcatccggtcaaccaggcaatacggattgtcactctgaccgtgcttgtcgccgcccttgccggcagtgccctgtggggctacagccgctggcaggaagagcagcggctgcgtcagctgcaggccatgaatctccggcaaatgcaggatgcaaagcagaacggtccggagcggcaggccgaaccccatccgtggccgcaactgccgctggtgcagaccttcctggatacctgtattccggcacttcgttcgctgcatgtctcagagggcggctggcagctgacggccgcagaatgtacgccggacacgctgcgggctgactatgaacgtccgaaaggctccacggtcacctatgaagactttcgcagggctatcacacagcacaaccgtttttcctttgtcaccctgcaggacggcggagaaaaagcccaggcaggttacagcctgagcatgacgaccggaacggatgaatccctgcaacccgttgagcagcatcttgcccgcttcctggcccccttccagcgcggggaccgcccgctgcagatggaaacggagaaaatgccggatatcgccgggcacacggtcactatcggagaccgggaggttctgcttttccgcgactggcagcagtggcagttctcactggaagaacgtctgcagccggatgcagccctgttcacgcagccgggcacgcggctgaccgccgtcaccctcctgctcagcgaagacggcgaactcacctggaaaacccgtggccagacctgggccacgcaggcacaacaacccacggagaacactcatgaataa

SEQ ID NO: 386075 - DNA, 1647 bp, Salmonella enterica
atgcgaataaaacccatcgcggcggcccttgtggcgctgcagttgtccggctgcgccacgcaccgggagttcagggagatcgatgcacagacatcggccacccgtgatcacgttcagtctgtactggacgaaacaaacagacagatgtccggtagcgcactgaccgtatcagacagcacctggatcaacccggagccggtccgcgccactaatgaaaagaagcaggtccctgtttgctggctgcaggtcaaccggactgacagcctgtccgtggatgatgtggcggccctgattgccgacagctgccacgtcaatgtccgtgtcctgccggatgcgcgcgtcagtcacgtggccacagccggtctcacccgtgccgtccagggtgaactcccgctgcccggcagcacctccgccgccgacagcaggggaagaacgccgctcggaaacacaggcagcagtggtccaaccacgtcggtatccaccggaggaaccctgtccggcctgcgctgggacggcagtctcagcggcctgctggatgacgtgacggcgcggatgggcatttcctggcgctggcgcaataatcagatacaacttttccgtctcgacacccgcacattccagctggcaatcctgaatgccgacacatcaatgaatgcgaaggttgtgggtggaaccacctcgtcctccgggtcttccggaacctccggcagcagttcactgagcggcgaacagagcacctcccagcagaccaacgtggcggtatcttcaaaagtgtacgacgacatcaaagccaccgtgtctgccatgctttcctcagaaggctcctcctggctggcaccgggcagcgccacgctgaccgtgacggacacaccggaagtgcttaaccgaattggggaatacatcgaccgccagaacgccattcttgaccgacaggtgaaactgaaggttgatgtctaccgcatcaccttccgtgacacgaagcagattggtatcgactggacggcggtgtacagcgcagcaaagggcatgggctacacgctgaccagcgccttcggggatgctgcatctgatgtggccaccatcggtgtcacctcctcttccggtcgtctgtccggttcagaggtactgattaaggcactgaaccagcaggctaatatcagttcggccaccaccaccaatacggtgaccaccaacatggtgccggccccactgcagatagcgaaagaaaccacctatctggccaaaacgtccaccaccacgtcggacagctacagctccacagagctggaacccggcaccatcaccaccggtctgttcatgacagtgctgccgtatatccgcgacaacggcaccatacagttgcagatgagtttcagcctgagtgatgacccgaccatcaccacagtcagcgcgaaagacggcagcacctccatccagacgccgaccacagatgttcgttcactgacccagcgtgccaacctgaagcccggacagacactggtgctgaacggttttcagagtctgtataacgaagcaaaccgacagggcacaacgtcaaaaagctggttcggcttcggaggaggggaaagtgctgagcgtgaccgttccatgctgctcgtactcgtgaccccggtactctcatcatga

SEQ ID NO: 386076 - DNA, 471 bp, Salmonella enterica
atgccttttgccgtactcgcactggccatcgtgatgacattcttcacgatcctttcatacgaaaccgggaaacaggccacccgcacggaagagcgcgtgctgaaacgggaggcagatgacgtcgcctcacagatgatgtcgctgagtcaggccctgacgcactggcggtggaagaatccgtccgccaccgccttaccggctgtcagcacactcggactgccgttctccacaccggactcgcgtatagggtatgcactcagtggcggacgcctgtgggtctggtctgcagaagacagcacccccggtctggcggcccgtctcacgacactcacactcggctccggcctccttttccggttcagcaacggcaccctgaaggacatgcagggcaacaccgtcagcacctccggtctgaccctaccctctgccctgcagtccacttcaggcacccggctggttcacctcaattaa

SEQ ID NO: 386077 - DNA, 1332 bp, Salmonella enterica
atgcaaaaaaaacacctgacgctccttctgccgtcactcattaccggctgcgccggtttcacctctccgccggagactgaaaacgcagccactgcactggtctttgtcgacgggcaaatcagcgaaagcagctcgctcctggcacagacacagcggcggctgagtccaccgcctgtcagccaccctgctgccgtgacgaacacgtccgctcaggccgtgacggcgcagtccctgcccctgccggcaccggtactcacggcagatgcctccctgtcaaatatcatcatgaccggcactccgggaagcgctccggtcacggcgcagcccctgacacgcaaccgcacggtcagcgactgggtgaaacagcttcttcccgccggctggcagttccgccaggagaatgccgccacaccggcactccggacgcgtatcgcatcctggtctgccaatgaccagtggacgcgttcactgaacagattgctggttgaacaacatctgtgggggcatctggactggaaaaaccgcaccctgaccgtcaccacttcaccggcagcgccagccacagacagcagcccgcaggccaccgcgccggcatcaaccacgtcttcggcagcagcatcgccggtgaaaacgaggccctctcccgcaccggtcagccctttccgtaacagcacggccaccggtaaatcatccccctcacaccttaaggtgtcaggacagtccggtgacatcccggtcgttttcctgtcggaagcccgtaatctcaccacggaacagtgggtgagccggttactgcctgacggctggaaaaccgactggcgtaccgacagacaggcacgtcagcaccgcactgaccggcttgctgtgaacgaccagtggacacgggcgctcgatgccctgctgacacgccagaacctctggggacacctggactggaacagccgcacgctggtcatcaccccgaccgctgccgcaccactcagtaccagcgggacaggcacggcgaaggcgacaggggccaccgttcaggcaccggccccccttccggcaccgggctggacagcagaaaaaggtgccacactgcgacagacactcacccgctgggcagcacaggtgccctgcaccgttaccggtcatcagccaggccagacctggtctgtggtctggtccgcgtctgtggactaccccatcgacgcggcattcaccctgcgcgggggctggaaagatgttctgacgcagaccttcgacctctacagtcgcgccaatacgccgctgctgggaacgctgtttgagaaacagtgcatcctcagcgtccgcgaccggaaagactga

SEQ ID NO: 386078 - DNA, 696 bp, Salmonella enterica
atgaatataaattccttaccatcccccgaaataaaagacaccgatgttttcattaccgtcataaccgttctggtgatatttactgcagcattaatcccgtcgactcccccgcccccggaagtgcaggaaacatttgatgccgtttattatgcatccctgcctgcacttacgcccgtcatcctgcagggatggcagttctgctgctccgtgtttgacaagacgccggggagacaggagttatcaccagtagtgagaacagtgaatctgcatcttgcactggccccatttctgataaacgtgatatctgcgctcgtttttttcggctgcatcgcagattgcgtcgtcatttttattcacggtcatgaaccttcagcccggggaattattcttcccggcgctgttgccctttgcctgggttatatattttctgtgtacagattgtacgcctcgtcccatgtacagaacggcagacacatgacactgctcatcatgctttgctgtctgacagcctgtttatcgctggcaattattgcaggccgacaggacattttttccggagcagaaagagaaagcctgctgcgtatcatagtctcgggattatgcttcacgttttgcctgctcatcggatacacccatctctggcttaattcatcagtcccccatctggaacaggaggatctgaaaaaccgccgataa

SEQ ID NO: 386079 - DNA, 255 bp, Salmonella enterica
atgccacagcaacatcccggacgactgcaggtgctggtcgtcgacacgcgctgcgaacgcagactgttttcaacgacaacaccgacagaccccgagacgcttgcccgccgtttctgcacgccggacaactgtctcgtggtggtactacgagacaacaggtttcttttccgtctggagcgagccccgggcagccacaaccgctggcacaggggacgtcgttcccgccatcagcatctgcaggactggctatcatga

SEQ ID NO: 386080 - DNA, 585 bp, Salmonella enterica
atgaaaacacgtattttatcgataatcaccgccgccacagtactgtcagggtgcgcaggcagcagcacgcaaccggcgtcagggatgcagacgttactcccggaacatcacccgcaggtgacattcacggtcgatactgtgcgaacggacacaacggccagcaatcctgtatgcctgccggaaaaatacggaagccttcttaatgagcgccatccggacctgtttgccggtgctcaggggattatttcacgcagtgcgttttttaatgacagcctgacgctgacacctgaaacgctccacgggatgatgcagattacgccctgtgttgaatcactggtaacgtccgcaggtccggatactttcactgcagatgtctcccccggtgtcagaatgcaggtatcaccggatattcacggcacgcccggaaatatcactctgcgactctcgaccacagaccagaaacgaaaacagactgttgaacaaagcatttctctcagaccggaacagtcccttgtcgtgaatggattcaccggagacggagctggcgaaaagcgcgtcgttctcatcacacctcacgtgcgttaa

SEQ ID NO: 386081 - DNA, 279 bp, Salmonella enterica
atgaacaacgaagacagcaccaggaaaacatccacaggtatgcatctgtgcttttctcccctttcaaaaaaaattgtactggccagaatgcgggaatcgaaaggtcgcctgcgccgcgtcggcaatgaccggggacgtgatgtcacgaatgaagctgcccgcctggtatgggaggtcgtccgggctgaaggcggaaaaatctggtgggaagaggaagatggcacctgcctggttttaaaagccgaaaccataaaaacagatgagaaagaaaacgcatga

SEQ ID NO: 386082 - DNA, 582 bp, Salmonella enterica
ttgaaacgtgaacatcttattccactggccatgctgggcggctggtgtgtattcgtactgttcatatccctgccggggttgcgtcagatgagcacatggcctgcacatgaccggatcgtcatgttgctcatgatgttcaccaccatgtgccttcccctgctgttacgcccgctgtccgtgttctttcgcaaaatatgcaggcagaacagcttttatgaccgggagctgccggacaatcacacggtccatattttcctgagtgcacacgccgacacgtcctccccggtggccatgcgtcgccactggaaagtgctgaacgaactgctgaccaccgcattacgccagggcaaacgagtctcgatgacatcacatctcctgacgcaaccccggacggacaaactggttcgtgccctgcagaagcaggggctggaggtttctgtgaaacgggatgagtgccccacaccggctttcgaacgctggaccatcaccgccagctggaccatcagccagtggaagattccccacgtaaacagacgcagcggcattgtcatcctgacgccggagagctggcgtcagccataa

SEQ ID NO: 386083 - DNA, 681 bp, Salmonella enterica
gtgaacacgacagaacatcccgtgcgccagttactctggtgcgcccttaatgccctgcatgccgctcaggaaaaccacggcatcaacagtgaatccggactccgccgctacctgcttgagtggctctccggtgccggcagacaccctgaattccggaacatcccggaagaaatcatggcgctgaaggcactggcggaacaggaccgcgatatccccattaccggcacgctgaacacgctctttctcagctcggccacagtcggggagtgcccgctgttccgcttccgggccgcaatgggcaggttacagaaggccggatggcgcacaaccgtctgtccctggacggagcgggtcttcagcgagtccattgaactggcctgtaccggcagacgtcatctgctgcagctgagtcgcacggaggaatgcttcatgccgtccggacagatgtgcgcccccgtatacctgcagctcatcaccccgcagcatcgcaaaacagagcaacttctggaaacggcagaaaacaccctggctgatgaaggttttcaggtggtgaggggatttgagcatcagttcggcatcgaacgacgtgaaatcctctttcacaccctgtttgtcggccttcccggcctgcctgaagaggcatggggcgtcaggccggaacagaccatcaccgtgcattaa

SEQ ID NO: 386084 - DNA, 1200 bp, Salmonella enterica; identical to SEQ ID NO: 79256

SEQ ID NO: 386085 - DNA, 288 bp, Salmonella enterica
atgacttatacggttaaattcagggatgatgccctcagggaatggctcagactggataaggccattcagcagcagttcgcaaaaaaactaaaaaaatgcagtgaaaatcctcatatagcctctgcaaaactacgtggattaaaagattgctacaaaataaaacttcgcgcatcaggttttcgtctggtctatcaggtgattgatgacatgttaattattgcggttgtcgcagtaggtaaacgtgaacgtagtcatgtttacaatctcgccagcgagagaatgagatag

SEQ ID NO: 386086 - DNA, 546 bp, Salmonella enterica
atgcttttaagttttagtgagttagatgttcttatttatcaggggaaggttggggggttatttcgtgaaagaaaaaatgaaagggttgctacagacattgattccagaaacaagtcatcatcaagcagtcatgaatatgattcagttttatcatttcaatttatttgtgataatggaaaagaaataaatgtgaatttaacaaactggaacattaacatatttccaggtcaagagcttattatttattttgtggaaaactcaaagaaaaacaaaaaaataccatacatgataaaaaacaaaagcacatcggaagtgactaataatgttcaagaaatgtataaagagtttttttatacatcatacttcaaactgataatacctttcctgttaatcatttcttactttatgtcatccatatctgtggctatcatgtcattcgttttatatgtcataatcagaagaagaataggaaaagatttcttttcagaaataaaaaggaaaaggttaaaaaaagaagatatcatggggttagagcacgtaatatag

SEQ ID NO: 386087 - DNA, 447 bp, Salmonella enterica
atgcagaggcagagaggctttcttctgtggtggcgcctggctaatgaaatgtatatatctgggaataaaaaacaacgaaaatgtgcgattaagataaaaaatgcgcttatggcaaagtatggatgtgatattggtctgggggcgcagattggtaaaggcctcgtgttgccccaccattcaggtgtcgtcattcacggtaatgtaaagatcggtgagaatgtgattatacggcagaacacgaccattggcgaaaaggaatctgacagcagagagaattatatcgttattggtgataatgtcgatgtaggtgcccatacgtgtattatcgggcttaacgtaaaaataggcagtaatgtaaaaattggagccatgtcttttattatggaggaggttccggataactgtacctacgttaccaggaaagaatcacgggtaattatgcattaa

SEQ ID NO: 386088 - DNA, 594 bp, Salmonella enterica
atggaaaaacatcaggaagaaaggaaaacccccgtcattgtggtgaaaaaacgtcgaactttttcgccaccatccttatccgaacaaacagatattatcgtgcctgtatctactgaacaggcgacagaatcaacacccgccggaataatttcatctgccgtcgaaacacatatccccgaagcgccagcccggaagaagaaaaagaaaagacaccgtttcccacgtcccgcccactggacccgagagtatactcacgagtgcgtggaaaaaataaaaaccctgttccctcatcttcgtgctgaaggcggtggatttatccccctgaaaattggcatcagcaatgatatttcggcatttctggcagaaaacccggatacagaactgtccatggacgaatggttctgtgcagtgtcctgcatcacctcccgccgcgtatatctgcagcggacctctgtcgccggcgtccctcgttatgggctggatggtcatcccgatgggcaggtctcagaaactgaagcacagagtgctggtcaaagactggcgataatagaacaacggtggctcaggatgaaggaacggcagactgagcaataa

SEQ ID NO: 386089 - DNA, 237 bp, Salmonella enterica
atgataccggtactggaaccgtgttttcagggagtaccggatatgtggtttttttcgacagttctgtttctgctcattgttatctgcagtgtggctggcgttgtgaatgcactggcggtgcggcgtgaattaaatgcacgcagggagcaggaatatcatgcccgggtgcgggctgcgacaggcgagcgtatcctgcgggaacggtacgaaaagttccggcaccgcagacagcactaa

SEQ ID NO: 386090 - DNA, 768 bp, Salmonella enterica
atggatgctgtatgttccgttgttctggtttgccagcctttcgacttaattatctgtaagaaacctgtatcattcaggaaaaatacggttttacttctggagccagcagccagaagtaaattatctgactgcccctctctcgtcagaacggtcgaacttgaccataaaacagtattgtcctttctgaatgatgtgaataacaggctgcccgaaatgttctgtattgacagacagggatatgtcgttgaggaagatattccgctgtcgctggtttattctctttttgaagggataagaattgcagacgcttacacgacgtcactaagagaaaaactctgtttgtccctgctttctgtatttcaggagcgtacaaaagtgatttctttcttactgacgtatatgaacacattctcgtataagattatggggattatcgggggagatttagaacgtgcctggcatcttaaagatatagccggacgcctctatgccagtgaaagtcttatcaagaaaagactgaaggaggaggggacctcattttctgagatattaagggagatgcgtatggagtcagcacgaaagatgattcttgaaaatactcactctgtctccatgattgcacaaaagtgtggctacaacagcacgtcatatttcatctcagcttttaaggattattacgggatgaccccattacactattatgataatgccgtaagtgaaatggctgaaaataaacaggaagatcccatgcagggaacaggccgatga

SEQ ID NO: 386091 - DNA, 1110 bp, Salmonella enterica
atgaaaaagctaacggtgacaatttctgcagtagcaacagcagtcctgatggctgtatccgcacaggcagctgaaatatacaataaagatggtaataaacttgatctgtacggaaaagtggacgggctccattatttttcaggcaataaggatgaaaatggtgacaaatcctacatgcgtatggggatcaagggagaaacccagatcaacgatgatttgacgggatatggtcactgggagtaccagatccaggcaaacacgccggaaaatgaaaaccatgcctggacccgtctggcttttgccggcctgaagctctccgattatgggtctctggactacgggcgtaattatggtgttgtctatgacgtcacctcctggacggatgtgctgccggagtttggtggtgatacttacagcgcggataacttcatgcagggacgcggtaacggttttgccacctaccgtaacaccgacttttttggccttgttgatggtcttaattttgccgtgcagtatcagggagaaaacggcggcgtgagcggtgaaaatacgacaaataacgggcgtggtgcactacggcagaacggtaatggtgttggtggctcaattacctacgaatatgacggtttcagtattggtggtgcggtgtccagttcccagcgtacatgggatcagaaccatacgggactgatggggaccggcaaccgtgcagaaacctacaccggtgggctgaagtatgatgccaataacgtctatctggccgcacagtatacccagacatacaatgccacacttgccggcaacctgggctgggcaaacaaagcccagaaccttgaactggtggcccagtatcagtttgattttggtctgcgcccgtcccttgcctttctgcagtccaaagggaaaaaactgggaagcatcaatggccgcaattatgacaaccaggatatcctgaaatatgttgatgtaggtgcaacctactacttcaacaaaaatatgtccacctatgtggattataaaatcaacctgctgaaagacaaccagtttacacgtgatgccggcatcaataccgatgatattgttgcggtaggtctggtctatcagttctga

SEQ ID NO: 386092 - DNA, 288 bp, Salmonella enterica
gtgaaggaaagcgatcacccctgctggctcgatgaagatgacgaaaacctgcccgtggtgctcgatgccatcctgaaccggggagcacgtttttcgtcggtggaaatgtacctggtcagcgattgtattgagcatatcctgtccagtgggctggcctgcgatgtgctgcgtatacctgatgaaccgccccgccgctggtttgatcgtggtgttctgcgggaggtggtccgggaagcccggaccgaaatccgcagtatggcggatgccctggcaaaaatccggaaatga

SEQ ID NO: 386093 - DNA, 318 bp, Salmonella enterica
atgaaaatgccatcaggatatacccgtattctcattgcggcggccattatgggctgctcaggaatggtatttgctgcaccacaaccggcaccgtcggctgaacagttgccgccgccatgtcaggagcgactggctccaccaccggcacagccaccactctatgcgttatcacagcagaccaccacaccggcagaaacactgaatacggtggtgaaaaatattcctgccgtggaaaaagggaagaagtatgaaatccgcgtggaagttcgtgaggtgacgccaccaccggcaccggatatggatgcaccaaatccttaa

SEQ ID NO: 386094 - DNA, 348 bp, Salmonella enterica
atggcaggaaagaaatttttttccgatgacgatattgaagcggcacgtcttgcactctctgaactccctgacctgaccgcaaaacgtaaaacactgcatgattttctgtctgcaattcgggatgacatcatcgtccttgtcaggacaaaaggttatacccttgccgacatcagaagcacactaaaggaagccggttatgaggtgggggaaaagacactgagggatatcatccgtgaagctgaatcgaagaaaacccgacgccgttctggcaggtcttcagcaacagaaaaagcaacatcttctcatattgaatcacaggataacgtaaaagtaccgtcagcacagtga

SEQ ID NO: 386095 - DNA, 315 bp, Salmonella enterica
atgagtaaaagcgaaaaacggattaaggatgcagtgattccccggattcgttgcactcaggcagagaaggaaaccatcaccgaaaaggcgaacttctttggcgtcagtgttcccgaatacctgcgccggctggctctgggaaagccgctgatcccggccatcgaccaggacatgcttttcgaacttcgccgtctcggggcactgcagaaacacctctttcttgagggaggacgtgtcggcgacaaagagtattcagaagtgatagtggccctgcgtgagtgcgcggatgcgctgaaaaaacgcatcagaaactga

SEQ ID NO: 386096 - DNA, 2754 bp, Salmonella enterica
atggttccggtaataccacaaaaacgacgcgacggcgggtcatcctttgatgacctggtgtcgtatattgtggtccgtgaccatgaagagatggataaaaaataccagaaggttgaggcctgcgaactgcgcggttcggagacgaagggtaatcgtttttcgcgtattgtcgactatctctgcaaggagaggcagtctggcgtttcatcgcttgagaaggtctacaaggatggcgtttttcaggagaacttccacggagtgacctgctttcataactgcagttcagtggaaacggcagtggatgaaatgcagtctgtcgttgatcgtaaacgcagtacgcgtggcgatactgatcctgtttttcattacattctgagctggccggagcatgaatgtccccgtccggagcagattcaggactgcattagtcatacgctgaatcgtctggggctgaccgggcatcagtttatggctgcagtacatacggatacggataaccttcatgtgcatgttgccgtcaaccggatacacccggaaacgtttcgaacccgtgctgtcggaatggcaatagatcgtctgcataaagcctgtcgcgagctggaaataaaacatggctttgctctgacaaatggcaattttattgttgatgaaaaccagcagattgttcgtcgttccgcgcatgaacggaaacaactgagtgcatggaactgtgatgcgcaggagaatttcagaaactatattcgtgtaaaaacgttaccttttgcgggtaaattccagactcagggatggcgtgctttttatctgtttatgggtagtaagggtctcacgctggacagaatgagcaatggtgaatttgcagttcgcgatattcgcaatcctgaacgttttgttgtgccgttatctgattttggtcatgagtggaagatgcagtcgctcgtagccgtcatgggagaatggcaggtgccttccgaaaatattctgcagcagctggaaaagctacggcacagaccggtattcttcgaacccaaaacagattatgtatcccgtccgctttaccggatgcaggagaaatacagtctggctgattatgcgcgggagcatattcatgatgcatttgaaaaaatgacatggcgtggcgctcatcatacagttgatgagcttcatgccctgtttgcccgtaacggtctgtatctgcaggtcatgaataacgagcttgtggtgtgtgacgcttacgacagaaaacgaactcccgtgcgtgctgaatctgttcatcctaaattgcaggtgcctctgttagcggatcttgatggcggctggaaagccgtgccacgggacatttttacgcatgtcccgccggagcgtgcatataaatctgaagggcttgagcgtgtggtgctcagtgacagtgaacggcagaaaactttcttcggtgcaggtccacagggagcactgaaacgcgaaatgttctctgacagggagtccctttatggctatgcggttgatcactgtcggcagaaaattgatgacatgatccgggaaggtcgtttcacgtggcaggcgtgtcatgagatgtttgcgaaggaaggactgctgctggttccgcagtacaaagggctggtagtgatggatgcgtggcggagtattccaacaccggtgcgtgcaacggccattcatcctgacctgtcactgcagattgcggagcagcatgctggtccgtttgagccggtgccgatggatatctttgaacgagtgcctccgcagtctcagtaccggcagtcgttaagtgcacgtgagaaagcggtgcgtatggagcgtcgtatagagcgtgccactgaacgtgcgaatctgcgcgaacgctataacacattccgtgcaacctggcagaaaccggatctgcaggcaaaggaacgttatgcgcgtatcaatgaggcgacccgtcgtgagaaagcgatcatccggcagcgttttcgtgacccgcgtatccggagaatacattacaacgcagcagagctgcggcgttatcaggccagaatgaacctgaaggacatgctgaaagaagaacgcgcacgtcttgctgaagccgggaagctgcatccaccttcatggcgtcagtgggtggagcaggaggcgctgaagggtgataaagcagcgatttccgcgctcagggggatggcatatcgtgaaaaacggggtaagaaagaaaccgtcactacgccgggatttggtgtcattaaatttgatgccggaattgatccacagatgatgaaactggagggggctaccggtgagttacgtcgtgacggcagcattgtatacaggcaggatgataacggacggacaatctgtcgggataacggggacaacattgttcttaaccgcgacccacagagtggtgtgctgggacggtctgcacttaaaacagtaccgttgatatttgggcgggagagtgagcgttttgaaccggatggtaatgatcctgctctactccgctcgtttggtgagattgttgcctggcacaaccggaaggacccgcaacatatccgtattatcagcagaaaagatgccgatgattatcgtcaggccgctgtgagcagacaccagaagcgggttgaaaaatccgaacgggatgcgcgcaactggcagtatgttgcagagtacctggcggaacaaatggatcgggaacagcaacagcaggacggtaatgctcatggcccgactccggttggtcataaggggccggggatgggacgttga

SEQ ID NO: 386097 - DNA, 2322 bp, Salmonella enterica
atgcaacacaaagtcaacgagcagtttatacgccgcagcgcgtggcactcccccgtcacctcgctgctgcagaatcccgacttctttggccctgccatcatggcaatgatgatactcccgctctttctgccgttactgaccccgctcagtatcctgggcatgctctttacaggcgtcatcttcaacaaccaccgctggcgctgccccatgaggatgcccgccacgctgaagtgtgacgaccccagcgaagatcgagaggagacagcccgctttcttggtgcatggaattacacacgcatcaggccgggtaaagctcggggggtattcttcctcggcacacaacgaggcagtgatgtcggtcgcgagctctggttatcccaggcggacctggtccgacacatcatgttcttctccacgacagggggcggtaagacagaaacactgttctccctgatgctgaactcactctgccatgcccggggcttcaccatgatggacggcaaggcacagaacgacacggcgaggaccatctggtatctggccctgcgcttcggtcgtgaagatgatgtggagttcatcaactatatgaccggcggacgctcccgcagtgaactgctccatgccggcgacaaatccctgccggaatccaactccttcaatccctttgtctacgccacggagacactggtcaccgaaacgcttcagtcgatgctgccccagaacgtccaggggggggaatggcagtcccgcgccatcgcgatgaacaaggctctggtgtcgggtgttaaatacctgtgcgtcacagaaaaaaggtgcatgtcgatgcagctgctgcgcgaatacatgcctctggaaaagatggccgcgctttacgtgaccggcgtcgatgcccgctggccggaagaggcgctttctcccctgaaaaactacctgcaggaactgcccggcttcgatatggcgcatgtcaggacgccggccatgtggaccgaagaaccacgcaaacagcacggctacctgaccggccagttctcagagacatactccactttcaccgaaacttacggtcacatttttgcccaggatgcgggtgatattgacctgcgggacagtattcacagtgaccgtatcctcatcacgatgatcccggcccttgagctgtcctcgcataccgcatccgcgctggggaaaataatggtgacgcagcagagcatgatcctcgcccgtgacctcggtcaccgggttaacgggacggacgaggaagcactggaagtcaaaaagtacgcaacgacgcttccttatattaattatcttgatgagattggtgcctactacacagagcgaatcaccgcaatggcaacgcaggtacgctccctcaactttgccctgctgatggccgcacaggatgcggagcgtcttgaaggcactgccggaggaaacagcgtttccaccctgatgcagaacgccggcgtcaagatcagcgggaaaatcgtcagtgacgagaaaaccatgaacatcctgcgtcgtgcagccggccaggaagctcacgcccggatggatacgctgaagaggaaggatggcctgctgggaaccgactggcaggacggtgatcagacgcggattgtcgatgaagacaagctgaaactcaaagacctgatcaatcttcaggcaggggaaaacgtcaccattttcaacggacatcccgtggccggcgcatcaatgtatattccggattcagaaaaaacgtctggcactccggtgcaaatcaaccggctgatacaggtcgacccgattccgctggcagaactgcggcatctggtgccccgggaaagtgaacgccgcattccgcgaccggagaaagtctcccgcctgatcgggatactgaagggagaagtggaaagtcccgtcgacagcttcacactcatcagtccgatgatgcgcaggctgcacgatgaatgcgccagccaggtgctcgacatgccggatattttcgacatcagcgaagcggtttacaacctttacagcctgctgtatacggcagatatccgtaccaaccggatatcacttatcagcaatgcgcctcctcagctgtcgtccggggatggggagtgcgatattatacctttcagtctgtccggcacccggccttcccctgagcagcttttctctgcgatgatgaaggcagctacacactcaggtgaagatactgcggatgctgacatgcagaatgccggtactgacgctggcgtggctccctcagcaaacgaggcctcatccggtgaggaccacgacgaactcttcgacaaagtgttgtcagggtgctga

SEQ ID NO: 386098 - DNA, 486 bp, Salmonella enterica
atggcttcgaaaggtattaataaagtaattctgataggtaatctggggcaggacccggatattcgatatatgccaaacggcggcgctgtggccagcattgcgctggccacctccgaaacctggcgggacaaacagacaggggagatgcgggaacaaaccgaatggcaccgcgtggtgctgttcggcaaactggcggaagtggccagtgaatacctgcgcaaaggagctcaggtgtacatcgagggtcagctgcgtacccgaaaatggaccgaccagaccggcctggaacgatacacgactgaagtggtggtgcataccggcggcaccatgcagatgctgggctcccggcagaatagtgcacagggtggccgggtacagcctcaacaaccacaacagggcagacagttttcaggtaattcgccatctccgggcaataccacaccgtccggcagtttcagcgacgatgacgacagtatcccgttctga

SEQ ID NO: 386099 - DNA, 588 bp, Salmonella enterica
atgtacctgcatcttgttccaaaactttttcatcgcatggctaataaatgtagcctgaaatccatttccatacctgaacttgattttataattgacagcgattcgttatctgtaggcaggccatggcctaataaatgtgtatgggttggaatgaggaaaggaaggaaagccgttaatggtctgattttgcaaacaaataaaaaattaagacggtttaccaccatatacacctgggatattgaaaacatggggttaattcatcatcaggtcaatgcttatatagaagataatgaatttgatatggtgtcacaggaatttcttttaaacggtgcttttgataagtggagcgacagagtacataccgcttacgagaataagccgccagcaagaatccagcccaaaatggagtccttgttaaataatcccggtgaagacagtcatgatgtatgggaagagtttgaatggggaaacttccttatatccagagaagaaagtattttacttcacacaattcagtctgaacgattaaacaccgacttctctttattcaggagacagccaccagttaatcaaccattacttgtttaa

SEQ ID NO: 386100 - DNA, 1212 bp, Salmonella enterica
atgtttcagaacgatatttttgacgaagaccagaacagcacctggcatgcagaatccactgacaactatttcatcgtcacggaacgctacagtgacaacacagaaagggtggcactggtactgaaaaaggacataacacacctgtactccccgacggacgcgagcggcatcagactctcttacagtaaatggagcggtgatgagctgactttaatgcccgacctgtcgccggaaaaagcacgcagagtggttgatgccattgcggatgaaatccgccgcagggagagtaccccggtcatacttcacccgctaaacaacataaaggctgaacgcagtatcacccggttcgcccggcgaattgctcccgtggtcggcggcatactcatcgcagccggacttatgtggatgatatcgggctggagcggcccattcaccgccgctgagcatatctaccgtaccgggatgacggaacagtatgtcggggatctgaacaggccggagccggcgcaccgcgttaatgaacactcccttcgccaggtggtcagtccagcggtggcaacccgtgacgccgccacacagcatatccgtgaccgtttgccggcgacacctgatgccttgactcagccacagccgtctgcagaaagggcggcccctccggacacgtcgacacaaccgacggcaggtgaacagcgtctggcggaaaacctgaaacgcgcagatgaacgcaacattttcacggttccgctctctgaaggacatgagcggacgctttatgttttctctgacccgtcatgtccgcactgccgagatatcgaacctgtgctggagcgtctttccggcagtttcaacattcgcatattcccggtgtccgtgattggcggagaaaaatcggccagcatggcacagaaagtgctgtgcgaatccgatgccactgcccgccgcaacgcctggaaggcactgttcagcccgggcgaggagatgctgtttccggttaaaaaggagaacggggatacgaaagcagcatcagactgtgagctggcttcccgcgccgtcagtgtgaatgacaaggcattccgggcttatcagtttgccggaacgccgtgggtgctcagtgaccgtggtcaggccgtcccgcaggagctactgaacaacgcaacagaagtcgctctctggctgaaactgaacgacaacaccacgaaatccgaaaaataa

SEQ ID NO: 386101 - DNA, 1194 bp, Salmonella enterica
atgagtacgtccacaaacagtgtgcaacagggtgagcaggggcttgccctggttgccatgatcatcatttcgatcattctctttctggttgtctggctgaaaggcacggtatataccacctgtgcgtttctgcacagctgctggggccttctgctggctcttccccgggatttcgccctgcacaggctggcagcagagaagtacaacctgctcgcagaaacggccgcacgagctgacagtatcaccgcctccgaatggctggacgtcatggcagacaccgtcacgatactttatgccgtgctgttcccgctggggctgctgctgttatatctctggtggggacatccgtcccagaaccggttcagccgcagacgcgtcagcatcaccacactgccacacatgctcgcccccctgtcaccggccttgcagtacatcctcgcccgcagtaacggtcggaaacggcttctgctggacctgccgtccccgacaaaccgcctggcacagacaccccaggcctttgttaaaaagtacagactggtttccggcagaattctggatgaaaggaagacggcagcctgtttcatgaaacaggccggtccggcgctggcggggtggaaaagcctgagaccacatcaccgggctttatttaccgtcttcggactacagttttttctgcaggaccgccccgccgcagaagccctgctggacaaactgaacatctccgccgccacggcccggaaaacgggggcttaccggaaatgccggcatccgttgccggactggtcactggtgacacaggatttcatgcgcgtggcacgccatcctgcggcacgccggtggctgaaagagcaccgttttgtacgcagtggtctggtctggctgtatgcccatgaccttcgcctgaattcgccccgctggtactggctgaaagaactcgagcggccactgtggtatgccctgcacagggcaaacagcagcaagggattcattgagggggcgggtattgtggccatagccagaaacgaagggctggcgaaaagtctgcaccttccggttccggagcctgacgtcagtatggcggtccggggactccgggcagaccttatcgcctgtggcctgttgtgggaggaagaatccgccccgcccgtacaacaggaaacacacaacgccggctgggaatgcccggagctgtga

SEQ ID NO: 386102 - DNA, 2214 bp, Salmonella enterica
atgagacttttcatcgccgaaaagcctcaggtggccatggccatcgctgaggcactctccgatatcaacaacacgcctgtttccagaaaagacggctacatcctctgcgggaaggacgccatcacctggtgtctcggacatctcctgcagcttcaggagccggagaccattaatcctgactgggcaatctggaaagcagaagacctgcccatctggctgtggcctccccgttactgcccgagaacgcgccgggagcctggcaagcctcctgccgaagaccccgctgtactcaggcaactgaacgtgatctcttcccttgcccgacaggcctcacgtatcgtgcatgccggagacccggatgacgaggggcagttgcttgtcgaggaggttctggtctggatcgggaatcagttgccggtggaccgtatcctgattaacgacatcacgctggccaccgtcaaaaaagccctggcggacatccgcgacaaccgccagttctggccgctctaccagcgtgcactggcccgcagtgtgggtgaccagatgtttggctacaacatgacccgggcctgtaccgtggcggcccgcgcacgttacccggaaatgcgcggcgtgcttccggtgggccgggttcagacccccacgctcggactggtcgttaaccgctggctggccgtcaaaaaccatcaggaggcctggtatttcaccgtggatgccgcattctctggcgcggaacacgctatcgaagcccggatgcaggtaccggaagatgccccctgcgatgagaaaaaacgtatcagtgacgagggctgggcgacccgttgcgcgcagtcactgacaaaacagcccgccgtggtggagaacgtcaggacaggcaccgaggtaagtaatccgccgctgccactgacgctgctggatctgcagcgcctcatggcccgtcagcacggcatcgatggccagaccacgctggccatcacacagtccctgcgcgacaactggaaagccatcacctacaaccgcagcgactgcccgtacctttctgatgatcagtatgcggaatcccccgcactgcttgacgcactgcagcgcacgggctgctggcatagcctgccgctggacccgtcacgcaaatctgccgctttcaacactgcaaaggtgggggcgcataccgctatcatacccacgacgtcgctccccgatctgagcagactgaatgaccaggagcgcctcgtctggcagaccattgcggaatacttcctggtgcagttcatgcagccccgccagcgggaagtggtgaccgtaacgctgacctgccggggacaacgtttcatggttcgtgcacgacgcctgctggagccgggatacacctcgctgctgaaagcctcccgacaggaagacacggagcaggatgaacagggcacactggccggggataacacggcctggctgaaacgtctggtaccgggacaacagctgcagtgtgtctccgccacggcagtccgccacaaaaccacaccgccgcccctgtttaccgaagacacgctgctggcagcgatggcacgcattgctgacttcgtcaccgatgaacgggtccgggcgctgttgcgccagaaggatgaagacaaggaaaaagagaacggcggtattggaacagccgccacgcgggccgggcatatccagcttctcaggcgtcgcggcctcatcacggagacgaaaggcaaactcattcccaccgaaaacggcatcgcccttatccgcagcctgccgcccaccatcacccgcccggacctcacggcgctctgggtcgaacgccagaatgccatcatcgatggcaggatgaccgtggagcagtttgctgaaaagctgcacgaggaactgaaagtgctggttgtccgggctgcggatatcaacggaataaaaccaggcggtgaccaggcagtcagcctgccctgccccggttgtcgtaaaccgctccgcttctggaaggacaacgtcagctgttcagcccggtgcgggttccgcctgtcaaggacgctgctcggcaaggaactgaccatgcatcagctgaccacgcttctgaccacaggacgctccccgttaatcaggggttttaaagggaaaaatgacaaaacttttgatgcgtatctggtgttccgggatatcaggaaaggcgatatcggctttgtgttcccggagagaaagaaaaaacgttaa

SEQ ID NO: 386103 - DNA, 954 bp, Salmonella enterica
atgtatagcgaagtaaagagatataaatggcatcaggaaatcgctcaggcattatggtatccgtacttttttgctgcattccctttaattttattttgctgttggtttaccatatcaaataataccggtttttattataccagaacgcatgacagattttactactgggcatggttttggttatttatatctttcattccagtcatcatccacttctggactatgcacaaacgaacagcagtcctgaaaagagttgttgaatatgtgaaggaagaaacaggattcactcttgcacggggatggagagacgaggtatttctccgctaccattccacctgggtgggtatagataacattaacggtaatctgttatatgtgaaagtattccccaacggtgtactggatgttataggcctcagcccgtctaatatcagtgcttacggaattgaaagtaataagttaatcacattacatacgaatctgccgcgatatccattcatcaaatggagtgatttcggtaaaaacgaaagattttatgagcttatcactcaattcatgaataatcacagcggtgacaacagattccagtcacgcatattctcgttgcgcgagaaactggaggatatatcaggcctcatcgttccggatatttctatcacaaccggcagtaatatgactcatgccgaaaaagtcgcacaggcccatacaaacgcgcaaaaacttaaagcctggcaggcggaaatgcagcgcaaggaagacgaggagcgcgcgcgtgaacgccagcagcagaatgcaaaccattcagcaccggcaatggatgaaccggaatatgttgaactgccacgaatccctgaattgtcaccggaagagcaggcagcactggacaaatcgacggaaaaagagcgcgcggaaatggagaaaattctgggaccaatccccacgtcattcaattaa

SEQ ID NO: 386104 - DNA, 2145 bp, Salmonella enterica
atgaataaaaaaatcagcctgctggtcacagcgggcctgctgccattctgtctgccggcacaggcagacgacgtcacatacgaaaccattgcttccgcagcggagaaaagcactgacctgtcccgtcaggcgctggtcaccatattcggagatgtggtcgtcaacccgttcagtttcacgaacgccagtgtcatcggcaatacatttgccatattcaacgggattctgtgcgggctggctctgttctggttcggcttcattggtatccgcaaggttatcagcgcggctcaggccggacgttttcagggcgcatccgcaattatcagcaccctgctggcgtttctgggcattgtgcccacggccagcggctggtcactctcgcagctcattttcctctggggcgtctcagtgatgggcgtggggggagcaaacctgatagtcacgactgccggtaacgatatcgccggcgggtacagtctgacgacccagccaaccagtgccagcacaaggacggcagcgcgaggcatctttgagatggagttgtgcaaatatgccatcaaccagtcgctgtcagatctgaacagcctgatgcagtcggagacggcctacatgaccaccacaaccagcagtaccgacaaaagctacacgctcacggtcagtaacggcagtggcacatgtggctctgttgaactgccttattcatctgccagaacagctgtctcagacagcttcttcaatggtctgagcgaccaggatgtcagcggtatttatactgcccagaaaaacgcgctcagcacgatgattaacacgatggactcggcagcaaaaactttcctgacgaccttcattgaacgccgggataacaacaccggcaccttcgaagacgtggaaagtatcattcagtcggctgcatccagctatgaaagcacggtgcagcaggccatcaacaacgtgaacggtgaaaacacgatacaggaagcactgacagagtacctggacacccagggttggatcacactgggcgcgtggtatcaaacatttgcgaccgccaaccagagactggcaagcattgctaatcaggcaccttccgtgacatcgctctcatcaatcggagagtccggtccaaccgacctgtaccaaggggtaatggcggcctacaaaaccaacctgcaaaacacaacttatacaccgacatcaagcacatcgggagtttcattatccaaatatgaaatggatagtcaaaatgctgaggaccccaacacactaatatccaagttattagaacagtcatttggaattagcatgatccaaggtttcataaataccttaaatgaggatacatccagcccattaataacgatgaaaaagattggtgactatacactaagcgcagttgaaacaacttatggcacatatattgctgcacaagccataactaaaggagcaggaagttctgccattggctggttctttgataaattcactggagcagctacatttattaataaaatattctccgccaccgcaccggctattaactttttccttttatgggtctttgttattggctttcagctttctatatttttacctgcaataccattcatcttctggatgattgctgtcggcaattggatagtgagtgtattaataggttgtgcagcaggtcctctctgggctgcaacacatctcggcgtagaacatgacaggggaagtcgtgctgcctatggatatatttatctgatcgatgggatgatccgtccttcattgatggtgttgggttttatattcgcatctgtcgccgttgttgccgtaggaacaatactaaacaagattttcggtattgccctaacgaatatccaagcaatttctctgacgggcattattagcgtcataggattcctgatgatttatgcaaggatatgtacctcgatggtaaccaatatatttgcacttcaggcttacatgccagattatattatagctttcctcggaggcagagaggcagcaaatacattctccggcatggttgagtctgtaaaaggtatatttgtttctggcggcagtaacttaagaagatctcctgccacaaacattattcagaagaaggatacaaataaaaatgatgatggtataaaaagttaa

SEQ ID NO: 386105 - DNA, 225 bp, Salmonella enterica
atgccactcatcattcaaatcaccatcagtgaagacactgaacgttcacgccgtaaaggacaggttccgggctgtcatatccatgtggatcagatatctcccgtcatggctgccacagaggccgaacaaatgacggcagaaatgctgctcagtcacggcttatcgctcatgaccccgtcagcatcttttcccaccacgccagacgccaccaccaaaaaacactga

SEQ ID NO: 386106 - DNA, 564 bp, Salmonella enterica; identical to SEQ ID NO: 34448

SEQ ID NO: 386107 - DNA, 1212 bp, Salmonella enterica
atgcgccttactttttgtcggctccctgctgccgtcttcggcctgggatgctactgcataccactggcggtctccgcagtgaccgtgaatgtgaattcaagcgttcccatatcaaccgaggttgttccccagctcagtaccgcaaacacggcactggccagcatcctgaccactgagcaggaaatcgcaacggcgattgcggaaaacgcgtcgaaaaccaatgccatcatcacgcagacagcgcaggcaaaccgcgaacagcagattttcagtaatcaggtccagcggcttgaggaagcccgtaggagcttcactctgccggaaagtatctgcagtgaatccgcctccggcgtggccgttcaggcccgcaacgaggcgcgggccaccacatccagcctgtcttccggttcagggatttcaaaagccgccgtgaaggagcgtttcaccacgccgccggcctccgaagccacggatgcctatacaggtgcagctgttcatgcgtcgtactgtacggaggtcgattacagcgctttcggcggaaccactctctgcccttccgttggcagttatccgggcggcgacagccaggtccggtcactgtatgacggagcggggaaaacaggaaagactcccgacctgacgttctctcaggaccagatagatgccgcacaggcctacctgaaaaacacggccagaccttctgccgggcgaacgctgaaaaaaggggatgccgtcacgactactggcatggcctacaccggcctgcagaatgaattcaatgccattctggatgcagctgcagaaccccagcagtccctgattgctgacagtacccccaattccgccaccaccgctgccgtgaacgaggccattaacggctctgattcggcaaaaagctattacgaagccacggtgtcagatacggccagaacgtccggaatgagcaaccgggagtttgaagcctttgaagtgggacgccgctatgccaacacggattatcagacggacctgcagcagatggacggggacaacctgacacgagaacaaatccgcatcagttcgctgattgcctgggagctgcacgacattaaagagcagatcaggaaaaacaacattctcacaggacaactgctggccgtcaccgcacgcgattcctacgcggcacgactgggcgcgcttgaagacaaaatcaataacggagtcagccgatga

SEQ ID NO: 386108 - DNA, 3063 bp, Salmonella enterica
atgtcaatcatcacccgcattgaagacagcctcatctggctgtcccgctacggacttgccagagaatttccggaatactgcgatctggaaacagtcattgcactgaccgacgatgaccgtatccgacacccggaactgacctccccttacattgccgtcactgccagaggagaatacatgtcgacactggaaatcgccggcgcactgaaagagatgagggaggatgttccaccggatcagattccaccaggaagcccgtgcacctctctggcgcattttgcacagcacctgacacctgcgctggcgacgtttttccggaccctcggacacaaaatcagtatggttctcgagcgggaccccgaaggcggagaagcggaaatccggaacatgctggccccccagtatgcctccctgcgccggaccggcatgcagatggaggatattcttgacgagaaaatcgccacgctgtctccctggctgatccgcgaacgctgctggctgtccgtctggagctcacatgaggcaaccagccgtacggagtacacggattacctgaaaaagaaaacgcagacagaaacagcaatgcctcatgccaggtacggacagccgctctgggaaccgatgttctccgggctgaaaatccggcatgacgcacttatcaacacactgattcatgccctgtctgccgacagggaaggtcagcttgtcagactgatggaaacggcagaagtctgcagggaactgcgcagccagatactgcgcggacaggttccccgggactggcgaccggtccttgccggtgaaaacagacccgcaggctggccacagcaggatgatatatccgcactgctcgccccaccactgaactttcagctgttcagcgatgatgtggagacatcgggcagtctggtccgggctggcggactctggcatggcacggcgagtatcgtgctgccaccgcagcaactgcagagcatgaacgacctgattgtccgtattccccggagcgtcccctggcggatacgcatggatattgcgcccggcggcatgaaaaagctccagggaaaacgttttctggccagtatgggacgcttcattaattccatccgccccctgagcgatgccattgagacgcttgctgaaactgaccgcaccacgccggtctgcgtcatgaccatcgtggcatccacctgggcggccacaaaggaggactgccgacgtaacctgatgctgctgcgttcagcactggaaggctggggcatctgcgaggtcaccactacgtttggtgacccacgccgtggctgggtgaacagcctgctggctgcctccacctcatccggcccgaacctgctctacccgccgctgaacgaggcactctggctggcgcccttcaaccgtccggcatcggcctggtcagatgacgcgcaggtgatggggcatgtagaggacgggaaacccgttccgctggggctggccagctcccgacagacaaagttcacggagattgtcggtggtgaaccgggcaccgggaaatcggtactggtgaacgccctcagtaacgcaatggtgacctctgccatgcagaaactgccgtttcttgctgtcattgacaaagggtactccgcgctgggtcagatccagctggttcgcgataacctgccggaagacaggaaagatgaggcggtgggcatcgtactgaagaacagcgacgaatactgccgcaacccctttgacattctgttcggtgcccgttatcccatcccgccggagcgggagttcatgctcaacctgctgtatgccctctgcattgacgcctcgaaagccgatgcccccaacccggcagacacccgacagattttgtcccggatcatcgatgccgccttcacgcagaccgcagagaccgctccccgcctctatgaatacggcaccctcccggcggtggaccgggcgctggccgagagcggcctgcgggaaatgcatgacgcagagtggtggagtctctgcacctggtacgacgtgcgggatatgctgcacgacagagggtatcagacagaggcgcagcaggcgcactaccaggccgttccggagctgacagacatgatcggtctgctctccactgaagccatccggaccaccttcggcaccgtgcagcgtgacggctcacaggagctgctgctgagttatatccagcgctcgctgaccagcgcccgcagcgagtacagaatgctggcaggccggacacgtttcgccctgaacccggacacgcgcctgattgccgttgacctgaacctggtggccggagatgccacgccggcaggaaggctgaaaaccgggattatgtatctgttcgccgggcaaatcaccagcggggacttcatcctgccgcagtaccaggaagaggtgaaaaaaacgctggcaccggcatactggccggccatgcaggaacgtattcgccagctggaccaggaaattaaaacaaagctgtacgatgagctgcacaatgtgcggggtattgatttcattctgcaggcgctggaaaccaacgacagggaaatgcgtaagttcggtatccggaccgtgctgtgctcccagtatctgggggacttcccggaggcaatattaaaatctgccaactcactgtggctgatgaaaatccgggaaggcgacaaggagcttctccggaagcactttggcgtaccggacgtgacgctgacacgcttctcacgacataccggaggtgccgcaccggacggcagcggaacatcgttcctcggcgtgttcagaacccgcctgggaacaatggcccggatactgaaaaacacactggggcccagagaactctgggcactgaactcatcaccggaagacagcgccctgcgccgtctgctgaatgaagaggtgggtacgaaaaccgcacgccgtattctggcagagaactttccgcacggctcggcagcccgggtgattgagtaccgccggaaacaggccggtgacagggaagcaacgtcagtgacggcaggactggcgacagaactgctcggaaagcagggttatcgtctttaa

SEQ ID NO: 386109 - DNA, 708 bp, Salmonella enterica; identical to SEQ ID NO: 34445

SEQ ID NO: 386110 - DNA, 537 bp, Salmonella enterica
atgctgattaacagaaaaaaactgccggcccttgccgttctcttcagtcttgtcattctgccatccgtctgtccggctgcagagcaggtaaccgtgggattctcccccggcggcagtgctcaggcggcagtgctcgatgtcatcggtcaggcccgggaaagcattgaccttgctgcctattacctcacctcaaagagcacggcacaggcactggctgaggctgctgaacggggcgtcagtgtacgcgtggtggcagacaaaaaagccaatggttcacgctataccgccgccacctggctggcccgtcacggtattcccgttcgtgtgaacgggcattacgacatcatgcataacaagttcatgattatcgacgggcggaccgtggaaaccggcagcttcaactacaccgcctctgccgacaaacgaaacgcagaaaacgtcattgtccttcgcgatatgccggatgcagcacaaccgtatgcccgggaattcgaacgcctgtggaatgaatccgaaccgctgaacagcgggctgtaa

SEQ ID NO: 386111 - DNA, 423 bp, Salmonella enterica
atgcgtaactatctccgcacgctgtccctgtgccacccggctgaacgctggctgatgatctgtgcccgtatcagctggcagctgacccgccagcagcatcgtctggtgaaagtactgaccgcgctgctggttcccctgctgcccattcaggctcatgcctcctcagactgggccgcaattctgaacagttgggcaaacggtgccgactccggcctcacctccctgctgacctacgcaaaattcgggggggctgcgctgttcatcgggggcctggtgggtttctcccgtgtgggtaaaacccccaacgtcacggcgaaaggctgctttattgccctgctcgtcggggccgggctgttctccgtgggggcgctaatcaacagtacccagagccagtccggtctggaaaccaccaccgtcggttaa

SEQ ID NO: 386112 - DNA, 534 bp, Salmonella enterica; identical to SEQ ID NO: 34442

SEQ ID NO: 386113 - DNA, 885 bp, Salmonella enterica
atgagtaagcagcacaacaacaccggtgactttgacatcccggacatactccctgatcccgccacagacacagacctgcaggtgctcacggcaccgccaccggacacagaccccgaccttcctgaagcggacgaggaaatcacggataccgatgacgatccggaaagtgccccggaagatgaggaagataccccactccccttctggcactggcagcgcccgctctttctcggcctcagtcttcccattatcggcggtattctgctggccattgtcgcccttgtcgtcacgtcactgccctcctcaccgccggcaggcaacgacctgacactcaccccggaggaaacgacggcggccgacacagctctccggacggcacacacgcagccccggacgatggcgatggacaacaaccagcccggagaagccgtccccccgaccggaggcactgaccttcaggcactgacccgcgctctgaaggaggaaatggatcagcgaacagacgccctgcagtcgcagataacaaaactgtccgggggcgtcgccggcctgtcagatgccctgcgcaaggatgaagacgccctgcgtaacctgatgacccgggtacaggcgctggaggcggcagtccggcagacaaccacggccccgcgaactgcggcgcagcctgcacaggcgacagacaccgcaccggcttcccggcgcaccaccgtccactccgccatcagtggcatgcgtattgtgtcgatggacagcggcatggcctggatacgctggaaagacagtacctggtctgtccgtcagggagaccgactaggcagtgtgaccatcaccggtattgaccctgctgaacgcactgtgaccaccaccggcggagtgatccactaa

SEQ ID NO: 386114 - DNA, 1296 bp, Salmonella enterica; identical to SEQ ID NO: 34440

SEQ ID NO: 386115 - DNA, 948 bp, Salmonella enterica
atgccaaaattactccctttgacggggctgcttcttgccgtcctgtcaggccaggtactggccgaatccacaggaacaggaacgccggggacatccgcgcagggtacgcggggaagtgtgccggcctcccccatcagcggcaccgcccccctgccgggactgtctccggcagctcaggaggcggctgcccttgactcaccgctgaccccggacgaaatccgggaactggcaaaacggctgcaggccacggagcaggcgctggccgccccggtgaccagcgtcgttccccgcatcagctcactgacggtcagtctttctccgggggccagcctgccggttctgcgccttgccctcaataacgccagcacggtgacgttccaggacagcacgggggccccctggcctctggcggcaccgccgatgaatccgaatgagcatctctttcagatcaactacatcccggattccccagtattttccgtcctgccgcgtaccgcctgggcatcaggcaacgtgactgtacttctgaaagggctggaagtgccggtcatcatcagtctgaccagcggcgatcccgacagcaatatatcgtcacgtgaaatcgatgcccgtcttgatttgcgcatcccccggcagggaccgcaggccgctgccggccccacaccaccggcacgggtggcgcttcatgatgaaacgctgcaggcctttctggacgggacaccgcccgatggtgcccgtcgcctgaaggtcaggggtgggccggataatctgcgggtgtggcgtatcggcgatgacctgtatgtccggtgccgtgcaatgctgcgcgatgagttcgaacagacgctgtcatctgccgacggaacccgcctgtggaagctgcccgtcaccccgttgttaacgttttccgttgacggtcgcaccgtcacagcctcaccggaactggagtaa

SEQ ID NO: 386116 - DNA, 699 bp, Salmonella enterica
atgcagaaaataaaaaaaccggcctcggccggaaaaacaaaacaatcgtcacgggtgaaaactccttacgccgatgccgtggccctgatgaaaaaagcagccgacgtgctgaccatcggacgcggcatgatccacatcacgcttgtgctggcgtatgcccttgccgtggtcgtcacgctggcaggctggctggcctggaaggtcgcccaccccccggtgcactacttctcaacagagaacggcgttatcacccgtattgtgccgacagatgaacccggatggtcccagaatgacgccattgatttcggtgcccgcgccctgcgcgaatccttctctctggatttcgtgcacttccgggagcagacggcggcggtccgtccgtactactccgccgaaggctataccggctacgtcaggggactggaaagttccaacatcctctcctccatacgcgatgacaggatgaacctgaccaacagtatcggtgccggcgtggtgtcaaaaaccggccgcctgagcgacggcacctgggtctgggtgatccagtaccgggtcagtctgcagcttgttggtcagaaaaccaaacgtcccgaacagaagcaactattcgaagtcaccatccagcgcacggacccccgtgtgaaatacgccgggatggaaatccgccagatcatctcccgcgacgcaccgcgcgattaa

SEQ ID NO: 386117 - DNA, 390 bp, Salmonella enterica; identical to SEQ ID NO: 34437

SEQ ID NO: 386118 - DNA, 3711 bp, Salmonella enterica
atgccgtctgtatcccgataccgcacctggcttgccgtgcctgcagatgaaatagaagatctcaaacaagcgcatcccccgatgaacgggcacacacccgtcctctgggataaagagcacaaactctggtttgcccgcccgggggcggacctgtccatgctggaccgctggctgccccgaccgcaggaagtctccatgaacggcagtgatccggtcaccgagtttgcccaggtactggaaaatgccggactggttctgaaagaactgccggccatggacggtaaaatccaccgggttccgaccaccggtgacaaaaacgggcaaaaaagtggcgcatatcgcggcttcctggacggcagacctgccggctggtacagggattatcgcagcgcggatgattcgccggtcaactggaccttctccggcggagagcagacagatccccgcgcaaggcttcacctgaaagcgcattcgctgcaacgcagggaggacgcagagcgggaactgaaagcacagtacaacagacaggccgcgtatgcccgccgctatgtcaacaaatggccgcaggccacggcacatgaatacctgacccggaaaggcattcaggctgcgccgggggtgcgaataaacgacaaaaatgagctcgttattcctttccgcaaccgtaacggcgcaatacgctcctaccagcgcattccggtcaccggcgggaaggatgcccgcatcctgaaagattccgagaaaaccggtaactggtttgcgctgggtacaccgcgcaacggccagccggtgctgtttgccgagggctatgccactgccgcctccctgcacgaagccaccggccttccggtgctgatgacagtggatgcgggcaacatgattgccgtggccgaagaggcccggcaaaaatggaagcaaagcccctttatcttctgtgccgacaacgatcatgcacgccaggttaacaaaggtatcgtcagtgcaacaaaagccgcagaactgacaggaggatcggtcatctttcctgcgttcaccgatgccgaaaaagcgcagggactgaccgatttcaatgacctggacgccagccggggacgggccgcttttcagcatgtcatcaacgcccagttagaacatatcggggtttccacccccaacagtaacactccggaaatccgggaggcactggtgatcggcaacctcgtttttacaccggtccacactgaggaaaaaaacatgactccgacagaacatcctgaaacatcacccgatacagcacacagcagtgaacatgaaccggcaccttctctgcctcctgcaccgcctgaagtgcaaccgtcactctccggtaacgttcatcatgagcctgtgacgaccggggaggagatgaagcaaccggaaagcatcgctgaccaggactctccggaggcccccacggacaacacacagacgtctgacgttgtacctgacacctccggtacaaccgctgagctccgggaaggacatgaggctgtcacgatggcgacagcgcaggactggcaacactttgaggaggagatgaaacagcccgaaaatatcgctgggcacgacgcggatgaggcatccgcagagcacactgcgttcgtatcgtcggcagatgccccggaacctgagccctctgccacagagacagcatccactgaagcggctgtcagcaatgaccaggcagagacaacgctcacacaacaggaaaaacctgacacggcagaaacctccgcagaacatacggatgccactgcagcagcgccggcagaacagacaccgtctccgtcagcgagtgagccagccctccctgaagatactgccggcgatgagcagctggcagcagagacatccctgcagccggatgtaccgggtgcaggtgatgacggataccctggctatgacgtcgaataccaggactacagcgcggaatatgaggactatgatgccagtgccctgcaggagtacgcagccatgcagcaggcagccacgatgcagcatgcagaggctgaagcaggaacggagacagaacagacaacggacgtgccccttcagcagccccaacaaccccgtacagaaccggcacaaccgcaggccacctcagccgcccccggaggcactgcatccccggcatcagaagcgtcagacaacagcgagcccgacgccatcacctatggccctgaacgaaaaaatcatacccgcgtccgcacggatatcgacaaactggtccgcagtctccagaccagagagcagtctgaccatacactgcagtatcaccttccggatggcacgcacgccttcacagacgtcggagggcatctgctcatggctaaagggcagagcacgcaggagcagtccatcctggccgctctcggggtggccatgcagtattacggcggggggattgagctcaccggcagcgatgagttcaaaaaacggacaatggaaatcatcgtcgactatgacctgaaggtcacgatgaaagatcccgtgcagcgaaatgcgctggagcagatgcgggcagagcgggagaatcctgacaccatcatgacgcacatgcccacaccggaactgaacagaacaaccggacaggccatgaggcagccggaagcaccggtaccgtcacaacccgctgctgtaccgccccaacagcccgctgaagctgcggcatcgccgacacaggatgaaacgccacagccgccggcagaggcatccgcaccaccggtcacacccgtaccgccggcaacagaaacgcagaacgctccggcacccacaaccagcgataatgcgcgtatggttccgggcaaacctgtcactggccgtctggaggcatccggacggggcaccgatccggaaagcaaccagatgactgactggatacagctgaagacacgctcacagaccgtcactttctggggggatgccttcggcaaactgacccgggattacaaagccgggcagatggtcactgtgacaatggcctcacgcaacgaagcacagtgcgaatggactatgcagtctgcaggaaaagcaacagcaaggatctctgaagagccgcaacccggcgaacagatgaaactcttcgatgccgggacattccgggcagcaatggagcagatttgccggatactgccacagtggcaggatgagctgaaacaacttcctctgccgtcacaggatatcgccctgctggacaacgggcgtccgggcaccccgactgcctcatcccgttgcctgcccgcaccgctgccgcgcaacagtctcacaatgatcgccggtggcagtaatgacaacggcctgcaggcagccctgttccggacagccgggaattactatcagggcgtgatgcggctgggcgggcacgggcttttccccgttcttgtcacaccggtcaaccagaaactggtcgttacggccatcacgaaagacggcccacgctatgccggatacggtaatgcccggacgtcctctcaggacggcacccccgtacctccggacacgctcagcttcacactggccggtaataaaaccacactgcatgtgccgctgacggccccccgtaagctgtctgccgacaacttccggctgctcggtttcccgcaaaccatgcagcagtgggaccagcagcaacaggcaaaaaaaacacagcaggcggagatggcagcacagcacaaccccgcgccgggacggtga

SEQ ID NO: 386119 - DNA, 288 bp, Salmonella enterica
atgtattacgcatgccgctggcgggatgcatcgccgcccgtcgctgtttttggcattccgttgccgttcaccctgatttacctgttctggtgcccgtttccgtccggcaacacgattttcatctgcacgcttgtcctgggcgcattcgttctgctgggccattttggctggcgacttcaggtgctgctccagcgactggtttatctctggcacggaagccgggctgccggtcgcccgtggtggtatcgccactttacggaagcgccccgtcgctggtccggtctgtga

SEQ ID NO: 386120 - DNA, 1158 bp, Salmonella enterica
atgtcccatgaattcacaccgtatgactttcacggcacaccgtctgcggaagacttcaaagccttcatggcatggtgtgccacacaacaggtatccgatatcaacatgcagggcggcagtccgctgtccgtggcccgcttcggtcgccgttgccgggcaagtcacatggtgctggcctgcgatacggtcagccggctcacggatgaagtctttgggctggatatccgcccggtcattaccagcgggcagccggtggaccgggccttccagcttgacggcgacatgaacggccgttacggcctgcagcgcggggagcgggtccgcttccgctgcaattttatcctcggcactgccggacgctttgaagagtccatctccctgaccatgcgggtcatcccctcggctattccgtcgctggattcgctgaatattgaaccggaactgaaagcagcgctgctgccacaacaggggctgggactggtctgcggggccaccggctccggcaagtccacgctgctggcagcaatataccgttactgtcaggacaattttcctgaccgcgtcatcgtgacttacgaagatccggttgaatatattctcgggcgggacactgacctgctcaaacctcaccagtcacagattggccggcacgtgcccggctttgctgaaggtattcgtgctggcatgcgacgaaacccggacctgattggggtgggtgaaatccgcgatcaggagacggcagaggcggccattgccgccggagaatccggtcacgtctgccttgccacctgccacacccactcaccgggtgaaaccatttcaaggatgctgggtctgctgccggtgcagtcccgtgatgccatggcgcatgccctgctgggcaccctgtcattcattgttgtgcaagtgctggtcagaacccgggatggacgccgacgtgctgtccgtgagttcatcacttttgacacggcactgcgaagtgcactgggtcagcttcctcatgaaaagtggggagaacatatcgacaacatcatcctgctcgaaaaacgcagaattgccgatcaggttgccatcctgtaccgccgtcatgacatcacccgtgaggaggcctgtctgttcatcccccatcacgagtggtcacgactgcccgacgcgtga

SEQ ID NO: 386121 - DNA, 813 bp, Salmonella enterica
atgtttcgtcatctcattctggccaccaccattgccgtcgcactgtccggctgtacgcagatggcagccggcagccgcccgcacacagacaccggcacgccggatatcagtaccttcctgcatccggaaaatgcccgccccgacggcatgtcggatatccgctatcagttgctgaacgagactggaaaaacactgggattccggggaggacgtgcagagcgcgccgccgagctgcgcaggacacttgaacaccgcgccacaacacttgatgccctgtacgacttccggccgctgctcagcccggaaggctggctgccaccggtgattgacgaagcccgggacgtggcacatgtcacgggcgaacagttcagaacggcagacaccgtgtggaccatcgtctctcctgaacgcttcgtcagcaatccacccggctggcgaacctggctgttcaccggtctgtcggacaaagtcacgccgcctgacggcagcgttatccctgaggaccgcagtcagcgaaaagtctgggagcaggcggtcaggacaggctggcaggaaggacgtgatgcagcagaccagatacttgaagccaactttaaccgtcttaaccgtgactatcgcggcatgatgctgtacgccatgctgcgctcacgcggaatgatttcagcacctgccgtcaccgacaccgttcagtccgtcaccggctccggcacaaaactggtcaccggcgaccgcgtccgcaggctgaaacagcacgccggcttcgaactgaacaaaacccactggcgtcccgtcatcagcacggagaaaccgtaa

SEQ ID NO: 386122 - DNA, 450 bp, Salmonella enterica; identical to SEQ ID NO: 34432

SEQ ID NO: 386123 - DNA, 264 bp, Salmonella enterica
atgtttgacaaagaaacgtacatcgaaaacaaagcctttacggtgcaaccgtttgatcccgcaaacctgcgattgatcaccgacaggaaaaatgaatctttcattttccagacagaatacatagtcgctgtggaaccgcgccagtcgttccgggacccgatggttaccgaatctgacgtcatcctggcgaacgacgttcgtatccgggtatcgctatcaccttctgacgtgttccagcagctcagcaaaaacacagggctgtaa

SEQ ID NO: 386124 - DNA, 1203 bp, Salmonella enterica
atgatgaagaaaaatcatattacccgcaccatcattgcatctgctgtattattttcatttaacgctgcagcagcgacgtcatattttgaagcgcgtaacgatgcaatgggtggcaccggggtggcatcctcccattatggtgtggctcctctggcaaacccggctttactgacaaagcacaacagcaatgatgatttcagcctgttactgccgtccgtgggcgcacaattgtcagacccgaacgacatcgctaacaaagccgatgacattcaggatgactgggatgccttcgaccgcgcggtcgacagcaattacggtgttgaccaggcagcggcaaacctgaaacagcgcctgcaggagttccgcaatatccacgctgatgcgcaggtgggtgtttctgccgttgcggcactgccgaatgacacgctgccggttgccctgatggtgaaatcctacggtacggtcagcgttgacggcaaagtcagcgacgccgacctggaatatctggagaaagtcgccaacggcacaatcacggatgtggacaaaaacgcgctcacctcccgcgcgtatggtcgtgccgcagtggtcactgatgtgggtatttcctttgcaaaagaactggaaaccgccggtcagaaatggtcactgggcttcacacccaaataccagcgcgtggatctgttcaactacaacgtctccgtgcgtgactacgacaacagcgatttcagcgacgacaaataccacaacacgaaaaacggcgtgaacgccgacatcggggcatataccgacctcgatgacaactggacgctgggtctggtagcgcagaacctcattccacgcagcatcgatactaaagtggtcgacggtgttaaggaaacctacaaaatccgtccgcaggccactgccggtgtgtcctggcacaacgacctgttcaccaccgcacttgatgttgacctgacaccggccagcggattcacctccgacagcaaacgtcagttcgccagcatcggcgcagaattcaacgcatggaaatgggcacaactgcgtgccggttatcgccagaacatggcatcaaactccggaagtgccttcaccgcaggctttggcatctctccattcgacgtcgtacatatcgatgtatccggcctggtcgggaccgaccatgattacggtgcaatagcacaactccagttcactttctga

SEQ ID NO: 386125 - DNA, 384 bp, Salmonella enterica
atgcagtgcctgcatgacggtttcatccccatgcaacgttacgccgctctccgccatctgcttgctcagcgcaggcaaaaagcgttctgcgatgtcctgatgcaccagcaaggtttccaccgtgttacaggtgctcgggcgctgggttttggcgttgacaataatcttcagcgccggggcgatgtctgcgctgctatcaacaaaaatatggcacacgccaatcccgccggtaatcaccgggattgtggattgctcgcggcacagtttatgcaagcctgcgccgccgcgcgggatcagcatatcgatgtacttatccatacgcagcatttcattgaccagcgaacggtccggattatcaatcgcctgaaccgccgcctccggtaa

SEQ ID NO: 386126 - DNA, 192 bp, Salmonella enterica
gtgcagcggaaaaccgagctcgcgggcaatggaatggcaaaatctcgtatcagcgcagctattgccgtaaaacaaagtattcttggggatcgttccttctgttttatttccaaaggaaccgcttttaagctggtacgccccatcaccataaaaggtcgtgcgattttcaccgcctgctgcctgcaattttag

SEQ ID NO: 386127 - DNA, 981 bp, Salmonella enterica
atgagccatcaactcaccttcgccgatagtgaattcagcactaagcgccgtcagacccgaaaagagattttcctctcccgcatggagcagattctgccatggcagaatatgaccgctgtcatcgagccgttttatcccaaggcgggcaatggccgacggccctatccgctggagaccatgctgcgtattcactgcatgcagcattggtacaacctgagcgacggtgccatggaagatgccctgtacgaaatcgcctccatgcgcctgtttgcccgattatccctggatagcgccctgccggatcgcaccaccatcatgaatttccgccacctgctcgagcagcatcaactggcccgtcaattgttcaagaccatcaatcgctggctggccgaagcaggcgtcatgatgacccaaggcactttggtggatgccaccatcattgaggcacccagctctaccaagaacaaagagcagcaacgcgatccggagatgcatcagaccaagaaaggcaatcagtggcactttggcatgaaggcccacattggtgtcgatgccaagagtggcctgacccacagcctggtcaccaccgcggccaacgagcatgacctcaatcagctgggtaatctgcttcatggagaggagcaatttgtctcagccgatgccggctaccaaggagcgccacagcgcgaggagctggccgaggtggatgtggactggctgatcgccgagcgtcccggcaaggtaaaaaccttgaagcagcatccgcgcaagaacaaaacggccatcaacatcgaatacatgaaagccagcatccgtgccagggtggagcacccgtttcgcatcatcaagcggcagttcggcttcgtgaaagccagatacaaagggctgctgaaaaacgataaccaactggcgatgttattcaccctggccaacctgtttcgggtggaccaaatgatacgtcagtgggagagatctcagtaa

SEQ ID NO: 386128 - DNA, 522 bp, Salmonella enterica
atgattaaagttatcacacttttattgtttgcattactgactggttgtcagtcagtagaaagtaaaatcgaagaactcccgacagttggttttgaccctattctatacaataaaagtgaggcctttactgacggaaaagttactttacgtgtcgaaagttcaggaactgatgtttggcttgtcgccaagaatggaaccagaagttttattgagctttcaggcctaacgctaggtggtagtcgttgtgcttacaatgcccgtagtaagcaacttttgcccccaggcagcgtaagcacattcgtagttcctacggttggaatgcttggactttgcttcaacaatgaagatcaacttatgtttattaaccgtgcttttagcagaatctctcccaaagcaaaaggaaaagattctctttctcttttattttctgttagttacgattttcccggaaaagcggacctaattaataaccacgattttcaagagttatatcttttatttttgaatgaggataatctatga

SEQ ID NO: 386129 - DNA, 1950 bp, Salmonella enterica
gtgtggaagcttggattagaggcaacggggcagtatgacttcacctcttcgggcgtaagtgatgcaaatggtattgataagggcctaatatatatttacaggcaggacggtagcctctacagcactacacagatgcagtatgacgtatccggccaaaagatgtaccacacttactctaagaattcagttaagggaaccggaataccagacagcaacctggatgaagactttactgcaaaagttgttatcttcgataacgcaggtaatagccgaacgctgccaactcaaaaatttcgctacgacaacacgctgggtgagatgacactgtgggccgttcatgatccaaatacgtcttccagcgtcgtacccggggtttctaattatccggcttacaaagccggtatggtcgttaacgaaaaccctattcgattagtctaccggatcccaaaatctaactaccgtgcttattcagaaggtgggcttcagttcatcaatcaatattccgcccccaaagagatagctgtagacagcacttatgcttatgttgaaatgactcttccctatggctcaattaatggggatatggctcgtatggcgaactttggccagtggggagggtattatccgtcatacagcctcgttctaaacccatctgcaaaccaaacgcctgcatttgcgggtacctgggtagatttcctcgatgataaggggaactgggttaagtggaaggattttgagagtgtggcttcatcacgactgccaattaaaatttcccgacttcgttttaacgttgaagcccggccctttgcacaggagatcggcggtaaggcgacctgcaccattccggcaggaaaaacctcgtgtgaagcgcctgagacgtttgatatggccttgggtacccagggctacaatagaatcctttacttcgttcgcagcatcagcaatcccattttgcggtctgagcaatggattatgacacgctggaacaataaacaactgccggtaataaactcgatatcatatgacgagactaacaagcagctggatgtactggcgtcacttgaaggcgatggtaactggttcgactcggtctcattgagggaattttatctttccgataagaacaccggtacccggatgtcaccaacaggcgtaatcaaatctcgtatctcaggtaactacacgattgcttatgatttatcccgtcagtctgaaggaaaatacaacgttgaggtcaacatcagggacttcttccagaaccagaccaataaaactttcggagaaattgctctggataacactcctccgacagtggccataacattcgacggaaagccggtaaaagacgatacggtagtgtacggcctggagaacctcaggatcgctctggcagataatctgacaaccccgaggataacccgtcttcagctcgtaggtggccccacagctgataacgttgagcttacgtggtcaccggcaggcaaagatacatacatgcctgagtatccgaggctgttcccaaatttcgaaccatctgaaaattattcaattagcgtaacagttgccgatagtcagtcgaataccaaaacctatactcagaagttcagttatctaccgaataaccttgtgcagttacataatctacgcacattgtcggtcagttcacctctcaaaacgacagatggcgtaccacttgcgtacctgtccactaacgttctgcgtaagacaaatggagaaattgctaaaggggtccagaacgcaacgctgactgtgcggaaggatgcagccttcggtattaaatttaatggggcacaggcggctccaggcgagtcagttgaggtgcaaatagatatgggccagggggataatcttctgttacccgtttatccttccgaaaatgggaaagttggcacctcagaattcatgattcagatcgacgagttgaagtaa

SEQ ID NO: 386130 - DNA, 303 bp, Salmonella enterica; identical to SEQ ID NO: 24284

SEQ ID NO: 386131 - DNA, 1494 bp, Salmonella enterica; identical to SEQ ID NO: 13713

SEQ ID NO: 386132 - DNA, 1209 bp, Salmonella enterica; identical to SEQ ID NO: 139615

SEQ ID NO: 386133 - DNA, 168 bp, Salmonella enterica
atgcaactgaataacgactattctttattgttttatcatgatggtaaaataaatatggaaggtctgattaaacaaatggaattaaaaggttatatgtatcagggagcaatgggcaatgatgatgttgttgctgagtttcccggtattcttttaatttcaccagagtag

SEQ ID NO: 386134 - DNA, 198 bp, Salmonella enterica; identical to SEQ ID NO: 34478

SEQ ID NO: 386135 - DNA, 198 bp, Salmonella enterica; identical to SEQ ID NO: 34478

SEQ ID NO: 386136 - DNA, 390 bp, Salmonella enterica
gtggttgggtacaaggtgaaggatgttactgatgtccacggcgcagcagaaccgattgatttccacgaaccggattggcacggaggccagtgccaatccggtgtgtggaaaaaaaatagctccgggagcactgtgctgaccggcagaattgctaatggacaacaaatacccctaccgtcaggattttctgccaaccagtgtacctggagtgtcagcaatgctgaaaacccgcatggctggaagccaaattacttcgctggttcggttgcgacgtatgattcgaacaggattgtgaagtgtggttactacgatgagtacaatttccacggcggcacgaacaggaccgatctgacgggaaaatgcagttatgtggtgtcatgccagagttga

SEQ ID NO: 386137 - DNA, 255 bp, Salmonella enterica; identical to SEQ ID NO: 28072

SEQ ID NO: 386138 - DNA, 198 bp, Salmonella enterica; identical to SEQ ID NO: 34478

SEQ ID NO: 386139 - DNA, 198 bp, Salmonella enterica; identical to SEQ ID NO: 34478

SEQ ID NO: 386140 - DNA, 198 bp, Salmonella enterica; identical to SEQ ID NO: 34478

SEQ ID NO: 386141 - DNA, 198 bp, Salmonella enterica; identical to SEQ ID NO: 34478

SEQ ID NO: 386142 - DNA, 228 bp, Salmonella enterica
atgtgcaacgggttgcgaacttgccggaacgcgaacgtgtttgtatttgaacaaggctacgaacgcgaaggccagcaccagcgagtagcctgcgaagatgagccacacggtctgccagtcggtaatgccgttttgagtgtaatactccaccactttaccgctcacaatgccgcccaggatacagccgaagccattggtcagccacaatgcctagcaaggtcggcataa

SEQ ID NO: 386143 - DNA, 141 bp, Salmonella enterica
atgtcgctgcaccggggactctgcggcctgcgaagcgatatcccgcaggcggaggggataacctcagatgaccgggacacgctgtggatagtcagtgaaccgaatctgttttaccgcttcacccgcacggcagcgtcctga

SEQ ID NO: 386144 - DNA, 183 bp, Salmonella enterica
atgttttctcttattaaatcacgtaaagttttattcataacaactcttctgctgttgtcgtctgctgcccagccagcgttcgccctggggtgcataggggacggtggtagcactgcagactgtgcaaaggtttgttccctggcggcaggtttaggcccccttggttttctcatttgcttttaa

SEQ ID NO: 386145 - DNA, 1086 bp, Salmonella enterica
atggataatggacgtgttgaagctactgataggccaacagaaatgattgccagcaatacaaaatacctagtttggaacaacaaagggggcgtgggaaaaactttcctgacgtacaaccttgcagtggagttcgcaatttcccatccagaccaagatgttgtggttatcgacgcttgtccgcaatcaaacgtttctgaaattatccttggaggcaatggtactggtgaagaaaacctaaactaccttcgtgataggaatgtgactatagctggctatatcaaagaacgattcagtaaatctccgttatctcgtttaggaaatgaatcctcttacttcgttcgagcacatactgttaactcgaagatgcctgagaatttatacatccttccaggtgatgtcgatcttgatatttgttctcgtctgatatctcacattggctcatcaccagttaaagaagcatggaagaaaagtcgttctttgttagtggacttaatcgcatcactcgaagccgataagagtatttctgacagggcaaaaactttctttattgactgcaacccaagcttcgcaagctacactgagttaggtgtggtcgccgcaaacagaataatcattccttgcacagcagatgctgcatcaattcggggcataaaaaaccttgttaagctcatttacggtgtatcaatagacaagtcagaacaagacgagatgttccttgatttcaataaagaagctatccaaaaccttattgagctccctaagttacatctttttgtacagaatcgttcccgtactaacgaaagtgatgcagctaaggcatttaaatcacatgcagaagagatcaaacgaatcaccgatgatctcttgaaaactcaccctcatctattcactagcggaaatctttctgaaagagttcaaaatgtgaaggatggcaacacgcttgcagctattattaaccatgaagggtgtccgttaagtaaactacagcacaaaagctataccatctatggtatggctactcaagccaacaaagctcagattgaagcgctagaatctgacgtatctacagttgttaaatgtttataa

SEQ ID NO: 386146 - DNA, 693 bp, Salmonella enterica
atgaaaaacattgctgcgcagatggttaattttgaccgtgagcagatgcgccgtattgccaacaacatgccggaacagcatgacgataaaccgcaagttgagcaggttgctaaggtcatcaacaacgtgttcagtcagcttatggccgcgttccctgctaccacggctaatcgcagccaggccgagatgaacgaaatccggcgccagtgggttctggctttccgtgagaatggcattaccaccatggaacaagtagctgccggaatgcgtgtcgcccgccgtcaggaacgtccgtttctgccatcgccgggacagtttgtagcgtggtgccgtgaggggagtggagcgctcggggtcagtgttgacgacatcatgggcgaatactggcgttggcggaagcttgttttccgttatccgaccagtgagcagttcccctggagagataaaaatccgctgtattaccacgtctgcctggagctgcgccgccggggaatggaagggcaactcagtgaaaaagaacttatccgggccgctggcgacattctgcatgagtgggaaaagcgagttcttgcaggtaaacccataccgcctgttcgtcgcgctttagccgcgccgtcacgggatcgcggtccaacgccagccgagatgttaatggcgaaatacaaacaacgcaaagacgccggtctgatttaa

SEQ ID NO: 386147 - DNA, 666 bp, Salmonella enterica
atgagcaacatcgacaaacaggcgctgcgtgaagcggctgtagcaatagagacagtagcaacgccgcagaaattgcttgcgtttcgtgtgaaggttacaccgcaggttgtgctggcgctgctggatgagaatcttcagctccaacgggaaaaagacgcaatagaggccgtggcacttgcgctgcgtgatgatatgcgacaggcgcgggagcaactggaagctgcagagaagcgtattgctgaacagcgtgagtattacgagggcgttattgctgatgggagtaagcgcatagcagaactcgaacgcagcgagactcagcttatcagcgaacgcgatgacgcggaatccgccctgaacgatgcctacaaagccgttatgggccaggcaccagaatggagcaactggtttagcttcgagaatgcgatagatgaaattgagttggcgtgcgagctatggcgcaaccagacagatgacgttatccagttccgccagcgcatagtagaactggaggcgaagcttgaaactgccgacaggttgcaggatggcgcattccgtgacggcctgaaagctgggttcagctatgggcagacagatgaccaatccgggttcgcgcaatgcatgtctgcatatagcacacgcactgacattggtgtgaaggtggaatga

SEQ ID NO: 386148 - DNA, 600 bp, Salmonella enterica
atggcgcacgaattacaactcatcaagcagtcatctggaattctgatccccgcaacgccggagagtggggatttcctgcgctcagtaaaaatcggtgagtggatacacgccgattttaagcgtgtccgcaactacgcctttcataaacgcttttttaaactccttcagcttggtttcgactactggacgccaactggcggcacggtcacatcgcgggaacagaaacttatctccggattcgttaattttctttgcggctccgcaggccaggaatataccccggcccttaacgaggcggcggaacagtacctccataacgtagctaccctgcgaaccggggacgtcgcccttcttaaatcttttgatgccttccgggaatgggtaaccgttcaggccgggttttataccgagcatttttatccggatggcagccgcgggcgccgggcgaaatccatagcgttcgccagtatggacgaaaccgagtttcaacaggtctataaggctgtgctgaacgtcctgtggaactggattctgtttcgtaaattttcctctccggaagaagttgaaaacgtggccgcgcatctgctggagttcgcatga

SEQ ID NO: 386149 - DNA, 561 bp, Salmonella enterica
atgactactcaaattaatgcagataacctttcccctattactcataaccagatccctgtcataaccactgaactgttagcgcagctttatggaactgaaacaaacaatattaaagtaaatttcagtcgaaattcagatcgttttgtctgcgggaaacattacttcaagattgaaggagatgaacttcgcgctatgaagcacgaggttactcacagtaactctgtgaaaattgcccgcaacgttcgatctctcatcctctggacagaacgcggagcagctcgccacgcaaaaatgctcgaaaccgatcaggcatgggaggtattcgagaagctggaggattgctacttcagccaaaagaatccttcagtgcgagtttcacgccagaaaagttacgacacgcgagttctctgttatcagcaaagcggcgtcactgtttccacaatcccgttgcgggatgatgacattgtcatttcccttgagtcatggctggaactggcgagagccaacggttggtttgttattcgcaaagatcaactggtggaaaaactgatgcagctttag

SEQ ID NO: 386150 - DNA, 402 bp, Salmonella enterica
atgaaattcaagagtattgctaaaactgtttttctttttgcactgctaacctcagctggctttgcaactggtaaaaacgtgaatgtcgaattcgataaaggacaaaatagcgcccgctattccggcgtaataaagggatacgattacgatacatataacttccaggccagaaaggggcagaaagtacatgtaagtatttcgaatgaaggcgcagatacctacctgttcgggccaggaattagcgattccgttgacctgtccagatattcatctgaactggatggcaatggccagtacacgctaccggcgtccggaaaatacgaactgaaagtacttcagacacgtaatgaagctcgtaaaaacaaagcgaaaaaatacagcgtcaatattcagataaaataa

SEQ ID NO: 386151 - DNA, 546 bp, Salmonella enterica
atgaacgtgaacaaaaaaaaactggctgaaatttttggttgtgacgtcagaactgtcacagcctggcaaagccaggggctgccacttgtttccggaggaggaaaaggtaacgaagcagtgttcgacaccgcggcagcgatttcatggtacgcggagcgtgatgcgtctattgaaaatgaaaagctgcgtaaagaggttgatgatttacgtgccgctgcggaatcagatcttaatcccggcaccatcgactatgagcgctaccgcctgacaaaagcccaggcggatgcgcaggaacttaaaaatgctgagcgcgaagggctggttcttgagaccgaactgttcacctacatcctgcaacgggtggctcaggaaatagcagggatactgtcaagggtaccgctggtattacagcgcaaatatcctgatctgtgccagtcgcacatcgatgtggtcagaacggaaatcgccagggcgtcaggcagggccgccacgatagcggatgtggagaagtggaccgatgatttccggagagcgcagggcgaataa

SEQ ID NO: 386152 - DNA, 1932 bp, Salmonella enterica
atgatttccggagagcgcagggcgaataatgccaacagagccataactaacgggctgatagcgcttcatattcccgtaccgcttaccaccgtgcagtgggctgatgagtattactatctgccaaaagagtcctcctacacccccggcaaatgggaaacgctgccgtttcaggtagcgataatgaacgcgatggggtatgaactgatccgcgttgtaaacctcattaagtctgcccgcgtgggctataccaaaatgttgctgggggtggaaggctatttcatagagcacaagtcgcgcaacagcctgctgttccagccgaccgactcatccgctgaggattttatgaaatcccacgtggagccgactatcagggatgttcctgtattgctggagctggccccctggttcgggcgtaaacatcgtgataacacgcttaccctgaaacgcttttcttccggtgtcgggttctggtgcctcggcggtgcagcagccaaaaactaccgtgaaaaatcggtggatgtggtctgctatgacgaattgtcatcttttgagccggatgtcgagaaagaaggttcgccgacgctgctgggggataaacgtattgaaggttctgtctggcctaaatccattcggggctccacaccaaaagtcaaagggtcatgccagattgaaaaggcggcaaatgaatcggcgcattttatgcgtttttatgtaccgtgtccgcattgtggcgaagaacagtaccttaaattcggtgatggcagtacgccgttcggtctgaaatgggagaaaagcaagccggagacggtgtattacctttgtgaacataatggatgcgtgatccgtcaatcggaacttgatcagaaagcaggccgctggatttgcgataacacaggcatgtggacacgcgatggactggcttatttcagcgcgtccggtgaggaggttccgccgccacgatccattacctttcatatctggacggcttacagtccctttaccacctggatacagattatttatgactggctggatgcgctgaaagatccaaatggtgtgaaaacctttataaacaccacgttgggcgagccttatgaagaggcggtggccgaaaaactcagccatgagcttttgctggaaaaagtgattcattatgcggcgccggttccggagcgggtggtgtatctgaccgctggtatcgactcccagcgtaaccgttatgaaatgtatgtctggggctgggcgccgggcgaagaggctttccttattgataagcaaattatcatgggacggcatgatgatgaagataccctgcagcgtgtggatgccgtcattaataaaaaatatcgtcatgctgacgggacggatatttccatttcccgtatctgctgggatatcggcggtatcgatgcagaaatcgtctataaacgctcaaaaaaacacggcattttccgcgtgctgcctgtcaaaggggcctccgtttacggaaaacccgttattaccatgcctaaaaaacgcaaccagagcggggtattcctgtgcgaaatcggtactgatactgccaaagaaatgctttacgccagaatgggggcggttactgcgcctgccgacgaagccacgccttatgcgatccgctttccggataatccggatgtttttacggaggtggaagcgaagcaactggtagccgaagagctggtggagaaactggttaacggaaaattccggctgttatgggatgccaaaggacgtcgtaacgaagcgctggattgtcttgtctatgccagtgcagcgttacgggtgtctgtgcagcgctggcaactggatctggaggcgctggcgacatcaaggaaaagcgaagagcaggataccccgacacttgaacaactggccgcaatgctggcaggaggagttaatggcaacaatcactga

SEQ ID NO: 386153 - DNA, 204 bp, Salmonella enterica
atggcaacaatcactgagctacaggaagcccgcgtcgcgctgcatgacctgatgacgggaaaacgggtggcgacggttcagaaagacgggcgacgggttgaatttaccgcgacatcggtaggggatctgaaaaaatatgtcgcggaacttgaggcgtcactgtgcaatggtcgccgccgggcacctgtgggggtgagactgtga

SEQ ID NO: 386154 - DNA, 1620 bp, Salmonella enterica
gtgcaatggtcgccgccgggcacctgtgggggtgagactgtgaagcgcaccccggttctggtggatgttcacggcacgccgctgcgggaaagtctgggatacaccggcggggggatcggtttcggcggacagatggctgactggatgcccccggcggaaagcgtggatgccgcgctgctgccttcgttgcgcctcggcaatgcgcgggctgatgatctggtccgtaataatggtattgcagcaaatgcggtggcgctgcacaaggatcatattgtcggacacctgtttcttatcagctatcgtccaaactggcgctatcttggtatgcgtgagagcgcagcgaagagttttgtggatgaggttgaagctgcatggacagaatattgcgatggtatttttggcgaaatggatgccgaggggaagcgtacttttacagagttcatccgtgaaggcgtgggcgttcacgcctttaatggtgaaatttttctccagcctgtctgggacgctgaaaccacgcaggttttccgtacccgattcaaggctgtcagtccgaaacgggtggacacgccggggtatgcccgcggaaaccgccagcttcgcgcaggagtggaaacggaccggaatggaaaagccctcgcctatcatgtctgtgatgatgactggccggtggctggtggggaacgctggacccgtattcctcgttttctgccgtccggacgacccgcgatgttacatattttcgagccggttgaggacggacagacgcgcggtgccaatcagttttacagtgtgatggagcggctgaagatgcttgataccctgcaggcaacgcagcttcagtccgcgattgtcaaagccatgtacgccgccacgatagaaagcgaactcgattccgagaaagcctttgaatacatcacggcggcagataacaaagatacgccccttgttaacatgctggcaaattatgcccgctattacagtaccaacagtatcaaactgggcggtgtaaaaattccccacctgtacccgggtgatgagctgaatctgcagactgcgcaggattccgataatggcttttcagcgctggagcaggcgctgctccggtatattgccgccgggctgggggtctcttatgagcagctttcgcgtgattattctcaggtcagctattccagcgcccgcgcatctgccaatgagtcctggcgctatttcctggggcggcgccggttcattgccggacggctggcgacacaaatgttttcctgctggctggaggaggcgctgatacggggagttatccgggcaccccgggccaggttttccttctgggaggcccgatccagctggagccgctcggagtggattggtgccggacgtatggcgattgacggactcaaggaggttcaggaatccgtgatgcgtattgaggccgggctgagtacctatgaaaaagaactcgccattatgggcgaggattaccaggagatattccgccagcaggtcagggaatccgaagaacggcgggcagccggactttcgcgtccggtatggatcaccgatacctatcaacaacagatcgcggcgagccgtcagacggaggaggaaaagcgtgcaacgtaa

SEQ ID NO: 386155 - DNA, 1497 bp, Salmonella enterica
gtgcaacgtaatctctcgcacatcatcagccaggcaaccagtgctccgttgctgcttgaacccgcctatgcgcgggttttcttttgcgcgctgggcagggagtcaggcattaacagcctgcacattcccggtaataacgaaagtctggatcagtcggatatggcactggtcacaggcgattttatggcgaccggaaagccgcaggcacgtttttatcaggtagtgaacggtattgcggtattacccgtgaccggaacactggttcataaactcggcggaatgcgtcccttttcagggatgaccggctatgacggtatcactgcccggctacaacaggcggtttcagatccggaggtaaaaggcattctgctggatattgacagtccaggcggtcaggctgccggggcgtttgactgtgctgacatgatttaccggatgcgcgaacagaaacctgtctgggcactggcaaatgaaacagcctgttcggcggccatgttgctggcggcagcctgttcgcaccgccttgtgacccagacgtccagaatgggatcaattggtgtggtgatggcgcataccagctacgccgaaaaactgaaacaggaagggatcgatatcacccttatctattctggcgcacacaaggctgatctgacgcccagccagaaattaccggaaagtgtctatgccgactaccagcagcgaatggacgaggccagaaagatgtttgcagaaaaagtggcccggtacacggggttgtctgtcgatgcggtaatggcgacggaggcggcagtgtatgacgggcaggccattatcactaccggactggcagatggaatggtgaatgctgctgacgccatcggcgtgatggcagaagctatcaacagtaacaagacaggaggcactatgcctgaattaagtgcagctgacgctgtcacgcaggaaaaccagcgcgtaatgggaattctgggttgcccggaggccagggggcatgaggcactggcacagatgctggccgggcagccgggaatgagcgttgctcaggcgaagtctattctggctgccgccgcgccggcggatacgaccagcaccgctgaccgtatccttgccctggaagaagctggtggtcgggaaacactcgcacagacactggcggccatgccggagatgacggtggaacaggccagaaccattctggcagcatcgccgatcgctgcggcaacgtcacttcatgatgccgtgatggcgcttgatgaggcgaaaggccgtgaagagttggcggaaaaactggctgtcatgcctggtatgaccacagatcaggcccgtgacctgctggctgccgcgccggacaaatccggtaatgcggggctgagcatgaacaacgcatttgatgctttcatgcagtctcattccccgggccccatatccggcggcaaaggccacagtaatgataccgaaacgacgttgttgatgagtattcccggtacttcagccacctga

SEQ ID NO: 386156 - DNA, 1029 bp, Salmonella enterica
atgggattgtttaccacccgccagttgctgggttataccgagcagaaagttaaatttaacccactcttcctgagcctgttttttcgccgtactgtgacatttcctacccaggaagtcatgctggacaaaattaccggaaaaacaccgattgccgcttatgtatctccggtggttggagggaaggttctgcgtaaccgcggcggggaaacgcgcgtactgcgtccggggtatgtcaaaccgaagcatgaagttaactatgcgcaggttgttgagcgtctgccgggtgaagacccggccaggcttaacgatccggcctaccgtcgtctgcgcattctgaccgataacctgaagcaggaagagaaggccatcgtccaggtggaggagatgcaggccgtcagtgcggtgctgaacgggaaatacaccatgcagggcgagcagtttgacaccgtggaggtggattttggtcgctccgccgggaataacattattcaggccacaggtaaaaaatggtcagagcaggacagggaaacctttgacccgacttatgatctggatatgtactgcgaccaggcatccggtctgatcaatattgccgtgatggacgggaaagtctggcgtctgctgaacggttttaagctgttccgtgaaaaactggatacacgccgcggttcaaattctcagctggaaacggcggtgaaggaccttggggctgtggtgtcgttcaaggggtattacggagatttggccattgtggtggctaaaacatcctatgttgctgataacgggaccgaaaagcgttacctgcctgaagggactctggttctgggaaatacggcggcagaaggtatccgctgctatggtgccattcaggattcacaggcgctcgcggagggtattgttgccgccacccgttatcccaaacactggctgacggtgggggatccggcgaatgaatataccatgacgcagtctgcgccgctgatggtcctgccggacccggatgagtttgtcattgtcactgtcggttaa

SEQ ID NO: 386157 - DNA, 453 bp, Salmonella enterica; identical to SEQ ID NO: 376286

SEQ ID NO: 386158 - DNA, 396 bp, Salmonella enterica
atgctcttttttacctcatgtctggttttcagttctattggaatcggagctattgcttataaaatactttttgccgaattggtcgggtggaaagctaatctattaaacgcattatcttatatgataggtatgctcggcttgctatatatatactatagggggatctcagttgacataaaattatcactaatagtcctgtatcttccagtgggtatgatttcattgtgctatattgtatatagatacataaagctttatcatgttaaaacaacaaaatctcattatatagcaattttacgtagatcttcagggttttttctttttactttattatcgatagtggtgcttcaaacagattatatgccaattaacataaaagataaaatagaaacttga

SEQ ID NO: 386159 - DNA, 243 bp, Salmonella enterica; identical to SEQ ID NO: 375752

SEQ ID NO: 386160 - DNA, 2262 bp, Salmonella enterica
atggcagtaagactgacttttgacgggcaaaagctgacatggcctggtatcgggatatttaaggcgaccacggggttaaccacgccgccgataaccggagaaagtggcggtgtcaccgcagattcagtcgccggaagcgtggcagatgcggcggaagccgccgtggaacaggctgcgggatcgctgtttggcgcattgccggagccatcaggactggtgaaagccgcggtagcagcggcgcaggctgccgccgccgcaggtatggcgcaggatgcggtatcggccatcgtctctgctgttgcaggcgggccgggggcgcataatgtgacggtcagcggcagcgccgtaccgccgggcgcattactgttcgccagcctggacggcggcgaaacattaagtgaactgttcagctatgtggtacagctaaaaacgcccgacaccctgaatctgggctatgtctccccggcggccaacctgccgctcaaaccgatggtgggcaaagatctgtgcgtcaacatcgaactggatggtggcggtaaacgacatatcagcgggctggtcacggcggcgcgggtggtgggccatgaagggcgttcggttacctatgagctgcgtatggagccgtgggtaaaactgctgacccataccagcgactacaaagcattccagaataaaaccgtggtggatattctggatgaagtgctggcggaatacccctacccggtggaaaagcggctggtggaaagctacccggtacgcacctggcaggtgcagtacggtgaaactgattttgattttcttcagcgactgatgcaggagtggggcatctactggtggtttgagcacagcgaggacagccacacgctggtgctggcggatgccatcagcgcccacaaagcatgtccggactcgccgctggtcgagtggcaccaggaagggctgaagctggacaaggagtttatccacactatcacggcaaacgagagtctgcggactggccagtgggtgctggatgatttcgattttacgaagccacgttcattgctggcaaacaccgtggcaaacccgcgtgaaaccggtcatgccacctacgagcattatgagtggccgggagactacttcgacaagagtgaaggcgagatgctgacgcgcatccgtatggaagcgcagcgcagccccggcagtcgggtgctggggggagggaatatccgcacactcatgaccggttataccttcacgctggaaaactatcccaccgccgaagtcaatcaggaatacctgttgatgcagaccttgctgtttgtgcaggacaatgcgcagcacagcgggcaggaccagcactttaccttttccacccgttttgaactgcacccgacccgtgaggtgttccgcccgcagcggacggtgagcaaaccccacaccaaagggccgcagagcgccatcgtcaccggcccggcgggccaggaaatctggacggatcagtacgggcgggtaaaggtacagtttggctgggatcgctacggcaaaatggatgaaaacagctcctgctggatacgcgtcagctacccatgggcgggcaaaggcttcgggatgatccagatcccgcgtatcggccaggaagtgctggtggatttcaaaaacggcgatccggatctgccgatcatcgtggggcgtacctacaaccaggacaccatgccgccgtggggactgccgggcgcggcaacacagagcgggatatacagccacactatcggcggcggaccgaccaatgccaacgctctgcgttttgaagataaacccggtagtgaagaggtctggctacatgctgaaaaagatcagcgtattgaagttaataataatgaaagtcactgggtggggaataatcgggttaaggtcattgatcagtcagaaatagccactattggcgctgtccgcgaccataaagttcagtatgacgatacctctctggccggaggaaataaaaccattcagacggtaaaagagttatatctggcagcgggtgattctattactctgagttgtggtgacaccgttctgtacatgagcagtaagggggaattttacgtaacctgtaaaacgttcaatattactgcaacagatgccgatggtcagattaatactataaaagggcagctggatttaaatatggataaaagagaacccaaagtgggaacatttggtgagtcagaaaaaacagcaatggcagcagtaattaaggaaactttcccacccaaagaatag

SEQ ID NO: 386161 - DNA, 318 bp, Salmonella enterica
atgctcattaccccggatgaactgactctgtatttccagcccttccattttcccgtcaatacccagccggacaacctgtgctggcgtataacgcagttccttaacctgcttttccagttttttcatctgttgttcaacctgggacgccagctcatcaccgtcctgcattttgccgcggctgataatcagcgccgcatccggatcgctcaggcggatcatattgagggtgctgtcctgggatatattaccggagaaactcaagatggcttcgttgatataatagttcgtcatgattatataaaatcctttttggtctga

SEQ ID NO: 386162 - DNA, 819 bp, Salmonella enterica
atgactaacttcaaatacttggattattgtcgaattgaacgggcagctaaaataattggttgtgaagtagacgatctagtgcatttgggagcaaataataagattcagttgagtttaatgttagatatggcttattctcatttttatagtgatatggaagtggattatttaaatagtaattataataaccttcctgtttataataatgagtttaaaaaagtaacagaacactcacatatttataatgagttattgagtggtgagtctatgtttctctatgataatgaatatcactatagtgtagcttatggaagtgcatcaggattatggaatataccatctgatgatttgaaaaaaatagaactgcatggtttttttgataaaggtgttattcttaccccatctggagaatcaaggtttaatggttttttgggctgtttattgcctgatagtaatggtgtgagaattaaaactaatgatttgtggattacaaataactacattgaaaatgttttacagaacaaatttgaatgttctgatgttcaaaaacgcaatgagactaatggtttaaaatcaataaaaatatcgaaggtcgtctctgagcgtcatgcaaggaagagagaaacagtactcatagccgctatttattgtaaagaaaaatacccaaacgagtgttcgcgttcaattcgcgcgtgggctagttgcattgaacaacatgccacagacattttatacaaaaacggagatgctccgttatcattagatagaattgagcgcatcttaggtaaagcaatcgctggaaaaatgatcgcaaactag

SEQ ID NO: 386163 - DNA, 201 bp, Salmonella enterica
atgactaatcaagccgaacgtccttcatacgataaattaattgatatgaagttcatcacttccgattgtttatttaccgacaagtggatctataaactaatttctctaggacggttccctaagccaattaaattagggcgtatgtctcgttggcgtgctggtgattattatgcatggcgagatagtcacacatctaactaa

SEQ ID NO: 386164 - DNA, 873 bp, Salmonella enterica
atgacttccattatatctgtgggggagagtaaaccattttatccttctctgaaaagcgaaagtgtcacattattagatagttataaggttaacatcttcaaagatgcatatggtgattccgcatgtatcataagaattatagaaatttttatgttaaataaactgcgccataagggggagaaactacgctctttaactgggctgacaattcctgatacagaggctgtagcagacgaaatcaatcttttaatgagtcgatttgagaaaatgtgccattgtgaggaagaagaactatctttcagacagcgcgaagtttctgcggccgaatatactttgaaaaacgcagggggtaatgtcaattccagaacaattgctgaagtaaaaaataataacactcttaaagtagaacgtactgcctgtgaacaacgttatcgttctgcgattttgcggcagaaagaacagcaaacacgagtgggtatcttcagaggatttgggggaatgttagttgatgaagctgaatatataggtaaggatatcaatagaagattactgaactcatttaccaaaccgctttcatcgccaacagagtttattgatattatttatgatgcggtcttaattcgtgatattcgttttatcatcgatgccctattctccctagagagtgcagttagtcatatcattgagtgttgtactattcctacagatcggtacgtattggaaagaggagggcttaacagagcactggcttacagagaatattatcgtgccgaaaattccatattacgtactgtgataagcgatcatgagtatgccgaacatgctgtgagatttaatcaaattactgactataaaaacaaactcttttcttaa

SEQ ID NO: 386165 - DNA, 2688 bp, Salmonella enterica
gtgaaaacaccgtctgtatccacgatttccggggctgcaattgggcgctggccttatatcctgtcagcattaggtatcaaagtaccctccgcaggacatcatgggccttgtccggcctgtggtggcaaagatcgctttcggctggacgttaaagcggggcgtgggacgtggttttgtaatcagtgcggtcatggcgatggccttgatctggttcgcctggtgacaggaagcaaggtaaaagaagtcgccgggatggtatctgaggtgcttgcattacccgaaatacaggaaaagcccgctttgcccgccaggaaaaaggccacaggaaaagaagcgggcgcggagcgatatacccgactcagacagcagtcctgcaatggtgagccggtctatctgacaaataagggcttacacgggtattcacttcccttgctgtcacagcctttgaatctggccggaataacattttcctccggttcattactgctgccgttgacggatatctccgggaatattaccggtggtcagcttatcaatcctgacggggataaaagtctgctgccaggtagccagctgtctggcgcattcattgccctgaccgatatacccgctgaaacacctgaacaggtgattatcactgagggttttgccacggcgcttactgtcagtctgctgactgaaggatggatcgtggcagctgtcgctgccaccaatttactgaaggtgacggagcagatccgaaaacgctggccggaaacccggatcattctggccggagataatgatctggctgacgggaaagaaaacaccgggcgtattcaggcagagaaagccgccaaagcggtggatggctgggtaacgctccctccggtacgccataaggctgactgggatgattatcggcaggaagtggggaaagaacgggcgagagatgcctttcgggaagaaatgacgctgcatggtaaagggcagacccgtttaccagaagggttccggctgacaaaagaatatttgtggtacgacaagctggttaataagtctgatggcgatacggagatacgtaatatcaaaatttgcagtccgttgcgggtgacggcaataaccagtgatgctgatgggagtaattacgggcgtttgctggaatgggaagataccaacggaaacagccgtaaatgggcaatgccgatggagatgctgggtggcagcggggaagagctgcgccgcgttctgctggttaacgggctttcttacatcaacattaacggcatggccagagcattcctgatggaatatatctcgctgtgtaaaccggacagaaaagtaacctgtgtgaataaaacgggctggcacggcggagtttacgttctccaggatgaagtgatagggcgcgaagcccagtcagtcatcttacaaacatcgagtgtgcaggggcgtgattttcgtgtcagcggcacatcagaggactggcgtgaaaatataggccgttactgcataaagaatgcccgtcttgcctttgcggtgagtctggcatttgctgccccccttctgaaactggttggtatcggcggtggaggttatcacctcaaaggggaatcaacagacggtaaaaccacgacgatgaaagtggctgcatcagtatgtggtggaacagatttctggcatacgtggcgggcgacggggaatgctttagaaggaacggcgagccgccgcaatgatgccacgctgatgctggatgaaatccgggaggttgacggcagggaggcggggaatatcgcttatatgctggctaacgggcagggcaaagccagagccagaacagatggttcggtaagggaaaccaaccgctggaatctgttgtttctgtccaccggggaactgtctctggtggaacatgcggcaagcgccggggaacgtacgtatgccggggttgaggtcagaatgatccagatcccaagtgattcaggcaaatatggcgtgtttgaagaacttcatggcttcagtagcgggaaaaccctggctgagcatcttgagcagcacgtagcgcattatcatggtgcaccattccgcgactggctgcattgcctgaccgctgatctgccggaactgaccagtcaggcgaaagccttattgaaagagtatacccgaaggctgacgccggaaaatgccgggaatcaggttggccgggctgttacccgttttgctctggttgcgatggccggggagctggccacaaaagcgggcatcacaggatggccggagggagaggcctttcgtgccgctcaaagctgtctggctgcatggatggctgaccggggccatacagctaatcaggaagataaagcggcacttgaacaggtacgggacttcatgacgcgtaatcagttcagtcggtttgctgactggaatgacgacaggaaccggcctgtttcaatgatgggattcagaaaagtcgataaaggagacaatgtgacagagccggttgtgacgttctacgttcttccgtcaggctggaaggagatctgtaagggatttgattcgcgtaaggtggccaggttgtgtgtggacgcgggctggctgaaacccggtgaagatggccggacgcaaaacagcattcgcctgccagaaatagggcttaaacgtgtgtaccagttcaatacacaggtactgggaagcgccgaacctgagtaa

SEQ ID NO: 386166 - DNA, 1119 bp, Salmonella enterica
atgctcacagcaactattactttttacaaaatagatgagttcggtttttatagaagaaataaagaaaaatatccagaccgtttctttggcgatgtgaattctgtctttagtgatttcagtaaatggcttgctgctcaagaaaatctcgggagtacttgtacgttcgaggtgaataaagaagagggaggacaaaatattttttgtaaggattattataaacatgaagacggaaatgaatatcttattatcttatggaatgaaatgtccaatgctgataataagattcttgctatgcctaaaacggcaaaaataggttctaatggtgtcaaggaacccaagactgaagacgatgatattattgggttgccctcatatttttggtttattccggatctcgaactttttgctgtggtttactttaagcatagtgtttcaaatataaaggcaatgcaacaatatataaaagaatactgccatgcgcttagcggatttgtcactttagataaaaaaggagtatcgtattatactgacggtacgtctcctaaagggaaatatagattcaaattcaatcataaaaaaatagttaataaaaataaaagacgtaaattagttgattctcctgagagaattacagaaattgttcgtaaggttgaaataccgaaggttgtcactgatccgagaaataaaattagaaaagccatgaatgctatacaaatagggctgcgtagagttgtgcctgatttccttaaggatggagatgagaattcaaaagagattaatgatgttaatgaagccttaaaaaatgcttccagacaaatcattgaggtgagaataccattctcaggtgatgaggatactattaattacatccttgataagtatgatgaaaattttgatgagtcagccacgcaaaaactagggtttaagctaaagggggatcctaatgtagtatggttgcatgaatctgttatcaaaactgaggttgaattggatgttaaaattagcgaggactctttaccaacagctgttgatgttatgaccgctattagtgcaaagcgtgatataatattaaaagtgttaaatgattctgacgaaatcaaagataaagtggcggtataa

SEQ ID NO: 386167 - DNA, 537 bp, Salmonella enterica
atgaaagctcggtataagtggttgttaatgcttggggggtatgcacttatttgctacctttttcttgctgatttggccttatctgttaaggtcccagtaagtgatgttatcagtaacttgattgacttatccgctatctttttggcgatagttggaatgtgggttgcctacagctacccagcagctatatcaaaagttgtcaatgataatgatgatttaagcttgataacctcttatcattcagcgaaaagacttgaagcactaattatgaatatattggttgcttcaatcgtcttaattagttgcttattattaaacgcatttataatacctattgttaaaagcagtgatttttttaaggaacacagcgcactaactaagcaaattggatattgcggtatatggttcttgtgccttatacaagtagtgatgatcttacaaattgttcgcgctaatctaagtttcttagatgatttagatactctgatcataaaactggcatcgcagcgcaaaaaaaatcctcaccaaaagccgtaa

SEQ ID NO: 386168 - DNA, 2565 bp, Salmonella enterica
gtgagaaatatcgcgatatttgtttttcagggtaaagcacgaaaaaaaagcgggaagcctgttttatttcagctggttactcaacaaattgtgctcaatgaagtgcataaagatattctgggttctcatttaaaacgtaatcccagtctgaaaatagctgttgagcaggccaaagcagcagtactgtacccacctgatgggatgaatatgctgatcctcggagagactggggttggtaaatctctttttgcagaactgattgttttgtatgctcaaaataacaatatcatcccgttgtcttcagaactcgttatatttaactgtgcggattattcgaataacccgcaactgcttatcgcacaattatttggtacccgtaagggagcctataccggtattgatgaaaatcgtatcggcttgattgaaaaagcgaataatggctttttgttcctcgatgaggtccatcgtctgccacacgaagggcaggagatgttgtttacctttatggataaaggcgtctaccggcgcctgggagaggcggacgctattcgtaccgctaacgtcaaaatcatcgcggccacgactgaagccccggaatcacacttacttcggacgtttacccgtcgtttccccatcactattcgcctgccggcattacgcgaaaggacgctacaggagcggatcaaactggtccattccttcctgcagaccgaatcaaaatcgatacaatgcagcatcagcatctccggtaatgccctgcgtgccttctatatctacgactgcccgaacaatatcggccagttgcgtgccgatttacgttctgcctgtgccaaagcgtacgttgattatgtcactggtatccgtgaaattatcaccattaccagtgactatcttcctcaacacgtcagtgcctttctgctcaatgaaacagaacaccgtaagctgtggaacgaactgttaggaggcaaaaccaaattcaccgtttttcatcccagcggggatattgaaaacgaaaatatgttcttcctggatgaggagcagaaagggacaacattgcagaaaatggagctcagtacactctttggtgccgggccggaaagctcctacctgcagagcctgtatacgacaaaactcagtctgatcaagagtaaggacgatatcaaaaccattcaggattatgttaccggtacaatttctgaactcaccgatgagatcatacagctcagccagaaacggctggagaaaacctttgatatcaatttccagtatgccctcagtatccatcttgagaaaaccctgaaccggctgaaatttgaccagttgatcactcatcctcgactgaatgacatcaggataaaacataaccgtgaatttaacgtggctctggattgtctgcgcattatcgagaaaaaggtggacatctccatgcctattgatgaagcggcatttctgaccatgctgttcatccattatgaagatagtgaagtactgcgcgcgaagcaggtgagggttatgctcattatgcacggggaaagcgcagcaacttctatggccgatacggtcaatgagctgctggaggtggaatatgttaaaggatttaatctttcgctgaaagtccagccgcaaattatccttgaacagattattgcctatatcaaaacatgggaggtcaagtctgatcttttcctgctggttgatatggggtcactctcgaattttggtgcagtgatcctgcgtgagtgtggggtcaggactaagaccatgcagttggttagtaccatgtatgtcattgaagccgttcagaaagcgatgctcggtctgccgcttgaggaaatttataacgaagtcctgggggtgaactatcttctggatcaatcctaccgcgccaagagtgaatttaaccgacagacgaagaaactggctattgtgatggtctcttcctcagaagaagatctgccggaaaccctgaccagtctgtcaaaccgtctgacatacaaacccaatattctcgaaattatcccgattatctcttccgacaaacaggatatcgctcagcggttgaagtccacatcctatgtgttcgatattgtttcggttatcactaatattccgataccgagtcagtggcgtaccctgcgtctcgatgaagtgctgtgggaaaaaaatattatcactcttcaggcgattatcgatatcgagaccacctatgtcttgctggttgaacccctcaacgggttgcttaaaaataccagtgctttccgggttgttactgaagtgcgcaaagccgtactgaaaatttcggcagcgcaggggcttaacctgacggctaacgctcatatcgggattgccatgcatctgtcctgtcttatcgacaaaaagttgactgatgggcctgtttccgctcccatccgtcaaacacgggccgggaaacaggccttttccagagatccagtactgaagattttctcaaaagagctgcatacactggagactaagttccagatagagttcagtgatgacgaaatcgtgtatctaaaatcactttttgagcagaacagcttttaa

SEQ ID NO: 386169 - DNA, 921 bp, Salmonella enterica
atgatcaacagaatgatcctcaacgaaacttcttactttggtaaaggtgccatccgttcaattgtagacgaaatcaaaaagcgtggttttaccaaggcactgattgtaactgacaaagatctgattaaatttaatgtggcgaccaaaatcacggccttactggaagaacacggtttggcctactcgatttatgatgaagtcgtaccaaacccgaccgtaaatgtggtgcacaaaggggttgaggtattcaaacaggcgggggcagattacctgatcgctgtgggcggcggttcaccacaggatacctgcaaggctatcggcatgatgatggccaatccggaatacaccgacgtacgtatgctggaaggtggtgcgccaacccgcaatccgtccattccaattatcgctatcccgaccacctctggtaccgctgcagaagttacgattaactacgtcatcactgatgaagagaaacgccgtaagttcgtctgctttgatccgcacgatatcccggttattgctgtcatcgacccggagatgatatccagtatgccagcaggtctgaaagcggcgacgggcgttgatgccctgacacacgctatagaaggctacattacccgcggagcttgggaactgacagatatgttccatatcaaggctattgaaatcattggtcgctcgctgcgtgattcggtgaaagggctcgcctccggtgtggaaggtatggcgctgggtcagtatatcgccgggatgggtttctctaacgtgggtctcggtctggtgcatagtatggctcacccactgggcgctttctacggcacaccacatggggtggctaacgccgtattactgccgcatatcatggcatttaacgccgaacacaccggtgagaaatatcgcgatatttgtttttcagggtaa

SEQ ID NO: 386170 - DNA, 192 bp, Salmonella enterica
atgctgggcacctttgaaacacaaacgactgaccagttaggtcattttgcctggtgtgctcttgtggtattaggcttggccagacaggacggcaaagcgacaaatcaggtcagtgaatacgtttttatatctaactggctaaataaagcctggaaagataaatgttttcctaaaagtattgcgctggaataa

SEQ ID NO: 386171 - DNA, 558 bp, Salmonella enterica
atgcaggcgaaagaattatgtgaaattctgcaggaactgactggcctggctgagcacgttaatcaggctgacgtcgacaagctgattgctgaaattgaaggggcaaacaagctgtttctggctggtgccgggcgctcagggtttatgatccgtgccttcgcaaaccgtctgatgcacttgggttatgagacttatcttgttggcgaaaccatcacgccaccggcaaaagaaggtgacttgctgatcatcggttccggctcgggtgaaactggcagcctggtctccatggcgcaaaaagcggttgcccagaaagcgaagattgctctgatctccatttatgacgactcaagcattggcaagctggccagcgccgtcatcaaactgccgggctcaacccgtaaaagtggtgaagggaagggtatcccgactatccagccgctggggtcttcatttgaacagttactgttcctgacctgcgacagcattgttcttaccatcatgcgtcgtaaaggcatcgagtatgaagatatgttcgctcgtcatgccaaccttgaataa

SEQ ID NO: 386172 - DNA, 423 bp, Salmonella enterica
atggcatttaaggccggcgcggactacgccactgttctgggcgtcaccgatatcctgactgtcaaaggttgcgtagatattgccaacaaaatgggcaaaaaagtcgttgtcgacatgatttgcgtaccaaatatgccggaacgtattcgtcagttggaagaagtaaaagctcatatcctatctgttcacaccggtgctgaccagcagaccgctggccgcgagcctatcgaagatctgcgtgtaatggttgaacacacccgcgaagcagggatttctgttgccggtggtatcaactctaagtcggtcgcgaaatatgtcgctctgaatccggacatcatcattgtaggttcaggtattacccacaaccctgatcctgcaaaagaagctgctgctatcaaagcggcgatgcgtaagggagcttaa

SEQ ID NO: 386173 - DNA, 480 bp, Salmonella enterica
atgattttcaggtcggccagtacttccagctgcgggaaacagcgtttaatttcggtaacggcctgggtcagcctgtgtggtgggctggcactggcgaatgccgggctgggggtggtacacggtctggctggtccgctcgggggattatgtgatgctcctcacggtgcgctctgcggtacgttgttgccgtatggcttggaaatgaatattgaaaatgtgacctccgaagagagactgagccgcctcgaagaaatccgtgacgtcctggcgcgcagttttagcgtcccatccggtcaggctttcaaagcccttattgactggagccatcgccacggattgggtaccctcagggaactcggtgttccgtatgatgcgcttgaggtggccgcagaggcggcactcaatgcctcatccatgcgtgccaatccggcgaaactgaatcaatcgcaactgctcagtttgctgcataaggcctggtaa

SEQ ID NO: 386174 - DNA, 525 bp, Salmonella enterica
atgaaaagaattgccatcgacatggatgaagttatcgccgattttaactgcaaatttattgcttcttttaacgcccgtttttctgaaaacatcacggtcgccgatctcgccggaaaaacggttgagcagttccgtccacaactgctggcggagatgcgggcaatgatttgcgaggacggtttcttccgcgatatgccggtgatcccggacagtcagagggtggttgaagcattgcataaccgatacgaaatatttattaccagtgccgcgatggactggccgggctcttttaatgctaagtatcactggctccaggaaaatttccccttcatcagccctaaaaacgtggtgttttgtggcaacaaaagcattgtttatgctgactacctgatcgatgacactccgcgacatttcctcaccttccagggtgaagggatcctgttttctgccccccataaccttgatacggaaggttaccgcagggttaatagctggctggatgtggaaacgctcttcctttcataa

SEQ ID NO: 386175 - DNA, 597 bp, Salmonella enterica
atgggtgaggtacagaccaaagccccgctggacagtccggcactgaccggtacgccaacggcaccaatgccggaaaccacagctgcaggtattgaaattgccacggcagcgtttgtggctgcgaaagtggcgcagttggttggttctgcgccggaagcgctggacaccctgcaggaactggctgacgcgttgggaaacgatccgaactttgccatcacggtactgaataaactggcgggcaagcagccgctggacgaaaccctgacggcgctgtcaggaaaaagcgctgatggttttatcgaatacgttggtttacgggaaacgataaatcacgccgccgatgcgttacataaatcacagaacggtggcgatattccggaaaagccgctgtttgtacaaaatatcggagcgctccctgcatcaggtacggctgttgcagcgaacagactggcatcacgcggcgggcttccggcactgactggtacgacaagaggcagtgatagcggcctgataatgggcgaggtttacaataacggttacccaacgcaatacgggaatattttgcgtctgaccggaaccggtgatggagagtattaa

SEQ ID NO: 386176 - DNA, 516 bp, Salmonella enterica
atggatttcagctacttagccattatgtttatggttgcgttgatagccggttttatcaatgtggtttcaggcggtggcgggtttttgtcgattggcgcgctgttgatttcgggtttaccgcccgccagcgcgctggcgaccaataaaattcaggcgctgggcagttcgctgacctctcgaatctactttttgcgccgggggcatatcaacgtccagcagcacaagtatgtctttttatccgcctttatgggttcggcgttggaaacaacgctgattcagtttatcgagctggaacttctgaaaaaacggctgccgatactgatcatcgccgtcgcgctctattttatttttgctcccaacctgaccgaacccaataagaagcagcaggtatcgttgtttcttttttcactggtttgcggtggttgcgaggggttctatacggtttcctcggcgcgggagccggttccttttataccctctgctacattctgttgtggggatatagtatcaatatag

SEQ ID NO: 386177 - DNA, 159 bp, Salmonella enterica
atgatctggtcgctggggctggtgatgtttgtcggccagtcgcttggcgcgagattaggtgcaacggtggtgctggcgcgcggtaagaaaatcatcaggccgatgattgtgatggtctctatctgcatcagcgtcaaaatgctgctggatatgtactga

SEQ ID NO: 386178 - DNA, 2142 bp, Salmonella enterica
atgctgattaaaaaatggtacgtttggctggtgtttgtattcttacctttactggcctggtgtcttatttccgaggggacccaaacctcaccacagccagaagattgtgcgctatctccttatgtggattatgatcctgcgcctgtttttactcgctggcaatggataccagcaaaagcgtgggatccagccagaatatccggcgataacagtatattagtctggtcagatgggaagaaacgcgtggctgcgaatgaagcgacgctgttaattgacggcaactggcaaacgctggcgccagtattgtcaagcttgcttgaaaaagagaatttcaaactccagtcaacatcaatgccaatcgtgaatttggaaaacgattggggacaagtacttttgtcgcaccgcccggagattgctaatcgtctggcgcaacaattcatcatccccggattacagcaggcagcgcgaaacggagacatcactacggaagaagtcgtgcgaaaaaccgagctagccatttctcaacatcagttatggggagcctggagagaaaagaagagagaactggaagttgaattacagaaagataccccgttaatcatcgccagaaaaacatacaagacgggaaacattaaacgcacaacctacatgaaaataatggacgctcgttccgtgtttgggaagcctaagatcgcattgacattaaccacctgcgacatagtaccaaccccggaatactccattaaaaaagcagccgaaaatggcaagtcacgacttgctgacttcaaacttttcggttcaagcattcagaaactgaatcgctatttcacccaccaacttgtacctgatgagagtattaaaccgattcttgacctgttgaaagagaataaccttaccagcgagctcacttcaacagcaatggcatggattaaatcaacgccattgccggaaaaaacacctgaacatgagcctcaagaaacgatgcctcttgggtcagttagcgtagaaaccgtctcacttaacgaaatactccctgataccgacgattcacgggagcttaagatatataaagaacttcctaatggaaatgccttatttgcgacgacacgctatgaccgaaagcaacaaagtaacgttgcagaactctatatcactgagccaggcaatccgcggcaggtcacccagctttggcaaggggaaaacctattcagattagtgttggttcaccaagggacaaaagcctggtttgaagccgcttcacgacaatggtttgaagtggatattctaaaccgcagaatcactgcaatgaccacaccgcaggcagaaactgacacttattcagcatcatcatcatcatggttcagcgatatacacgatgaacccattgcctttcattctgattatagtgatgaaggaaaaggatgtttggtttttcagcgtatggatccccgccttctgacgacagaaaatgtcatattaagaacatgccgtaatcaatacgctagtggtaactccattcgacccgtactcatttcaactccaggttatttctggcttgaagacagtaatggattagtcaaactgaacgccagaactggcagagcggaatcatcgtattctgttcctttccgcgcttctcgtaatatcagaactcacaccatcgatctggctaatgataatactacccaacataccccgccgccgctaggttccagtgaagctcactggattgcattgcattatcagattccctttcctcctctgaatagcctgaatgaatatgctatcggaacccattttattgataccctcagcggtaaatggcgctttagcgcagaactgaaaaatgctgacagcattgatgcaaccgcacgttccgctcatggccgtttttatgctcaggctggttgtcaaaagcccgcaggtacgggaaccaaaatcgatatctgggaagtcgccagcgcaaagaaaattgcatcattacaacgtccaaaatattgtggtttagcaggaatggcttttagctggcaaggaaatattctgattctggcttatagcaacaaatgggtgcgtgtaagacttccagacggaatgcatgatgtagcacgcaagagcgcaatccctgtgcaggcgcaggaataa

SEQ ID NO: 386179 - DNA, 1350 bp, Salmonella enterica
atgaaactaattgcaaatggattgaataagcagttttttagttcttttctacctccatcagatagcgaaattgatggtgtcgttgcggcaatagcctatggagatgataaaaccacgcttcttgaccactgtctgaaaaatcatcatcgcctggatatctggatgcggtacgatcatactgtccctgtatcgccttcacttctgacaaaatttcttgccaatacaaaaaacaatatcttctgcaaacttgttccggattgtcttcacagcaaggtcatctggtggaagggttatggtgcatatattggatcggctaatttaaccgatcgcgcatggcatacaaatatagagactggtattttcttcactgaaagtgatttatacaattctaatctaattggacaactagaagagtttttcgaaaacttagcgtctcttgactgttgcgttgatcttagtgaagatattattgacgaacaaaggcagctattaaaatcaaaactcgagttagagaaaaaagaacgacaagttatcagaaagcgaaaaatacctgaatggggtggagtgagctttattgataacaaaaaaactaaagataaaagaaaagagagtttccataaagaatgggaaagcacgttttcaatcattaagaatatctcagaccagattaatgattacagacctgtatggatatcagaagacactccagaattttggcaaaccgatcagttcctacatgcctattattataatatagttcatcagaaggataacacttatccttttgaagattatcatcgtacaaatagtaaaaatccacaggcagcgctgatgagtatgctctcctggtggaaagacctatcaatacctttatctaatgaagatattcaccttgaggtctatgcaccatatatccgtgatcatttatcaaaaaataatattgttctattgactgaggataatctccataaaatattctcctatacacatgcaacgatggaccatgtgataaaaatgagtgctgatatatttgggcattctgctaacacatctttaaacaaggaaaaacgtgctgttttattcacagaatggatcatgggtaaaactaatcaaaaaggcatgactattgctgaattactcaattacgtcctctatggtggaaaggcctcattgatgtgggaaagaatctaccaagctggaaaagacgatgaatacaaatttcagcattatggtattaactctatcgcagaagttgttggatgggccagacccgatgatactcctcccagaaatggcagaaccaataaggccttacgcgcattaggctatccagttcgagtgaatatttag

SEQ ID NO: 386180 - DNA, 2046 bp, Salmonella enterica; identical to SEQ ID NO: 369493

SEQ ID NO: 386181 - DNA, 312 bp, Salmonella enterica
atgaacaatcatcgccagcgtaccactggctttattcagcaaaccaatccagttaaaggaaaaatcccccacgtccgcccccagtacgacggaatgtactacagcgttgtcattcaccacgcccttacggctgacggcctgccggtgaacaatttgttcagccggtggcagggtttcattacggtcaaccggccgatccggctcaagccccggtacgttagcgaacacaaattcatccagcaggacaggctcccccgtggcaccctgctgcgctttccactgttcaaatgcccgtgtaattgttgtctgtga

SEQ ID NO: 386182 - DNA, 834 bp, Salmonella enterica
atggccgttaaaactccgcttaaatgggtgggcagcaaagcccgccttatgcctaagctgcgtccgcaccttccagaaggtaaacgcttggttgaaccttttgccggttcctgtgctgtcatgatgaatacggattatgacgagtatctgatcgcagatgtgaattcagatcttattcatatgtatcgggcaattcaggaagtccccgatatgtttatttggcaagctaaaggtctttttgaattgggcaataatgcttctgtttattatgacattcgggaacagttaaatacatcaacggatgctacggagctttggagggctgtagcgtttctctatttaaatcgtcatggctatcgtggtctgtgtcgctataaccagcgcggtgcgttcaatgtgccgtatggcaattataaaaagccgtattttcccgaagatgaaattatggcgtttgcgaaaaaggctaaacgcgcaacgttcattactgcccactattcagaaacgcttgatttggttcgggacgggaatgacgttgtttactgcgatccgccttatctgactgatagcgataatttcaccgcttaccatgagcgtggtttttcgcacatggatcaggggcggctggcgcgtaagctacggcgtttggcagaacgtgggattcaggttgtcgcgtcaaacagcgatctggaaatggtgcattacctttacgcagggtttgaagccttaaaggttaatgcgccgcgtagtgttggtgcggcagctgcaagcccgaaaatggcggcagaactgatacttaaatggccttctgcggccacttgtgaggtcagcgcatga

SEQ ID NO: 386183 - DNA, 1611 bp, Salmonella enterica
atgaaattagctattcacaaacaattaggctgggcggagaaattttataaatcggaagaacatataaaaaaacatatggaggagtgtaatatattagatgcgtttgatatgagtaaaatgatacagagtgctgttactggctttattcatgaagctcaagatatttcagcatctatttggttgacaacagaacaaaaacatgaaaggcaggttcaagctcttgaacgtttcaagagtaaagtttcatccatgaatgatggtcaacaattcgtttatggatttaataaggttattcaggagggcttaggagggttgattgagctgagttttgatatcgatgattcacggcatcatcgaactgagtcctcgttgtctccggcatcgagggaggggctgcatcttttgggaactatctggaatagtataatgagttttgtccctggttttaatgctctggctggtaccagcagtattcttaatcgggctgttgtggaaaagtctgctgatgtatgtggctacgttcaggatattattcgtgttggtatggaagctatccctgttgcagaagcaaagtttacagaaagggcgtcaaacgcaaagtatacgggcctccaatttgttgaaaataaaatagaacgaggtgtaatacgatcgccgattcaaaaagggaataattataaagttatagagtcaatagaaggtactgattttatttatcaaaaaagcaatcagaaaattcttgagttaaatcctgagggaaacgatggactctatcgcgctacagggtttgataaagaaattcatggttattataaacagtcaggagaagggttttatagaaaacaaaaatcattttcaccattttcaacggaagcacctaatacgataaaatatggcgatagggaggtcgttttaactaaagagcctggttcagaaacgtatcagggaaccttttctgataccggaaaaaatgcaggcatgacattttatagaacttctgacggtaaattttataaggcctctgggctgaaagggggaggacttattcggcatgttgacaaaccttattcggagttaagagaaggcgactttggttatgatgtagaacttctggatattgaagatgactcaccattactggaggatatgattccttccctatcagaggatttatatcctacagcagaagaaaatgtgcaaagtatttataaaaaacaccagggtggtgatgctgcagcaggcgagacagaagttgtattatgcagggggacaattggtccgcagtctgagaatattattaagtttaaaacagcaggaggtgtggagggcgccgattctagtgtattgcctgtctctgaagaaacagccaggcagcaggttcggagtggaagaattgcacctgaatatacaacagaacttagtgttgcagaccgcttcagcagggggcatcatcttattatcgttaaggtaaaagctaaatatcttacacgaggtagtataagtgaaagcggctgggttattccacatacagcaccagtggaacctattggtgtaattgaccggacgtatggtcatgcagaaaataccgcacaggtaaacgcttctaagtaa

SEQ ID NO: 386184 - DNA, 4932 bp, Salmonella enterica
atgaataatttattttctactcaggctgtcaatttcgttgatggattgagaacaaatgtcgaccccagaacagggcagtttatggtcaatcttcctttggctaccattaatggcaatgcctcactgggacctgaaatatcattgtctttaaactattcaccattgaataatgataattatgggttcggtaaagggttttctcttggtatttctaggtttaataatctcaataatactcttgagctcagtaatggtgagatatacaaggttagtccgggctccgattttgtcagaaaccataagttggaaacatttcatttctcatatgcaaatggaattaatgatgctgaaggttattctattttctggaaagacggcacggctgaatttttgacataccaaggcggtaataactatgtcatgactcgtacggaatcaccgttaggtcgtgcaatttgtgttgaatggttctggaacggacagcaagtacttatatctaaaattgaggatgagtccacactgctttgccagttcgattatgcgaatatagtcactatgaccctctggccgggaactgtggaagaatatcagaccgagtttactttgattaatggtgaccagctcgataccatttcacggtatgtctcagagactgattcgcttacttggtacctcggttattcacaaccacagggttggaatggactacttctaacggatgtcgtctacccaactggtatgaaggatcatgtggagtacagccaaattgacggacatatgtacccttcagcatctggtctctataatcgcttgccagtcgtaatctcacacactcagactcctggcgtaaagcagccggaaactatccgtcattacacctatacgcagcagaacttcctcggttacaacggtaacttcggtgactgggagaataacagtgactatatctataccacacttactgattacatctatggttctatcgagaccatacagtctgattcagataaactaactatagaacgtatttacaataattatcatctgcagatcagtgaagaagtgcagcgtaataaatgcgtcaaccgcaaggaaatgagttattacgcagaaccgggtttatttattgatgcccaacccgcacagtttcagttgatgagaatactgaaagaaacctggactgatgccactggggcgaagcgtacacaacttactgaaactgaatttgatactgcaggcaatccggtttatgaaaaggctcctgacggtaccaaaactctaacaacttggtataaagccagcggtgaaaagggatgtccgccgtcaccgcatggttttacgcgttttatgaagtcatcgacggtcctcccccgcacaaccaaatattctgctccagtgctggaaacccggtacgcattctccacactttcaaaagatactcatattgttcagaccgaagaagaggaatatgcagatgatgttctacttcaccgtaaacaggtcacgtataacaacatttccggtagcagtgagtacggccgtgtgttgactgaagagtcaaccgtattcaaagatacaaagacatataccagcagtttgaaaatcgcaacagccgtccataacggaaaacttacggctgaaacgacctttgttggccatgatagccttacctttataacacgccaagaacacagtgtgtcgtccgggttgctgctgtcagaaaagaatgccatgggcgtggatattgtctacacatatgataaggcagggcgcttattaaccgaaactgatgcaccaggcacgttatatgctagtactacaacatgggttcacagccttgaaaaagaggggccgataaccactatctctgataatttaggtaataaagtcaggatcttatttgatggctctggtcgtgagaccggcagggaagtctttgatatcgatggtaccaagaaatggttccggattactgaggctgtgtttaatgcatttagtgaacaaatcgccaaccacagctatgactggcttacgagcagtacggaacagtataaccgctccatgctaacaaagacggatgactggggaagcgtaactttactcactgacactgacgggacccgcactcatcaggtcaccgacccagtagcgcttacctgcaaggagtggattgacgaaacatccagcgcacacgctctcagaaccggggatgagataacccacctggataccctcagcaagttaccagcaaaaacggtccggacacgcctaaacggaagcatcctgggggataccctgcaggaatgggatgggctcgggcgattgcgaatgaagcaggatgagcgggggaacaaaactacccacacctacgattcttatgggcgcctgctgacccttagctatcctgacggtacggtcgtctcgaaaacctatgcgccacatctatttgatgacacggttaccagtatctcggtcacaggtttatcggccgacggcacagtcaaaacttggcaaataggtacacaagagttcgacagtttgggtcgcctgattcgtgatgaaaatggcggacgtatcacccaatatgagtataaaaatgctgatccagagccttttgttgttatcctgccatctggaaaaaaaattcactattcccgtattcccgaactgggaaatgtgattcaaagtgtgcagtcagatgatatgttacagcgatttacctatgatgcctccacggggaaagtgattctcgcagaaacagaagatgtagatgcgaaaaccaataaccgcaacaactggtacccttcaggtcaattgaagcaagaagagtttatacaaaatggttcctctcgtactgccggatatacctacacgctagggggaaacgccgcatcctatactgatatcacaggtaatcagacacaatacaaacgggatacatttggtcgggtggttgaaattgatgatgcggccttaaccacgacgtttacatatgatgcgctgggtcgtcagtcagaacagatcgttcacagcaaatctggcaaagaaacactgatcactgcgcttgaatatgatgaatttggtcgggaagttaccaggactattaccgatagcagcagtaacgggatcgttgtaacacaaacatggttagcggacgaccttctggagagcaggacgcagaaaaacctgcgtggaatattactcagaaccgaaacctatacttatgacagtcgcagtcggatgacggagtatacggtctccggggcttccgtggtcgaagatgcctatggaaaccccctgaaaaagcaggttaatagctatgacgccttaaataatctgacgtgcgttattactacgcttaacgacaatactaccgataccgaattgcatcattatgacaatgccgctgacccgatgcaactaacctctgtgacgcatactcatcctgcatatcctcctgttatttcgcttgaatatgatgtggatggacgaatgacgattgatgaatctggccgacacctagagtatgacattcaggggcgccttaaaagcgttcatggtgaaaatatcaacggtggtcgttacggttatgatgccctcaatagactggtaacacagcatgtcagtactaacgacgtgcgggaattgtactatcgggagaacgaactggtaaatgaaacaacacgaaataccacattggatgtctgccggtttataaaagcagggcataccaacttgggggctgtcatcccgacaggactaatcctgactggcactgaccataatggtagccttctgtggactcaggaaacggaccattccgccagtaatcatcatagctggacaccatggggtaacgctaaaccaactgcgtttttgccgggatttaatggtgaacgtgttgacccaatcagtggggcctatcatctgggtaatggttaccgggcctataatccggtgcttcgtcgctttaactgtccggacagcatgagtccgtttgggccggggggcattaatccatatgcttattgtgcgggtgacccgattaacaatactgacccatctgggcatttgagccggagtacgtggatctcgattgggacaactattgcaggtgttgccttatccgtggctactgcgggtgtatcgattggtgtagcggggggggttatggcagcaattggttcggcaagtgtagcatcgatggtttcgggttgcatgggcgcagtctctaccgtgaccggcattgctagtttagcgacgatgaaatcggatcctaaggcctctgcgatactgggttgggtctcattagcaagtggactcgcctcggcggctaccgggataggggatgcagccaacaaagcgctgactaatagagccctggcaaagattgctagaggagcagctgacgaagccggctttgggagaatgcctgccaatgcaggtgttttcagaagagttagcggggctccgaacgtctatgcgtcaaattgccccgtctatggttatcaaatagttgatgctgtagacgacattcggaaggtaaccagaacgacaaaaataacaatcctcgctgggaatcatggtactaaaaacggaaaaatctggggggagcagcttatgtctatcggtgacaaatttaaagaccccgctatttatacttctgcaaatagaatatcaaaagcgaagaaatatgtttctgttgtgaatcttcccgatttaaatgcagagcagttcagtagaatattgaaggatgattctactattaagattttggactattgctatagtaggaatgatgcagtacttcgaaatacattcaacattaagaaagtagatgttatgactaagcctccaaaagaactacgttggtctgaagaaaaattagcagcgtggctagcatcaaatcgtacagcgattagtcgtgcttaa

SEQ ID NO: 386185 - DNA, 591 bp, Salmonella enterica
atgtatcattttatctttaccagtaatgtatacctgtacaacgggttccatcatcttttacaggaatattgccacgatagcagaatatgcattatcgatattgagtcatttaattcattaaatgagcttggcaggacaatatctctctctgaccttgggaatgacattgttttttttctgatccagggtaacggaatttactccagattattatcacccgtaacctcttgtcatcgtgatgataaactttcagatatccggtttaagcttatttattcgggggggcattcctatcaggaggtaatgggtttgatagaaacatgtcaaatagcttatgagaaagatttattttcctcggagagaaagggtatttatgacagcgcaatgaggaaggggagcaacatcaaaaagtactacgcccgaaccaagaagattgcggataaactagggctacggaatctgatgcaggttaggtattttttccagaatgaactttcctgtgagaattgttttcaagatagcagagtgattgtgcatttagtcaaaagaataaaaacacctgatgttgtaaaatcacagaatgattattaa

SEQ ID NO: 386186 - DNA, 1227 bp, Salmonella enterica
atgcgtaaactgggaacgctggtgatgatattaatggccagcattggggtatgccaggcagaatcttttgatattgttctgagttttagacccgatgcttctaaccaatcaaggacattcaaaatagaaaccgaaagtacgggtgcaagaggatgtactcaaccggggtctacattttgtggtgataaagaacgttcattcgtaactcttattagcggagaaaaaacgattgatgttaattctgatgacataaaacaaaaaacaggtggtaggtttaatggtgcttggaaaagaatccaattacgtgataataacactggggaaatactagatgcaaggactcgactcagccttataaattgggagcaaattgtcttcacaaatcagaatatgggaacaggtaattttcttgaagctcatccttcgtgggcatatgttggaccatgtaaacgttaccgtgctactggttcgactcgatacgtagacctgactctttcagtagttgaaaatacctccagtctctgttatcagggcaaggttaataatcagaaattattaccagttaaatcaacatctagatatataacatttggattcgtaacagaagtattaaattcaccatgggaagtaaaaaatggaaattatactggaagtttttcatttaccgttggcgatggtgctgacattgatttatttaatgacagttatactgataatgaaatccagatcaaccttactgctcatgtaacacatttgtttactgtccgtttccccggaactcagaataatatcactctttctccaaaaggtggatggaaccagtggaaaaatagcggcagagtgccttcgcaattaagtaatgaagtaccattttcgctcagtacatcaacaaaatttagtgtgtctttgctgtgtagtgtacccaccggaagcgaatgcggactgagcaatgtggcaaatgaacaacaggtagtgccgcttaatgttgcattaacaatgccttcagtttcattaaaagaatttccaggtgtaggggtcaataatgtattattgaaggcctcaaaacccattgattttgagccggtgctaagcaacgggattatatatgatagccggtcaaaagtgagtttttctgttgggcaggatcatgttaggacaatgcttgattccccgaattccaggtggaagggaaccgtcagcctgatatttgatgctgagcttgagtaa

SEQ ID NO: 386187 - DNA, 2469 bp, Salmonella enterica
atgtcttattaccatatttcttttggtattttattattgtctattaccagcaattatgccatggcagcgccgaccattttgtctgagcaagcagagttaataccggatgaatttcagcagcatttctttaatgttcccctgtctgcaaaaataacactgaatggacgaattcttggggatgcaatggtaactttgactgaagacaataaagtaagtcttctacagtttacagacagcatggacagcgattatcaggaatctgaccgtcagcactggctgaaagcgctgtctgaacctatccctctgaccgaatgcgacaagcgttgtccatccgggctgatggcggcacattacagtctgagtgattcacgtctggccctgatcacgtcagatggcagtggctcaacggattactggcataccctgcctgaggaaggggattccggtctgctattaaataatcagctgaacatcagcagcggcgaacaacaaacagcgatgagctggaatgggggacttgaagccgcactgggtaaatggactctgaccagccagttgcagtatgaccgtacccagattgagtccggtggtacgacaaccagccatgctatgacatcactttatgcacagcgagaatttcagcagcactttctccggcttggcgaattcacgccggacagtcagggactgctgcgacagccttatctggccaacggtggagtgagtactctggctggtgtaatggccggcagcagcgatgcgttacttaaagggggcaacgtgcccgcattgtatcctgtatatgtcaccgccaatcgtgaaggggtggcggaagtctaccgtgatggttcacttatccatacgcaaccccttgagcctggcctccagttacttgatacagccccgctgcctgccggtatttatgacgtggaaatccgtgttctggaagatggacgcgaaaccagcaggacaatggaaaatattaataagccctctcaatggcgaaccccagggcagcgcctgcgctataacatatttgccggccgacaacataccctctggaatagttatacgaaccatgaagatgagaaagtcgcactcggcagcagcattaactatcttcttcttccgcaaataaccactgggctggcattacagaaagtgggaagtgaaaagcaggcgggggtttctgtagactggcaggttgctgagccagtgcagttgtacggtaatctgtggaacagcaacgtgaccggaaccggtatggactctcaggccatatggacgcataagcaaggtaatgtatccctgaaccatagccggagctggtaccgaccggacgatacttacagtagtcgcccgtcaattgcacacaatactaccgcatcaactacctggcgtttcaacggtgaaaacagcctgaacgtccgtgttaaccgtaatagtcggaccggcggtacgggcgttgacctaggttttaatacgcgaacaactgttatgggtaccccggtcaactggcgtctagcgggctttgaccgtccgtacggatccagcaatagcaatcttcgtaaccggggagtcagcctgaacgccagtttcccgctatccggtaaaagccgaagcggtagcctgagcatggggagcaggacggacagcaacggcggacgtgacatgtatgcgtcggcttcagttaatcagcagtgggcagaaaccagcccgataacatcaaccacaatgtcggtgaccggtgaccggtatggtgtagggctgagtacctataaccagtttgatacctcattggctcagggctcagtctggggtcaacggtcatctcagagtgggaaagtatctggtggtatcaataccggcagtctactggcgattggtaaaggcggcgtagcgctatcaaagcagacctcgaacataaaggacggcggcatgataataaatgtcagttcagatgatgacagcgtggcactgcaggctttgtctctgacgggtacctttccgctgaaggccggacagaactttattccgattgaggcctggaggccgggaagtgtgcagatagacgtggcaggttcggaagccaaagccctcaaagtggaaccagaatatttgagctatcaccatatacccggtggcgtcagtacacatgatgtgcgagtgatgaaaactatcacggtaataggacgtattgttgatgaagagctcagagcgctgagcggagcgcgggtggtaaatcatgcaggcaggactgtttcacaaccggatgggatgtttaccgtggaagtgcatgagcataatccagtgattaccgtggatcatgcttctggaacacattgtgatattcggttatcgccagaaacacagaaaaaacaggacattatttttgcaggcaacttggtctgtgatggtaagggacagcaaatggccagcatagcgacaccggaaggtaaaggggtgtga

SEQ ID NO: 386188 - DNA, 489 bp, Salmonella enterica
atgaatatgaataagttatccttggctgccgttttgttcgcctctgcatttaccgtacaggctgcgcaacagattgacttcaatattgaagcaaatattcctggtaatgatttttatgtcactgctgtaaacgggtgggacagtcaggttcagaaaatgtcatgggatgaggtcaaatctggcctgtcggacattcgtcagcaactgacgatgaaaaataccggcggtggtattaaagcttatttggcttccaagcctattctgagcggtaaccagagcacagataccatcgaccttaccgtcagtgttgcaggtcaggaattgccagtaagtgctgcatccgcaaaaacgctttacagcgcagatgaagcaaaaacagaaaaaaccgccaccatgaccgtgagtgcagataccaccacccgtcctggtgccggtaattacattggtgccattaccatgatgtttgaatctgaagaacctgaaggctga

SEQ ID NO: 386189 - DNA, 741 bp, Salmonella enterica
atgactcgcattaaatattcaggaatggcattcctgctcgttattgctttcagttcacttgcggcgccagctattaatgttgggtcgatgaatgaatttatatactcaggaagtagtaccctcgcaaaacgagtttataactctggcgattcaacggcattcgtcaaaattacagtcgatgaaattgtctatgaaggtaggaacaaacccattgaaaaaaaaatcgatggcgaagcgcttattaatggcaaaggtacgggactgcttgcctctcctcccagaatgattattccggtaaatggcatgcagacgagtagactggttttttctggtgagcgcaacaaagaacgttattaccgggtgcgatatattcctgttgatcctaaagaaatgcaggatatctccggtaatgaaggtgcgtctgagaagaatgaaatcgatactgggttaaaagtcctgactggttttggaattattgttacagtggcacctgccagtacggttttcaatactgtgatcaatggaaaaaacaacagtctaaaaatagaaaataaaggaaattcatctgtagtccttggtgaattaaaatactgtgatgacagaatgaaaacatgcagcgacccggaaaacattcagttgagaccaggtaagaaaattgaacgaactgcacctctaggacagttctggttctacagccttgctgagggcaataaaaaacagcaaataaataccactaagtaa

SEQ ID NO: 386190 - DNA, 699 bp, Salmonella enterica
atgaaagatgataaaaggcctgaattggtggttagccagcaaaaagttgaacgcatcaataatttcaggcttgaaccgtttattgacattactgaaaacaggatcattggatttgaagttctctgctctctaaaagccggtattactccagagtcttggttttcagagcaaaagaccgaagaccagatcggcatgctcaaatttcagatggaaagtatttctgcattaggtctgaaagaaccctgcttctttaacctgacgattagtgggttcctcgcgctgagctatgaggatatcattttcatttctggtgtgcgtcaaagaggaattgaaatatccgatacatataatataaagcttcttgatgaggaaaaacgcacagcattttttgatatcattgatcatcttcgagaacgcggtgttagtgtctgggtagatgattttcattttgacgagcttatccaccttaattactatcgtcagcatgtcgatggcataaaaatggatagaagtgaagtcagaacgccttggcttcgaaaggaaatatctcttatcagaaatgtacttggtaatattgatattcttgttgaaggtgtagagtccgattctgacttaacggcagccagaaaagcaggagcaaagcttgcccagggatatttctggaatgttgataatcttttagtgaatgtagctgggtag

SEQ ID NO: 386191 - DNA, 891 bp, Salmonella enterica
atgaatcagacagaatatgttatcggccagaaaattaggtatgtgccagcaagcgaaacactttcccttgtttcaaggccggaagatctggtggtgttaaccccagcatgtaatcgtttattgttacatcttttatcctctcagggcacggtcctttcacgggacacgattttttcggtgctctgggagcaatacgggtattcaccctctaacaatagccttaatacttatatttccctgattagaaaagcgtttattaatcttggtattactgatgatgtcgttgttaccataccaaaggtcggattcattttcagtccagatatttctgtagaggctacccatatttattctgaaccagaatgtgcggacgatgctaaggaaaacaatatatatcagtctttcgataccgtaacagaaacacagcatgagactgatgataaaaaaacacaactagctcccatcagtttgaataacatctcgccagttgttaaacaaaaacgtttgcgtctaaatacttctctggtgctagtatcggttgcattaattgtctctttaattatctttatgagttatccacgtgcccccctcatcgcggagataaaaccggttagcgtggggcagttgaatggttgtgctctctattatcttcccatgcatgtaggtggttccatcatgctttcaaataatgaaatctccagcattattcatgcctctaatttcagatgtcagaccggagatgatttctatttttatgctgacgataatgtcagaacagggcattcgggcatgatatatgttacctcttgtcaaaccagggatggcaggatgacagcctgtcggaactatatgaaccatcacttcattctgaattcaactccgcgcccataa

SEQ ID NO: 386192 - DNA, 396 bp, Salmonella enterica
atgctcttttatgtacatcaacgcaacttactaaatttcagctgtactgcgcatcttcaccaggtaaatagcgacgacgatttttccctacatatggctttcatccttaccatgcaacccaatagccacgggttagccgtcatggatgggaacattgtatataaaaatacaaaatacaaactgcgccgcgatctagagtttcgctacgaaccgtttagcgacagactctacaaagtcagcgatctgaaagtgataaagggatctaaagattccgttcctgaagcattattaccaatgaactacgcgtttctatacatcgtccgggttaaaaatgtcaacaatgctctccttgtaggtgccgtcacgtttcctgcgtttatgtgtctaactggctga

SEQ ID NO: 386193 - DNA, 1113 bp, Salmonella enterica
atgaaaaaaaataatttttcacaggaaatcaatgatttgaaaataaactgtcatgatcctcgccatcatcaggaatttttagtgctaagtaataatattaataactggaaagagcaggtatctgaccggtcctggtggttaacacaagaaaaaaagtgcctggaaatttttcagcgccacggctatgacctgcaaagtggggtttggttttgcctgataagtatacatcgccacggctgggccggcatgacaaacgccacgttactccttgcagaagctttgagcagaaagcaacgtcaatgctggccgccattcgcggccatagatttacgacggcaaattatcgaatggtattccactcatgtggcaagtattgtttatggcctacatcttaatagtgctgaatccaatatgttggtacagctccatagtgctgtatctgtgatgcttgagcatgcgtcagctctgaattcacgaagcaaagttacgttacaaaatttagtcaattatatccactctagccgactatcattgcaaaagaagactgtgtctgacaaacaattggacccagtccctcgtcctgtaaagggagagcttattacacaagcccctgtggaactggtcttacgcccttccccggtcccatggaaaacacggttggcaggtagcgtgataggcatagtcttaacgctcactgtggtcggcgctattcactggcttacccacccctcaatggccatcctattgaattcaatctggcccgccaacccgatttctatacactggcaaaaacgtcttaccgaaacggctgctagcttgccaaccatcaatagttggcaagagatgaatgaccaattaaacaatcttgagcagcgccttttagatgcggaacaaaagcggataccatatttgaccatttcggagttaaaaacagcaatctataagttacgtctaacactacggaaaggcggcgagccagccttggtgcaattaggaaacttacaaaacaagattgatacccaacaatccattagtgacgcagaatttgatgacatttctcgtcatttggaagcattgcaaagccgattgctttatttaaaaagtcagcagtaa

SEQ ID NO: 386194 - DNA, 2535 bp, Salmonella enterica
atgagcaactatttaaaaaacatcattgacaaattgacacaagaaagtcggacctgcctgaataccgcagtcagtcacgcggtatcacatggacatcgtcaggtggaatctgaacatcttatcctagcaatcatcagccatcagagctacttaatggaacgccttaacctaacggccgggttatcaactgacgttctgctcagatccatacaacaagcactaagcaatatgcgcggtgaaaataatcaagcaccagttttctccatcggtctggttcagtggctggaaaagtcctggctgcacgctagcgcaagttgggggcatacccagctcacacctgctgcgttactagtttgtctgcttgatgaagatcacgtaccggatttatacaccagtgtgcgtaacgctctcaactgcaatcgagaaaaagcagaagcactgctgctaaatgccagccagccatcagaacgccaggcccttagtgatagtgaggtcagtcactctgccttgcgtaaatttacccgcaacttaagtgaacaggcacgagacgaccggctggacccgatattagggcgcgaagctgaaattcgccaagtgattgatattcttcttcgtcgtcggcaaaacaatcccatactgacaggtgaacccggtgtgggcaaaaccgcactgatagagggcctggcccagcgaatagccgatgggagtgtgccggaagcgttaagcacaatggaagtactctcactcgaccttggcctgttgcaggcgggagcaagtgtgaaaggagaattcgagagccgcctccagatgctgatggacgaaattatcaacgccccgcatcctattattctctttattgatgaagcgcacaggttgattggagcgggtggtcaggctggtcaaaatgacgctgctaatttgcttaaaccggtattggcccgcggtgaactgcgggttattgcggccacaacttgggctgaatataaaaagtactttgagaaagatgccgcgctgactcgccgctttcaactagttacgctcgctgaacctaccattgagagtgccactgcgatgctgcgtgccgttgctccagcaatgtcacgccaccatggtgtacaaattcttgaaagtgccatccatgctgctatatcactctcgaaccgttatattgccgggcggcagttaccagataaatccgtcagcctgcttgatacagcctgtgcccgcgtgtcggtttcccagtgtcatcaaccgaaagagattgagcaaatcaatgcacagctcaacaatttacgtagcgaacgtgctgcgttacaaaaagagggggcacaccaaaaacgcctcgccatgttagacattcgggaaagtgaactattggcagagttgtcgcatatccatcccctctgggaacagcaaaaaacgctagtaaagcaactgcaggaaagcagcgacatgcaggctatatcccaatggcgttctgagttagctcgcttgcatgaggcacacccgctggtatttgaatgtgtggatagagcctgcgtcgctgatgttgtttccgactggacgggagttccgcttgggcgcatggtggaaaaagaacccctacggcttaatgagttgctttatcgcctggagcatcgcgtcattggccagcatcatgcgcttttagctattgcaagacagattcgaatcagccgcgctaatcttaacgatcagcagaaacctaccggggtatatttacttgccggcccctccggtattggcaaaaccgaaacggctttggcgctggcagaattactttacggtggtgagcaaagcattgtcaccatcaatatgtcagagtatcaggaaggacatagtatctccggtcttaaaggctctccgcctggttacgtgggttacggcgagggcggtgtgttgactgaagcggtaaagcgtaatccctattccattgtcttgctcgatgaagtagaaaaggcccatccggatgtgatggagctattttatcaggtgttcgacaaaggaatacttgaggatggcgaaggtcagttaattaacttccgcaacacgctgattataatgacctcaaatctggggagcgcaaagataatcatggcatgtacagaaggaaatccctctcccgagacgctctgctccctggttcgtccggagtttgagcaggtattccgcccggcgttaatgggccgcatttcactgatcccttacctgccactgacgcctaaaacgttggaacagattatcaggttgaaactggacaaaatctgccagcgttaccatacagccagccacggcgaggtgcagctaagttatagcgtgagtgtggtcacgtggattgccggattatgtcaggtgaaccagagcggggcccgcgatatcgatcaggtgctaaaccagcatacgctgccattactggctgaccaattgctacaggaagataaaatagccaaggacaacctcaagttagggatcaaaaataataaactggcgttatggaaaaacaatgaaaaaaaataa

SEQ ID NO: 386195 - DNA, 3432 bp, Salmonella enterica
atgttgaaaaaactatttatttttgccggctggctggtattgctatgcttggtgtttctcttttgctgctacctgggtttttggtacggttggagcacatccacgattttgatggtatggctggtagttgttagtgtatccgtattgttatggatagcattactctggctaacgcagctgtttaaagagaacaaacttcaccgcctattccaacggtatcgtctttcgcgccgcgaattcgtgttattccagcactggaaatccggccggtcagtattaaaacgcatacagcgtaagcgtcctccgctcccatggtatttattactgggcgatcgctgtggcaaaacctccttattagcaggtgcagacctgccgatgttctccaacggagctcaggccaatgtcgtggtgccaacatacaccctgcggtggtggttttttcataatgttagtgtcctcgatttgtccgctaacttcctgaatggtgctccaaccttccagcgagcttggaggaaaatggggggctggatctcccgggcacctgcaccatcgggcatcctgattggcctgtcggtgacagaccttatgaatgaagacgttagcgtgttgcacgaaaaagcgcgcaaaatccgggcgcaaatcgcccctctcaccaataaaactaaacgccaactgccgctctatatcatggtgacgcaatgtgataaattcccagcgttcagcctttgggtgaaacagctctcttctgttcagcaccagcaggccctggggtattattggtcggcttcaccggatatcgacggcaaagacgtttccatgcttcgcccactttttgcaaccgtaagaaagggatttgaacgcgtccgtcttagtatggtcgggacatctctttctgctgaagaccgctgtgcgttactggcgtttcctgaatcctttgctactcttgaggaccctttgcgtgttttcctagcatcactatgcgaacccaatgcctacttccctccggcaactctaggtggcgtatggttcacatccagtgagccgtataatgaaaataaaagccggcgtaccacctactttgtgcatgatttactgacgaagcacctccctgaatttagtatttcccgtgatatgcagtgccctcgaatcagaaaactgcgtatggctgcaagctacttgctgctcttgggatgtgctgcagtgctggggtatagcgcactgaaaagtcaggtactgatggtacgtgacgtttctaccctttcatcatcacagttggcatattccttaattaaaaacgaaacacgctttaaataccctttgatttatatgcctttttcatttgggcttagtcgacagcactcgcagcttgaacagagtttgctcgagaaattgccgccagtgacacatagcaatgggcaagggcttgctacgtatcagcaacagtttaccgatgccgatgtacagcttaagcgtcagttggtactcgatcttgcagatacggtgctgacccgtaaggccatgcgagagggtgccacgcttgaggctctcagcctacgcccaactatccctgataaccttcgtattgaaactgttaacagctcagcatctgtgctctcacgtcttgcattagaacgaatggcaatgcagcaaccctcaggggcaaagttgctggcatctctgcaacagctgttattgttgttgataagtcaagatcgggagctaagttggcttacatcccccattgatacgttaccggatgttgaaaccagagatttatggccggatatgcctgatgcccctatgctctcaggaatttggactcaacaaggtgaaactcaactaagggaatggatagcacgcatctcccaagcaagcagtcatcctaagcatggacttgtgctggaaaaatttctacaagcacttccggataagcggcaaaatgcatggcgagaactactgttcagcgttaacgcgtttattcaacgcccttctccaacgtctctttcccagaaggagctaattgctattgggcaggcgaatagcccgaccatgcaatttgcccggcgtgtcgctaatgaacttaatgatattcccactcaggaccttcaaccttggctaattgagttgaaaaggttacaggaagtatcctcctgggctaatgaaaaaccgatcatcaagaagttgcaacagatggatgcaacgttacgggacagtttcccgaaatggcagtctaatcgaatgttagccactgctgaaccttccgacatgcaacagattgtcgcatggaaaaattggaaaacatcgctaaatgcggcggccagccatgccttaagccaaacaatcctaagcccaagacttactcatggccttttcaaagtacatgctgaagataaagatattaatccactagtcactttattcagccactttgacgagttaatcagaactgctgaaccccacatgcaggaactgggggtggaagcgatctggtcgttatatcaggccgatcctaatgccttgcttgggcatgctatgtcccgctcctcttgctggctcaatgagcaatggcataagaaagtgttgtggccgatacgtaaaaatgcccaacggatggattatgatgtccaacaggaactggcttggcaatacctagttgattttatgcgtggcccggtaaagggtttcctcgctgccaacaatcagggaccacaggttgcggagttccgtggacaaacccttcctctcaccgaatcctttatgactatcgctcgccaccaactgaacccagaagacgtgcttgaggttcccctgcgccagagcacacagagcgccgaccgaatctcgcggatcagcgatcaaattcaacaactcaccctacggcaaaaggaaatggaaaccaaagcctatagcgtcagcattattagtcagccagcaacggtacttgaaggcgcccaattggtaccgacaggttcccaactcacgctggaatgtcaaagtggcgtaaaagtgcttgatagcatgaatttcgccgatcaggcgaagtttatctggcgccctggtgagtgtcaaagtgtacaattgaatgcaaaatttcccgatttttcagctagctatcgttacagcggtaatggtgcctggccagaatttcttcgccaatttattcgaggtgaagcgttaatcaacgtgagtgatttcgatgacaaccaggatgtcatggcggcattgaacatcaaacaggttttgctgcgtttcaaaatatctgaccagagcgcgttgcaaagggcgtggaaagactggtcaatgcttgatgaacagctagccgcccttatggaagaaaagctgattcttgagcagcagcagatccttaaaccggcttccgctatgcgtggacaactctccagcctgccggaaaatgtggctatctgccaataa

SEQ ID NO: 386196 - DNA, 615 bp, Salmonella enterica
atgaaactcctccgctgctatctacccgtgtttaacctggccgcagaattcatccatcgtcctgaatccttctccgattttgacagcttccgcggacgctgtatcaccctactcgagaccgcaatggagcaggccggatatattgagatctgcgagtttgagcgagagcacgcgttcttcgccatagtagcttggcttgatgagttggtcctctgcaccgctccgcatctggcatcaggctggcgcgctaatttattgcaacgccaatactttcagacctcgattggcggcgaaatattctttgatcgattgagcgaattgcaagttgagcaccagcaggcacgaacagtttttttgttttgtttgcaaaacggtttctacggtaaatatagtcacgctaaagatcatcatgaactggcccaaatggtcgaaacccagcgacagttttgcctgccgcaagagtggcaagattggccaaacgatgcggatctcacaccggtgagattcaataaacgcgtattaataacctcaaaacggaatgtggtgtttgctgctctgagcttgtcagggatttacgccattttattgcttcttcagaccctttattttttataa

SEQ ID NO: 386197 - DNA, 1377 bp, Salmonella enterica
atgtatcctgaacagcagcagatttactggtattccggtttatacctgcagccacagcattttcagtccatggatctccaccatagctacatgctggcgcaacagcgccaattagcacaaccgtggaatgtaggggtgatcaaatgcgatatcaatcagcaaacactaattgatttttcactcaatattgacaaactgcgggtgctccttccctctggcgattacctcgaatacccggggaattgctatatagaaccccggcagttccgcgatgcctggaagcagcgtgaaaaaccattcacagtatggcttgcgctccgccgttttaatcccggtcattgcaacgttggcaacggaaccagtagtcgatggatcaaccacgcagatagcggaactatgaaggatgtttatcacaaagggccagaaagtgtagtgccgcgtatcacttttaacgtccgtatcctgagtgacgaagagaaacaagccgcagtggattgtgagtgcctgcccctgctgcaattacgctatgacaatgacgaggtgattctcgacccacaatttagcccgcctgcggtcatgctttgcgggtcgcccacgcttaaaaagatgctggaaggcatacgtgccgaactgaactgccgggcccgcaagcttgaagagtacaaacgtcccgaaaggctcaataatactaataaaagcagtggcgatataatccaaattctgacaatgcgatcactcaatcgtaccttgcctcttctggaacattactgccgcacccccaccattcatccatggcaaatatatggcctgttggtgcaatttgtgggggagatatcatcctttagtgaaagatgctgtttcaccggtgaatggaacgatggaacgacaccactgctgcattacgatcactacaatttgatcggctgtttcagcagcgccaaaaaaacgctgatcgccttactcaatgacctggctctggacgacaacacatatattagcctagaaccggacgaacaaaggatttatcgcggcgaactaatgcacggcaatctccactcctcacacgaagtgttgctgctgttacggtcggaaaaattggtgccaatgaaccagatgattgccactggcagtgaatttaaaattgccccacaagccgctattagtgggcttattcagcatgccttacccgggatttcctcgacccttgtcgacggttcacctcgcggcgtacccaaccgccaagattcctgctacttcatactcaatcagtatgaagagatgtggaaaaacgttgagcacgataaaaacattgccttttactgggcggatgcacctagcgacttacaggtgcaacttgtatttgtggagccgtcataa

SEQ ID NO: 386198 - DNA, 639 bp, Salmonella enterica
gtgaaagtcacttgctacgcgatagtattagccgcagctggcgcaatgttgggcggctgttcaagcgaccaatcactcctggctgataccaagcaacaggtggttgagcatgttgcagctccctttgcccagagcgcgatcactctcaacataaccgcagaacctggacttaacagctggaacgacattgccagcagttgcactgttcttgtcattcaggcgcaaaaggccagttcgcttaataggattatgtcaaatcccgcgcagctaaaaagcctctatcatggcacgggagctgaagacaatatcctgaaggtggaccgttacaccatgatgcctggcaagcggaccacactgcacattgatcgaagtgagcatacccgcaatgtggccattgttgccggttattatcccttccccaaaaaacagcatatggcgttaatcaccatccccgtaacgctggacagtagcggttggtggtcaaaatcgtggtccgccaaactctctccgatcattatcgatctcacgcttggtagtcatagcattagccatttgtctcattattcaacgcaagcgccagaccagactcatgcggctcaacccgtaacggacggcaagctcacgcagggagaagaatag

SEQ ID NO: 386199 - DNA, 1086 bp, Salmonella enterica
atgtcaacaatgccacctgaaatcgctgctctgttgaagcccttcagcccgggaaatccggcgggaatcaatctggagtatgagcaaatttatgacgacatccgccaggctcgggagagtgaccctgattatttacccgaagatgaatggtcaatatcagaacctcgccgggctgactggaacaaagtcagaacactgtgcgttaccgccctttcacaacaaagcaaagatttgcagcttggatgctggctggttgaatccctgacccatttacagggtgtcgaagggacggaaatgggccttggtttcttaaccgaatttattacctccttctggttgcagtgctggccactgcctgaagatgaggattccgccgacttccgctacggtaaacttattcgtcttgatcgggatattagccttgcgttatacagccatccattgcttggagttccagaatctacgttggcacattggcataaggtcctggctttcgagcacagcgtttctatgaagccggatttgctgaatgatttaattgccaaagatggggatctcagcgtggcaaccttcgatacgcttgccgcacagttttcttccatcgaaatcagcctgcgggcagattgccttgaacgtctgcaacatcagctcgaccgactggaagcctgctatttctcattaagtcagaaatcggcacatgccctgtttgctcagacacgccagactctgactaacattgcggattttctgcaacgcctttcgcaacgcgccatcccctgtggttacgaatctgacaatcttcactttcctggggcggtcggcgaagaatacgcgatgtttgaaacgcaggaaaaagggccgataccgaaccgagaagacatattcactagagagcgagccattagccaaatgctgtctattgcccactttttccgccaatccgaaccctcaagcccggtccccttcctgatggagcgcgctgcacgctgggcgaacatgacgctcactgagtggctggaagagatgctgacagacagcaatagtctgtgtgaaatcaataacgtgttaaagggacagcaacagtga

SEQ ID NO: 386200 - DNA, 300 bp, Salmonella enterica
atgtcaaaacccgcggcacgtgtcaacgatatgcacgtttgtcccatggtgacacccggcataccgccaattcctcatgtgggcggccccatcctccccccgggggtacccacggtcttaataggtggaatgcctgcggctaccgtaggctccttggctacctgtgttggtcccccggacaccatcgtgatgggctgcttcaaggtactaatctgcaataaaccggcggctcgcatgggcgatagctgcgcccacggcggcaccattgtgatgggctgccccaaagtgcttattaaatag

SEQ ID NO: 386201 - DNA, 468 bp, Salmonella enterica
atgtctgattatgatttttccccagttaaaaccgggcatcaggaagtgcataaaactgatgttcctccgtggatggatgaactggatctttgggttaatcaggccgaaccacgggcgttaagtctgtggctaataggacgattgagaacaattactcactttggcggcttatccctgcttgatgaaatgcaccactggtattcgcaacctgatgaaaaattgcgctggcagatctttcatcatgctgaaagtcagggtttcgacacaccagcgggcgcacttgcactgtcattattttggtcccagggaagcatgagcccggaggggttagcgcctgtatatccggaacctcacctcagtggcgagatgctccgctgcgtgttgctcatgctggcggcgcagagtgctgataacccagcagaaggattccatcatttgctggcgcaatggactaaggagaactcgtaa

SEQ ID NO: 386202 - DNA, 1962 bp, Salmonella enterica
atgttattaacaccccagcttgaagctatacagaaaaagcatttcctacactggaacggtgccgtggcttcagatttattactgctgtcaatcagtgggcaggaaaccatttcgtcccccttctgctataaactacgatcgttgacgatgctcagtgaagaacagattgcggagtggcatggcaaaacgttgtcatgccagattggcgacggtttgcataatattccccagcgctttctccacggggtcgtgacccgcatccagtgcgagcgggatgctaatgatcaaacccagtgtattttccagttggaaccgacactggcgcttcttcagtcgggaaggtctacccgcatctggcaagacataacggtcccggatttggtatgcaaactgcttggtgatcgcaatataaatgaagtcgagacacagctacgaaatagctatcagaaacgcgaatattgtattcagtatcgcgaatccgattttgatttcattagccgtctgctggaagatgaaggcatttactactttttcaggcaccaccaaggacatcaccaaatggtgctggttgatcatgctgatgggcaccaatccgctgacgcgggtacgctaatctggcatccgcaggggcagcgatttactcctggtaccatagataactggtcaatgcattcgaccgttttccctggagaagtaaccctgtctggctacaacatgcaacaagcagaagccatcgtcgacagcattaattctgtcgttaaaaccccagacatcagcaagctaagttttaccgatataagcccacttggagaacgctcatcgctcagcgacaaagcgaagaatcttatggagtctttcgaggctaatgcctcactatacagtgcaactgttaatacccattggctcagttgtggtgaggtgttccatctcagcgatcatcccacggataatggcagttaccgcattcaatcgcttcatcttgaggcctcgaataattttgaaacaggtaccggtgactatcattgtgatattcagtcactgcgacatagcgtgaagtggcgaccagcctacgaccatattccccccgagatcgcgggtgtattaattgccaaagtggtaggccccgcttcggaagagattcacaccgatgagtttggccgtataaaaatccagtttccatgggataccgaaaataaaaatgacgataccagctcctgttgggttcgcgtatcccaaccctggaccggtaacaaatttggctttcagtttattccacgcgtcggcagtgaggtactggtcagttttattcaaggaaaccccgatttccctctggttacgggctcggtttacaacggtcaaaacaaacttccctgccccttgcctggtgagaaaaccgaatcagggctctttactcgcagcacgagtaaaggcggtcaggatgaggggcatcgattgagtttcaacgataaaaaaggggaagaaaaactgactatctccgcgcaaaaagatttgctgctgaccgtaaaaaatgacgttgccagcgaggtgatgcgcgagatgaaaagcaaaattggcgccgatcgttacaccgaaattatcaaaggcaatgatgagctgatccttaaacaaggctcacagtatctcaccctcagcagaggtgacattgagcaaaaaattacaggcaacgtcacaaccaagctaaacaacggcaattattccctgatggcaactggcggcagcggcaagatcaaaacggataagacctgcgttatcgaatccacccagtccattgagcttaaagtcgggaccaacaaaattgttatctcacccactggtatcaccctcagcggcacgatgatcaaaatcaacgggtcgggtaccgctgaattgaagggagcaatgacaacgatacagggaacaggaatgacacagattaaaggtgggatcatcaatattggttaa

SEQ ID NO: 386203 - DNA, 939 bp, Salmonella enterica
atggatttaacctctatcaccagtagatttaatttctaccaacaggttcgaaccctattacacaaactgcgtggagtcgaaggttgtaccacagagacgctcgatagaaagtttcactttgtatctcccctttccctcgatgctcctgcaggtcagattgttagtatcaaacaggaaacacgggatgcgcctctatatgtgaccgttggtcagtatggactaaccggtgcgctaggtgtattgccaaccacctatacggaatggatgatcacccgccaatatcgctatggtgatcacagcgccaaagcttttcttgatatgttcgggcatcgactgtattgcctggattaccttgcctggcagaaaaatcacctatacgcactcgctgaagcacaaacgcaatcccccatagagctggcgacgcttgcactcacaggtttactcacgtcacgatctgtgtctggtggggaaaattatgcccatttgttctcttcacctgtccgttcgctggccaatctggaagtctggcttagccattactacggcgttcccgtgcatatcaccccttttacagggggctggaataacgtcgatcaagatgaatattgccaactgggtaagccagaccaatgtcttgaaacggcaccagtgattggccaagttcgttgggatattcaatcgcactttgatgtcacccttgggccgatggcgcagcaacaatcacagcattttattcctcaggggaaattttatcgggagatatggaaacggattggagaatacattggaccaggccttaaattctccgttcatctcagtgtcacaaatggcagcagtccgactttagcattgggttgtggtcagttagggcttgatatctgtattggtcaacgtgacccagtagctcagcgccttatttacctgccgcaacccgactaa

SEQ ID NO: 386204 - DNA, 1797 bp, Salmonella enterica
atgaataagttactcgcatactatcagaaagaactggtctttttaaaacaacacggtaaagcatttgcccttcgctttcctaaaatttctcgccgccttggtatgattgagggggcgtccgaagatccgcatgttgaacgtatgatagaatcctttgcgttcctgacgtcacgcattcaccagcggttagacgacgacatgccagaacttactgaggcgctgcttaccgccatcgccccacaatttttgcgagtgatgccatctacttgtattgtctcgattagcccccatcatcaggctagtggtattactgataaaaatatcatcgcagctggcgcttctttattcacaaagaatatcaaagaagcacaatgccagtttcatacggtctatcccgttacgcttttacccctctctgtcgagcaggcatatctgggctttaatgaagaagatcttaattggtatcttgacctctgctttcaagtctggtctggtgctagggtatcggatgagaacctgcgcctttatttgcatgggccgagcaatgcgattaacatactttacactctactttgttccgaaatttctcaattaagtgttcatctgaatgataaatgttatccattgaaaaatggttcaataacgccagttggattcaatcgtcaagagggactattgacccaggatccacgggtagctcctattcatgtgttattgcaggactatttttcatttccgcaaaaattctattttattgatataaaactaccgcaggatttctacgccacagccaattcggcgtttaaaattcaggtagtttttaaccaaacacatttgaataatcacctagaaaagctggctaagatcatcgatgcctccttttttcgactgcactgcaccccagcaattaatctgtttactcaacaggcagagccgatcgcgttaaatgaaaacaccgctgaataccctatcatttctgatatccgccgccagaagcaagtagatgtttgggccatcaaccatgtttttattcagtgcaatgatcaaagtgaccagagaaaactgcctgttcaaccgttatttggcattgaccattcgcgcattgagggtgattctggaatttactggcagagttttcagcgccaaaccatcaatgctgatgggactgaaaataagaagtttatcgcctttgcttatcgcagccatgaaattgccgaatcactgtctggccgggtttctctcaacgtaacctgcactaaccattcgatcccgagtgagatgaaaaacggttatgctaacggcgattttgattcagatttgccgctagcgggccttaaaataacggcgctcaaccggcctaccaggcccatccagccacccgataaaagtgccgtgcgttggcgcttgatttctcagctctccctgaaccatatgctgcttagcggcagccagggcgtacacgtgcttcgtgaaactctgatgttgtataacgtccacgattcaccatcaatcactcgtatcgtcaacatgatcctgcatctagatgtggagccgatcaccactcgtctggttgcaaatgatccgcagacaattgcgcgcggcattgcgctgacactgacatttagccatgacgcactgaatgagcctgaatactttttattgtgttgtttcctcgatcactttctcgggctgtatgcaccggttaacagcttcacccgtgtgaccacgatgattgagaatgaagaacatacgcgccgagtctggccggtgcgagcaggtaagctgtcatggatttaa

SEQ ID NO: 386205 - DNA, 420 bp, Salmonella enterica
atgatgccatctttattactccgtttgtgtgatgacttcccattagacgaggaggaactttacctagcgggtaaagacaaagactggatactcagtgagcttgatatgctttttacttctcgcccacgtttttcatatcttgaaacgctgccattagtaaatacatccgttttaaacttcggtatcaatgaatcattattaccggattatgatgtcgaagaccggaaaaaaatcattgcagagcgtattaagaatacgctaaagcgctttgagccaagattaactgacgtgacgatcattataaaagcagacaaccccgatcacgttatttttgaaataaacgcattgcaccaggaattacccatgaaatttgaactgatttgggatgactgtaccgggaaattttatctagatgaataa

SEQ ID NO: 386206 - DNA, 483 bp, Salmonella enterica
atggcaaagttaaatgactgccaatttattaaaatcactatcgatggaaaagatattgctggttcctctgtggagactacttataaaggttggatggaaggatatgcccctgccggattgatgacctattccggtgccgatggtacatatttcgagccaggtaatgttgccatccaagcgactaaagaaactagtgcgctgtatgagcattatttgaagcgtggctataaaaaaatcacagtaacgatagttcatcgtggttccgatcagttcgataaagattatgaaatccaacgcgctgtttataatggatgtaagtttaatagcttaagtttcgacatgcgtgaaaagttatttatgaatttatccttctccttcgagggcatggtggaagtaaccttcaatgttcctaatgctcaggaaacgggacttgataagatcggcccaattaagtacgacatcccagaaaaaacactcaagtaa

SEQ ID NO: 386207 - DNA, 1482 bp, Salmonella enterica
atgagtgctgaactaaacatcacggctcctgccccggaggcattgagcgatgattatctggacaccatcatcgataacacccaagccattcgccgcgagtctgaccgcggccgaatgaggattcagctccataattttcttgccgaagtggtctccggcgcagtggtgatctccagcgacctcattggcagcattgaagagcgtattaaagccattgatacgctactttctagccaaatcagtttgatcatgcatgcgcctgaatttcagaaacgggaagcttcatggctgggcctacacaaattagttgcagccagtgtcaccgaaaatacgcaaatccgcctgcttcaatgcaccaagcaggatctgatcaaagactttaaatctgcctctgattttgatcagtcaatgctgtttaaatgtgtctatgaaagcgaatatggcactttcggtggtgttccattttccgcttttgtcggagatttccagtttgacaacaccccgcaggatattgatctgctcgagcaaatatctcatgtggccgcggctgctcacgcaccttttttaagtgccatcgcaccaggtatgctatcgatgaatgacttctccgatatgccacgaccacgggatttggcaaaaatgttcgacaccacggactatgcacgctggcgttcattccgtcaggcagatgacagccgctatatcggtttgacgctgcctgcggtgcttggtcgtatgccatacggtgcaaaaactattccagttgaaagtttcggctttgaagaaaaaattcgtgagagtgaaattggcgttgattatttgtggatcaatgctgcttacgaattggctggccgcatagtgaactctttcgaggaatacggctggtgcgcctccatccggggtgtagaaggtggaggtctggttaatgcccttcccgcctacaactatgtgtctgaaagtggcgagcgtataatgcaatgtccgacgcaggtggctatctccgatcgtcgagagaaagagttgtctgatttgggctttattccgctggtatattgtaaaggtacagattatgcggcctttttcgctgtgcaatcggtcaataagccacgcctatataactcagatcaggccaatgcaaatgctaggttatccagccaattacaatatatattggctacttcacgctttgcgcattatctgaaatctattgttcgcgataaagtcggtagttttatgtcgcgcaacgaatgtgaagaatatttgcagaaatggattatgcaatatgtagtagcatcagataatgcagggcctgaaaccaaggctcgctatcccctacgtgaagccagcgtcaaagtcgtcgaggtgccaggttttcctggttcttaccgcgccgttgcttatttaaaaccccacttccaattggaaggtttgagtatgtcactccgcctagttgcagatttacctgcagcggcaggtgcttaa

SEQ ID NO: 386208 - DNA, 489 bp, Salmonella enterica
atgagtaacactcaacataaacttgataaagcacgtcctcctcgggtgcagattacctatgatgttgatatcggtgatgcccaggcggtaaaagaacttccattagttattggcgtaatgggcgattttactaatagccataatactttgcgtgaacgtaaatttattaatattgataaagacaacttcgccgaaatcatgtcgtcaatgaagccggagtcagagtttcttgtagaaagcacgttgccagatcatactggtaatcttgccatctctttagcctttaacagcattgatgatttctctccagatagtattgctcgccaagttgaacctctacgtaacttgattgaattacgtgaacagttgtgcgatctgcgtaatcgcgcagccagtaacgaacgcctaaaagagcagctttcagaactgttgcaacagcataattttgcaccttccagcgagagtaaaaacccgggagaagatgaatga

SEQ ID NO: 386209 - DNA, 813 bp, Salmonella enterica
atgaaaatctttggtaaaaaatttaactccaatatattttcaagcaacaatggaagccataaaagcattttgccattatgggcgttcttgcatgagaatactataaaagcatgttccaaatacacccccggggtagtatccgatgctagtaaattagcttcggcgaaatttatagtacacactattcgcgactttcaagaagaatcgcccttgctcactagagaagcggaaagcttgttttcagaatgggatgtaatcagtacatctttaattaaatcaggtgaatacaacaaaacacaatgggcggatgtcggcttaattcttgctgtccctcctcaaaatataatttcaacatttcaacgggatgtcggttttaaaaatcatgcaggagttcagtctggaagagtagttaactcatatgcattggcggatagttattttaggggcgaagcaaaaggcgggcacaagattccaggtggcacatatgcggtgctggatacgcctgagaatattcttcgaaccactccctgtggtcagcataatgagatattggttgttggaaaatcgggtgtaaggatatatgaggattttcctgctactcaaaaaataagagtttgcggaatatattatcatttgtgtgttgatagaagcaaaaggcgtcaggatgagatttcacacagtaaaaatcttaggcttattaatgcactattaagcgtaaacccaacattaccagtgttaaaggaaatcacttatgtcgggaatatcccattaggaggtgaggctaatgtactatcttatataaggaagttttaa

SEQ ID NO: 386210 - DNA, 705 bp, Salmonella enterica
atgtcaacagaattcaaccatcgtttaataagtgcaactcgagatgttttaagtcgatacttcttgaccgctgtccgttatccaggacagtgtgatggtttaacggcttttgacctcaacgatcactcagtcatgaataatcacgtggttacgctggatgccgccgttgtcgggaggtcataccctctaatgggattctgggtaccacagggagggtcttgtgtaatacccgcgaatccaggaacacagagctttgtatttactcctgatttcagcggttgctccatcttggtcgatcagattgacgctaatcagtatatggtataccacgtacagggtggttcgaattacctccagaaagaatatcgcggtgcttacaataggcacgggctcggcttggctgcttcgatgattttcgacgattatggtgatgcaccaaagcctcgcggttttgcatttctgaaatatgaaaacggacggtggtggatttactaccagcgtcataatggtataggaattaactacagcaaaggacgcttccacactatgggtcctcaaaccgtacgtggtggcggccgcatacccgttgcagatctaacttccgaggttcctcgtattaatggacgtcacagtggacaacatttacctgttacccggaatatccaggtggcgcaacggatgctacccaatgatgaaatttggtaa

SEQ ID NO: 386211 - DNA, 387 bp, Salmonella enterica
atgaaagatactttgaagtatgagtttcaccacttcggaatcccattgcaggatgggaaagaggaaggaacgttcagtgaaaaggcggggatgtacaccgctgacaaccccggaaagttccgcgtccagtggcatcgctttacagatgattctccgttgcatgttctcttgaagaccatgcctcacgtcgccttcaaagtagacaacctagaagaagcggtaaggggcgaggaaataattcttgggccatatgagccaattgatgaatattttgtcgctgtcatcaacgatgctggcgtcccgattgaacttatccaaacttcgctatccgatgatgagttgtgggggcgagcgcgagcaggaaagggcagcttgtatcgcaaatag

SEQ ID NO: 386212 - DNA, 987 bp, Salmonella enterica
atgtccgtatcacatgtaattaaggccgctgtaagcggtcttctcctcctggctgttgaccaggctctagccgctccccaggatttgccgattaaatccattagtgtaccggcttataatatgatcaccgactccttacaggctatcgcaccgaccattgacggcaagctcaatgattttgccatgcagctaatttgtgcacttgcgcgtggggataaaagccagcaggaagtcgatacattgttaaagcagcagggtgttgatgccacgaaattgccaaaaaatggcagcgtggtctctctgctaattaacggccataaagaacagcagcaaatgacctgcgcagtgtatctggcgacgtcgttatttgagccggtaaataacggaatctatttatctaaacaacaggctggcgctaaagctggtaaagagaaaaaattccccgactggaatttctggaaatcagacaagaaagaagaacccacttcgcaaacggaacaggtggtgtttaatcaaacccagtttttgaacgatgcgcagttcaaaatggctgttgtacaggctaccgcgcaaatgtatgcgataatcgctgaaaatattcagggtgagaaaaacacatactgggcagattatcagcggcgaattgccagtattgtttataattacgcaccggaatatctgcgtaaaatctcgattttttataagagtggtgtagcgaaaccgttaataccggtaaacgtatccctgaatagttttaccgtagctaacgaagcgggggatgtgctaacccagcaaccgggcattgtaatgttcacatccaaaggggttccgtggtttggtagtggtaaaatattaggtaaagaatatttttctgatgttatggtgattaatgatgctcaggctaaagtccaaccacagactgcatcggaagaaaatgataaagaaccccccgtcatgaatagcaagaaaagcagtaacaaaaagtaa

SEQ ID NO: 386213 - DNA, 798 bp, Salmonella enterica
atgaattattttaaatcagctcgtgtggcactggttgtaggtggcatgacgttattatcagcttgtactcactctattagcgatgtggattccaagggcaaaaccgccaacccggtattccccaaagaatccagcgcagtcagagacgagggcagtttcgttaaccttgataacctgaaacaaatgcgtcccggtttgaccaaagcccaggtctacgagttgattggtgtgccgcactttaaagagggcgcgattcgtgtgaaagagtgggattatattttccatttcactcaacaggacaaaaccgtattaacctgtcagtataaagtgttatttgatactgatatgacagcacagagtttctatttaatgccggaagattgcctgtcacgtctgaaagcgccagtcgcacctcaggttcacaaagaactgagcggctcaagcctatttgcctttgccagcgcggcactgagcgcggaaggtgtttcgcaagtaacccagctggcgaatgaactgaaaagcgaatcactggaaggtaaacacgttgtggtaacgggtcataccgatcgcatcggcaatccgatgaaaaatcagcagctgtctttagcccgtgccgaatccgttaaagatatgctagttcagagcggcattccggttgcaattattgaaactcgcggaatgggtgatgcaatgccgcgcatcaattgcccaggcaaaaaatcttcggctgtaattgagtgtctggcacctaaccgccgtatgacgcttgatgtagtagatattaattcaggtaaataa

SEQ ID NO: 386214 - DNA, 5379 bp, Salmonella enterica
atgaataaaatttatcggattgtctggaaccctgctttgcaggcatgggttgcggtcagtgagtttgcgaaagtgaaagggaaaaacagccagacgcgtctgaaagctacagcggctgggttggttggcgcgatagtgttggcgatgattcccgttgaggatactcgagcgtggatggtggctcctgcgaatgtaataaacggtggagaaggcacagatgatggcggatcaacatttaacgtggctattggtaatgatagtgtggctaatgcgacttcaggaatgaatcagggcattgttgcaataggttctaatgccaaagcaacacagcaaaatgcgcttgcattaggcgaacattcaaacgttgaaggtggaggaagtacagctattggagctgaagctaaagttataggtataagttctttgaactcactcgcaattggtacgcactcttcagttctgaatgcaccccgagcgttagctattggggctggtgcgagtgtaagtggtgacagttctagtgctatcggtgccaatgcctttgcaaacggtattggtgccatgtctattggtaggtttgccagtgcaacagcggataatgcagttgctattggatctcaaaacttagcaagcggtatttcttcacttgcaataggggatgaatccgttgcgtctggtacgaacagcattgctcagggctttagtgcgcaagctacaggtagtaatgcattatcgatcggttcaaactccctcgcttctgccaatacaagtatggctcttggcgttaacgctcaggcaagccaaatcggtggtcttgcattaggtagcgaatccaatgcggacacagcttcaggaatagttggctattccccttccagtgcgcctgatgcagcgaaaactcggattaacggaacagtaagtacgcgtgcggcagtttcaattggtgatagcactgcgggcgttcgccgtcagattaccgatctggctgccggtacagcagatactgatgcagttaacgttgctcagttgaaaggactggaagaaactccactaacctttgcaggcaacaccggcaacgtggccaagaccctgggcagcacagtgaccattaagggcggcaaaaccacagcggggatctactccgacaagaatactaacaccgtggtggacgcatccggtaacttgggaattgagattgccgagaacccggaatttgtctccatactggcaaaatctggtaccagcactaccaccctggattctaacagcgtcaccatctccggtggtccgtctatgaccagagccgggggcattgatgccgccagtatgaagatcaaaaacgtacaagccggtacggctgacaccgacgcggttaatgtttcccagcttaaatcgtcaacagacgctgtcaaaactcattactacagtgtcaatgatggcggcgcgatcgctggaaactatgacaacgatggcgcgactgggctgaactccatggccgcaggggtgggggccaagtctcaagcgcagtcgtccctggcaatgggcacaaatgcgacggcaactggcgaatccagtatcgcgaccgggttgcgtgccagcactcaggggattaacagcatcgcgttaggggtagatgccagtaccactaatccaaccagcaccggcgcggtggcgattggttgggaagcgctggctgaaaataccgatgcgactgcactcggcgcgggtgctaaagcgcaaaaagcgggcagtactgcaattggcccatttgccagtgcagaaggtgacagcagcattgcgttgggcgatcgtgctaccactatgagtgaaaacggcatcgcgctgggttcttttagtaaagcggtaagctccggctcgctggcacttggcaaaaatacggttgcaaatcatgacgatgacgttgcgctaggctccaactcggtcactgactcagcggtcgctacctctggcaccaccattgccggtgaagattacatctttgcaggcatcactccgctaagcaccgtttcagtgggcagcgtgggtaaagaacgcactatcaccaacgtggcagcgggtcgtatttccgcttcaagcaccgatgccattaatggctcgcagctgttcgctagcaattcagctatcaataagctggatgagggcgctgtgaaatatgacgtgatcactaacccagacggcagcaccacggtgaattacaacagcgtgacgctgggtggcgacacctacaacagcaccaccaaaaccggtggtacgcgtatcaagaacgtggcctacggcgtggatggcggcgatgcggtgaacgtcgatcagctgaacgaaaccgttgatggcgcgaaaacccattattacagcgttaacgatattggcgttgcaggcggtaacttcaacaacgacggcgctacgggtcaaaattcactcgctgcgggcgttaataccacagcggcaggcgatgatagtgtggctgtgggttataaagcgaatgccgcaggcgctcaagcgacagccattggcgcgaacagttctgccagcggtgaaaaaaccatggcgcttggaaacgacagcactgctaacggctatgttgctaccgccatcggccaggccagcaaagctgccggtgactattcattagcattaggcgcaaacagccaggcgttgaatatctctacggtagcgattggtcaggaaagtatggcatcttctgactttgctaccgcgattggcgcaaacagccgggcaacacaatttgctgccacggcgatgggccaaaatgctcgggcgcttgagcaatttactgcggcctttggttctggcgcggttgcatctggattaggcggcgtttcctttggcgcaaattcgctggcttcaggtgtacgtgcgacagccatcggcgctgatgcggaagcgatcgcagattatagtcttgcagtggggcaaggcgcgcaggcgtcgatcgctgacggcgtggcattgggttcaggatctgttgctgacaccgctgcgggcaaagccggttatttacctgttggcttgtcagacgcggcggtaatggcgattaacgcgacaaccagcaccctgggcgcagtgagcgtgggcgatgccactaatggtaagttccgtcaaattacaggcgtcgcagcgggcacagcagattctgacgcggttaacgtcgcacagctgtcagccgtttcgcaggcaaacagcgatctcaacgatcgtgctgttcaatatgacgtggtcaccaacccggacggcagcaccacagtgaattacaacagcgtgaccctgggtggtgacacctataacagcaccaccaaaatcggcggtacccgcattacgaatgtagcgcgtggcgtggatgatagcgatgcggtgaatatgtcgcagctgaatgagactaacgcgagtgtcaccaacatcaccaatacggttaataactttgccggcgatcagagcgacagctacaccgagattaatggtcggggtattcgctatgtgcgtaccaacgatgcaggtctggcgcaggctgatgcctatgccaacggtcagggcagcacggcagtaggttacaacgcgcgttcaaccggtctggacagtctggcgctgggtcgcgatgcgcagtcaatcaatgatggcgatgtggcgctgggttccggctcgatcacagaagcgacagtggcaaccaccggtacacgtatcaacgatgtcgattatgacttcgcgggcattaatccgctgagtactgtgtcagtaggcagccgtggtaaggaacgcaccatcaccaacgtggcggcgggccgtctgtctgcgagcagcaccgacgcggtgaacggttcacagttattcgcgaccaattcagcaataaatggtctggataaaggcgcggtgaaatatgatatcaacgatgatggcaccgtgaactacaaccacatcacgctgggcggtgatacctataacagcaccaccaaaactggcggaacccgaatttccaacgtttcgtatggtgttgatccgagtgatgcggtgaacgtccagcaacttacggatgctacaaccaatatttacaacaatgggacgaagtacttccacgccaaatcagataaagcagattccgtggcaagcggtgtagactctatcgccgttggcccgaacgcccaatcaatgggcgacggttctatcgcgatgggtgatgaagcgaaatccatgggtaaaagcagtgcggcgattggtcagggtgctcaaaccctcggtgacaacagcgtggccatgggtagtggggctattgctagcaatgctaacgatgtggctctgggcgcaggctcggtcactcaggcggcagttgccaccttcagcgtaaccattaacggtgatacctatgctgtagcgggtaataacccaaccagcacagtgagcgtgggtagcgaaggtaacggacgcactatcactaatgtcgcggcaggccgtattacggctgacagcaccgacgcggtgaacggttcagaattgtatgcgaccaaccaggcgattgagaaaatctccggtgatgtgatcaacctggatgccggcagcgtgaaatatgaggttaactctgacggcaccgtgaactacaacaaagtcattatgggcggggatacctacgacaactccacccatactggcggtacgaccatcactaatgttgcaaatggcgtagctccgagcgatgccgtgaacaagtatcagctggatcaggttgatcaacatgtgaccaatatctctaacggtactgatggtatgttccaggtgaataacaccagcaacctgccgaaaccaaagccgaccggcaaagattctactgccggtggcgcaggagcggtagccaccggggattacagtacctccattggagctaactcgaaggcaacccacagcaattcagttgcgctgggttacaactcagtgaccgatcgtgataacagcgtttctgtcggctctgccggacatgaacgtcaaattacgaacgttgctgcaggtacggctgacaccgatgccgcgaacgttggccaactgaaacagggtataaacaactcttatcagtacaccaacaataaattcaacgatcttaaaaatatggtcgatgaccagaaagataagttgagcgcggggattgccggtgctatggcgatggctggcttgccgcagccataccagccgggcgccagcatggttggcctggctggcggtacctatcagggtgagtctgcgattgcgctgggtgtatccactatctccgataacggtaagtgggtaacgaagatatctggtaccactaacagccagggcgatgtcggcgcagctgttggcgtaggttaccagttctaa

SEQ ID NO: 386215 - DNA, 804 bp, Salmonella enterica
atgaatggtttaactatcattagtgataactcttatacacaaatagccattgctaatttagctacccagtttagtagccgatgttgcatggaaggtaagttggctatttttacgtttgaaaaaaattggttaagctgcaacgagtttcagtttattttaaattgtcgcgctaatcgagttttaatactaatgaaaaaatgttcattgctttacatagcagaaatgcctgtttcagacagattttactttgtagactatgaagcctcagttgtttcattaactaagatactagctcaattttttcttgaaaaaaaaacccagcgtttttttgggttaaatcacagtagaaaaataaatataacaataacaaaaagagagcaccaaataatattactctacgccaatgggtttgctatcaagcagatagcggacgcattagctttaaatatcaaaactgtctattcacacaaactaaaagcgatgacaaaaatgaacatttcaaacaatgctgaattagttagacgaaaatgggaggtgttattcatatatcaattaaacctattgatagatggatgcatattcccggcggcctcatttcttaatgccaacgttgtgccactgaaagatgcacggacgaaagcaaccatctttgccggaggatacctgcaaaacgttaagcatagcgcgcccgcaaaacaactgtttaacgacaatctcaacaagcttaatagcgtctcgcttgaacgaccgtctatcgatcgcgaatgcgcctcgttaaacaagcttacccatcatagtaattaa

SEQ ID NO: 386216 - DNA, 651 bp, Salmonella enterica
atgaataagaaacctgacacctcatcactcataaaactaaagcctcatgaacatattgaggaaattatccagaaaatcacccctttcgcggagcaatttattgcatcacgaggtgatgtgttgcaatataatattgctagaaaacatcagtgttatcttttacacagtggtagcatcacacttaaccgtcgcggagatggtatggtgctgaacaaagaaaatgctccatttatcttgggggtaagcaatcagtacactacgacaagcactctgtatgtgaaggtaatggaaaactccctcctcagtcgactgtcagtggaacgatttaacttactgaccgaaagttataacctgtggcagaacctttgcttcctgctgatttataacgcagcaagagtttacgaacacagtacgatcatttcccaaatgtcttcctatgatgtgatacgttttcagttaaacgagctaatctctgagcctgacgagatcaggcttaatacgacggcatcaacatatatccttggacggacttacttgtcccgtagctgggtcatgcggatcctgtccgctctgaaaaatgagggacacattactctacataggggcatcctcgtgaagataaccgcccttccagactcgctccaagtttaa

SEQ ID NO: 386217 - DNA, 648 bp, Salmonella enterica
atgaaatatttcactgaagcttctgaaagaaatgaaaacggcaatccgtacgcaaaaattattgttgaggcactgaggccagttgctgaaatcataaatatcgtcccacgaagaaacctctccctatatataaataatgttcagtattgctatctgttactaaatggtaatttcggtatttatcgtaaaaacgataatcgcatggtagctgttgtttattgcccgaacatttttggcgttgccgggatggtggccggtcagtccggaatatatattaaagcccttacatccgccaccgtaggaaaaatttctttaaatgttgttgagcatacaattgaggcgctggagttgtggaaaccgctctccctgtatatgatgagcctatcaagtaaactttatatttatggtgagaaactttctgccacgacagcatatgaaattatttgcctgcaactgaacgagttaatgaatgaaaaaaaatttttccgggaaggaattactgcggaaagatatattagggataaaacgaacctttcccgcagcagaattatgaaaattttgtcaggacttaggcagggtggcttcatagaaatacatagaggagttcttgtaaatatctccgctttgccttcaaaaataaaaaattga

SEQ ID NO: 386218 - DNA, 471 bp, Salmonella enterica
atgtctatcatgaaaacactacaaacgggcgacaggccaaccagtctggcgcaggctatagccgaaataggccgcgctgataaaactatccatatgctgacttacctcgacgatgaaaacaaacgtcgaagaacgttgcaacagctcaaccgtggagagggtcgccacgcagtggccagaaatgtctttcatggtaagcggggagagctgagacaggcttaccgtgaaggccaggaagatcagcttggatcgttaggtctggtgctcaatattattgttctgtggaacacgatttacatggatgcagcaattcagcagctaagacgtgagggttatccggttctggattcagacgttgagaaactttcaccattacagtgtgggcatatcaatatgcaggggcgctattcatttacagtgccggaatccgtcagtaagggagagctgagagcgttcaatgaagatgcataa

SEQ ID NO: 386219 - DNA, 258 bp, Salmonella enterica
atgcaccatattaaaggtgaagagctcatatccctgcaaaatgaaaccaatgtgttcgatggcctgcgtataaccggttttttttttatgactggcggtgaattcccactcttcgcgcagaatgaccgccctttctttttcccgttcggtatcccaggcaccgaagatgacaaactgctcatcatggggtccgcttggaaaacgggaaatatcctacttgaaggccgtttcttaagcagacatgacaggcagctctga

SEQ ID NO: 386220 - DNA, 855 bp, Salmonella enterica
atgaagaaaacagagttggccactaaagaagaagttgtatggtttgaaaaaactgtggagtacaaatttattaccgattgcttagaaaaacgaattattgaaagcataatgcctctaagtggctttcgagaacaggtgggtgatacaattacagtattacgagatgccttcaaaaaattcaagttttatattattgagtttaaaaaagatcttggggaatcagggtttaaactagaggtcaatgaaaaattcattacacaattagcaggctacaatgctgctaaaacttgttttaatgacgataaagacaaccctttgattaaagggcattattttatcggcgcccagtataaagaaaataaatttcaattaattataagggattacttcgaacctaacaggaaagttcgcaagacattagatgaggcgttttcttcaaaagctggaatgacgcaagaggagttcgcactttatgtaaaccgtttcacgtctcataaaaaaactaataaatgctataagtgtccaagttcaggcaatggaggttccactgttacatctcctgctggacctaatcccagagggagctttggggtgaatgtagaaaaggatataagtgtggtgattgcaataaaccctgataataaagaatgcataacatttccattaacattggtgcagttaactgatggattgggagggttaccagtaattaatatttctccggatgtcggtggaggcggtggtgacgaagttgtcgtacatactgaagtcatcatcactcatcctcattactttgaccctgagttgggcgagttttcacgtccagatgatataaaagaagaaataactagctag

SEQ ID NO: 386221 - DNA, 282 bp, Salmonella enterica
atgaccctgaagaacagggagaaaacccagctcgttgaagcccttaaggaaacgtatcccgttgctgagttactgaacgttctgcaacttgcccgcagctgctatttttaccacaaagccagccagcgcctgcatgataagtatgcggaaatacgcgtgatcatagctgatatctttgaagagaattaccgttgttacggctaccggcgtcttcacgcgatccttcgcggtaacaacagggttatttctgagaaggtcgtccgcagactagctcattgttaa

SEQ ID NO: 386222 - DNA, 1251 bp, Salmonella enterica
atggaagaaaattccaacaccaggcattcatccttttggggcattatggttattgctggaaccgtgatcggtggggggatgtttgcattacccgttgatctcgccggcgcttggtttttttggggagcatttatattaataatatcctggttttccatgttgcactcaggattattgttactggaagccaatttaaactaccccgtaggttcaagttttaacaccatcaccaaagatttaattggcaataaatggaatattttcagtggtattaccgtcgcttttgtgctgtatatattgacttatgcctatatatcagccaatggtgcaatcatcagtgaaaccctatccatgcattccggttcgcacgtcaacccaagaatcatcggagtctgtactgcactttttgtcgcagcggttctatggtttagttcactggcggcaagcagaattacctcactatttctcggcattaaaatactcgcgtttgttatcgtctttggttcatttttctttcaggtcgactattcgattttaagcgggaccagtggtgcaagtggagaaagccattcctacttcccttacatttttatggctatcccggtatgtctggcttccttcggttttcacggtaatattcccagtctgatcatctgctatggtaagaaaaaagataaattaataaaaagtatcgtgctgggttcctctcttgccctggttatctatctcttctggttgtactgtacgatgggtaacattcctcgcgaaaacttcaaagggatcattgcttccggagggaacgttgacgccctggtcagttcattcctggggactaatcagagtggcatgattgagttttgcctgctggtattctcaaatctggctgtcgccagttcattttttggcgtcactctgggcttgtttgatttccttgccgatttatttaaatttgataactcgcacacaggccgttttaaaaccgttctactgactttcttgccaccgacgctcctgtatctgattttcccgaatggatttatttacggcattggcggtgccgggctatgcgcaaccatctgggcggtcattatccctgctattctggcacttaaatcacgacagaaattccctgaccagatctttaccgtttggggcggacgctttattccgaccatggtgattacatttggtattgttgtgatattgtgctggtttggaaacgtctttaatattttaccaaaactgggttaa

SEQ ID NO: 386223 - DNA, 1416 bp, Salmonella enterica
atgaataacttcaaacatttaccagaaccattccgtattcgtgttattgaacccgtaaaacgtacaacacgaaaacatcgtgaagaggctatcattaaatccgggatgaacccgttcctgctcgacagcgaagatgttttcatcgatttactgacggatagcggaacgggagcggtcacccagaatatgcaggcagcgatgttacgaggagatgaggcgtatagtggaagccgcagctattatgcacttgccgatgcggtaaaaaatatttttggctaccagcatactattccgactcaccagggacgcggagccgagcaaatttatattccggttttaatccgcaagcgtgagcaggaaaaaggtctcgacagagctaaaatggcggtattctccaactatttcttcgatacaactcagggacacagtcagataaacggatgtacggttcgaaatgtttatattaaagaagcctttgacacatctgtacgtcacgattttaaaggtgattttgatcttgataagctggaagaaggtattcaggaagttggcgccaataacatcccttatattgtagccaccatcacctgcaactctgctggcggtcaacctgtttccctggcaaacctgaaagccatgtatcagattgcgaaaaaatacgatattcccgtcgtcatggattccgctcgctttgctgaaaacgcttattttatccagcaaagggaaccagggtatcaggactggagtatcgaagagatcactcgcgagtcgtataagtatgccgatatgctggcaatgtcagcgaaaaaggacgcgatggtgccaatgggcggattgctgtgcatcaaggatgacagctacttggatgtttataccgagtgcagaacactctgtgtgctccaggaaggtttcccaacctacggcggtctggaaggcggagccatggaacgccttgcagtaggacttaaagatggcatgaatcaggactggctggcctatcgtattgcccagatcgagtatctggttgatggtcttgaagccattggcgtaacctgccaacaggctgggggacatgctgcttttgttgatgcaggaaagttactgcctcacattccggcagagcagttcccggcgcaggcactggcgtgtgagttatacaaagttgcaggtattcgggcggtggaaattggttcattcttactgggcagagatcctaaaaccggcgcgcaattaccttgcccggcggaactgctccgtttaactattccacgagcaacctatacccagacgcatatggattttattattgaagccttcagccatgtgaaagaaaatgccagcaacatcaagggactaactttcacttatgagcctaaagtgttacgccactttaccgctcgcctgaaagaaatctga

SEQ ID NO: 386224 - DNA, 1032 bp, Salmonella enterica
gtgtcggcgggtgtgggtagcaataataatcttcaacactggagtcagttgacggccgaagaccagattcgtttctggcaaagtgtcgatcaaggggatatgtcctcttttttggttacaccagagaagaaaagtacacgccgccgtcgcggagagcactccaccaaacccaaatgtgaaaatccatcatggtttcgtcccgcgcattataaagcgcttggaggccagcttggccatgcctataaccgtctggtgaaaaaagaccctgtcacaggacggtatagtctgcgtatgcatatgtccctgcatcccttttatgtccgcgaacggcagcgggccggtcgtaagtatgccttccggccggagaaacaacgcctgctcgatgccctgtggcctgtgctggtcagtttctgcgacgcgggcaaacataccgtggggatgtgtgtgtccagactggccagagaactcagcccaaaggatgcaaaagggaatgtcataccggacactgaagtcaccgtctcccgcatttctaatctcatcgccgaacaggtccgatttggcactcttggcgtttctgaagaaaccacctgggaccgtgaatcccgtaaacggctgcccaaatacgtctggataacaaccactggctggcagatgctgggcgtggacctgatgaaactgcaggcacagcagattaagcggctgcgtgagtgcgaggaacgccggcgtcttattgaggaaggtatgctgggtgaggatgaagatatatctgtccatgcagccagaaaacgctggtatctgcagcgcagccaggaagctctgaagttccgcagggagaaaggggcagcacgcaaacgcgccaaccggctggccaaactcccccgggaccgccagatttatgaaatgtcgcgtcacattatgaaaaccctccctccggatgaggcttactggtgttcaccggaacggcttgaacagatggccattcagaacctgtaccagctggaattgtcactggccacgccaccaccacactag

SEQ ID NO: 386225 - DNA, 546 bp, Salmonella enterica
atgaatattgaacaattagagcattatcaatggtttttagctcaatacatcactggaggacgcaacagagaacatctgtttggatggctgactgaacaacgtatcattccgtggacaccactgactatatccctggtcagacgtagcgataagcagtgtggttttcgcaaacggatagacccggttttccccggatacttttttcttaaagcaaattttgaaattcacaacatcacccatattcgtcgccacagcgcgttttgtgactttgtccacgtcgggagagccatcattccggtacgaccggggatagttgaggcgctgatgaaaacctggccagacccgacactcaacagtgccgctcgtactgagctggaagccgcctccggcctgaatcttaccgccaggcaatatgattatttgctggcgatcgacaggacgacgcaacctgtatcgcgtattaccatgttgtacgatttggtgttcaacaccgctgagacctttttttctgaactaccatcaccagagaactctggagccatgtag

SEQ ID NO: 386226 - DNA, 657 bp, Salmonella enterica
atgtcccaacaagaaaaccctgtttcgcatctgctgtggtgcatgctactggccctgcgttgcgcccataacgacacgcctttcacgtccgaatctgccaggagaaaatttctggcacagtggctgacgggggcgcgtaaggtgccgaccttctcaggtctggcccgggagttcaccgccctgcgtgaactgcttggtaaagacaaaaaacaaccgatcgaagggattttaactgccctctggcaacagtcggtcctgagcgagcagtgtgattttatccgtctgcgggacgccaaaaatgcgctgcatggcagccactggcgcagctgtctgtgccgtttccctgaacaaaccgtttcggaaactttcacccggctgagaacccggcacaatcactatcttcagctgacacgaacagaagatacgtttttatcgaccggtcagatgaatgccccgctgaccttccagctcgttctgaacagaccgtcccaccagtttgaagagatttttcatctgcatggtttttcggtgaagccaggggctgaaatccagacggggcacgccacgctgcgtacggtatatatcgggatgccatcactgtccgaaaacgtttggggcgcaaccccggatgacctgtggacaccacagtaccactga

SEQ ID NO: 386227 - DNA, 210 bp, Salmonella enterica
atgccggatatttgtgatcatgccaacgaagaaatggaatttctgaaccagattaagttctcgcgtacacctccccctgttcagccgtcagcaacacattgctgtgactgcggaacccctatacccagacgtcgccgtgaggcagtagcgggcgtcaggcgatgtgtggattgtcaggccctcctggaacatttcatcccactaacataa

SEQ ID NO: 386228 - DNA, 195 bp, Salmonella enterica
atgcagcgttgtttctcgctcaaaaaggagcatgcacagaccctggaatttcaggctattcgttcaaccaacgactgtaacaccccggtcagtgcccgtctggtactgagcgccctggtggagctattgcccgagctcgacaagacacagctcaatgacaccatcacaaggctgaatcagaggaaaaactcatga

SEQ ID NO: 386229 - DNA, 507 bp, Salmonella enterica
atgacttcacggatatctgcttcatcatggtgtcgctccgcgctggtcattctctcgctatttatgctgacatcctgcacaaccgctcaacagcgtccactttccggtgctgacaagccagtctgcgatatgcaaaaaggtttgtgcgcgttctcctggaaaatctttttggtcagtgaacctgaaatgccgggaacagacggtcaactctttgcttccggccgcagcgtctatcccgtaaacaaatttacggatattccctttgagataaaccacggtgatcagaataagtttgcggtggtttttaacacaggcacttctggcacgtcgacgttctcatttgtcaccctgtctggcgtaatacacaggggtaaatccagaatcgtcaccttttcgcaaaaaatcagcatacatccaggaagaaccggggagatacgcatccctgtcggagatgaaaccttcatcatcgctgttactgcccccacgttcactgaccactcgctgtaa

SEQ ID NO: 386230 - DNA, 963 bp, Salmonella enterica
atgaaacaacacactgtaccggctttagggctgttgctcagtggctgcgcggtgcagggtaattcccagccggatgtgcctgccgataatgttgtcgaccagatgattgcggtcaatacgcagaaggtcagtttcgttcagcaacaactgatcgccgcactgacgcccgttttacccgcccctccccggccatcagccacatcttcttcgccaccctctcagaacgtgccgttgcagtcgccaccccgcgtgaccacatcttctcgctggccggcgttgaccagtacaggccagcgcccgtccataccggcactggcccagaccggtacggcaccgacactgcgtcaggcactggcaaagatagtgccttccggctggaccatccactacgacatgggcctgaagccggaggtcaggcgtcctctgacctggcaggggaacgatcagtggccctatgtgcttaaccggctgctggcgcaggaaaaaatgcgcgccgacattaactggacgacgcaaaaagtttccgtatccgcggccagccaggcagacatgcctgcagtctcacctccggtcgtgaaagccacaccgggtaaaaccacgggtaaaaaccccttcaccgggaacgggggcaaaaccagccctgttcctgtggcaagtaaagtcagtgtggttaaaccgccggcagtcagagtggttctctggcaggccagcgtgggctccactctcaaggacacgctactggagtggacaacccgggagaaatgtacggcaggtggcacctggaagctggcatggaataccaccgtcaattaccgcattgatgccccactggcgttcagcggttccttccgcagtgcgatcaatgacctgtttattctgtacggcaccgcgtccaccccgctttacgccgcgacacagtcagcacagtgtgtgctgctggttgatgataaggagccgcgctga

SEQ ID NO: 386231 - DNA, 432 bp, Salmonella enterica
atgcccctcatattttatttgctggggatatttgctgtggtgatttatggcggccagccgacgccatcagggcaggcgcggacagcgcagaatatccagaaccagctccctcagcaggcccggcagacgcttgcctacgtcagtgcgctgaacgactggcggtatgaccatcccctgcagaacggcaccatcacagccagccagctgggtatcccgttttccggtcatctaaaaaatcaggttgtcagtaaccgtctgtgggtatggcaaccggcaaaaccgggcctgttcaacgccctgcttgccgaaagcggacactccgccctgacggggcaggtgcggggccgccgtctgtttgatgccaccaacaccgatatgcaggtcaccgtgcccgacgccgttccggacggcagtctggtctgcctcaattaa

SEQ ID NO: 386232 - DNA, 1623 bp, Salmonella enterica
atgatgagaaaaacgctttctgcgttggcgatgttgtgcctgttatccggctgcagcacgctggaccgcatcgacgccgtgggtaaacaggcccgtgacgatgagaagatcaccagtcagcatctgcagaagatgaaaagtggtgaagtcgttcgtgaactccccagccagtggataaaccctgtcccactcaatgccagaggcaatgatcgggaacgcctcccgtcctgtctggtacagattaaccgtcccggtgtgatatccgtcaatgacatcagtgcgcacatcacccggacctgtcatatttcggtggtactcaccccggacgcgcgacaggttacccaggccagtgggccaaccgaacagattaaaggcccggttcccgcaccggatgctaacggcatgctgccgctggcacagatgggtggtgccgtgccggcacctgcacaacgtgcaggcagcgaagccacactgcggggtgtctactggaaaggggcactcgacggtttcctggacaatgtcacggcccgcctcggtctgtcatggcgatatgaagaaggccgtatcgtcattttctatctggatacccgcaatttcccggtgctgttcatggactcacaggcgggattcacgtcgaaaaccgtcagcggcaccacatcctcaacgggcagcagcggcggcggtagcagcggcggcataagcggggacaataatacctcgcagtccaccgacatggccatcaagtccaatctgtacggggatgtctccgcgactgtgaaggcgatgctcacaccgggtgtgggacgcatgaacctgtctgccggcgtactgaccgtcaccgacacctcccgcgtgctctcacagataggacggtatattgacgaccgtaaccgtgagttaaaccgccaggttgtcctgaatgttcagatttacagcgtggagagcagacgcgcagaccagctcggtatcgactgggatgcggtattaaacctcagcagcgtgaaggccacctttactaacgcattcaccagcgccaacgacgcgattgccagcggcggcgcgatgatcgtcgacggtaaaggggccgggacaaaagcgctggtcaaggcgttatccgaacagggtaacgtcagcgtggccacgcagtcctcgagtctcaccaccaatctgagtgccgtgccgattcaggttgccctgcagcaggactatatctctgacgttaccagtgaacagaccgccaacgtcggcagcagcatatcttcaacacgctccaccatcacgaccggcttcaacatgacggtcctgccgtacctgatgccggccagcagcagtatgcagttgcagttcagcgtcaacatgtctgacgacccgaccatgcgtaccgttccccagggcgaaaaaagctccgtggagctgatgaaaacccgtctgaagaccttcacgcagcgcgtcaatatgaagtccgggcagacgctgattttaagcgggtatgagcagctcaataacaccgctgatcatcagggggttggttcatcccgtttctttggtctgggcggtggcgcaagcggggcgcagaaccgcacgcagctggtcatgttcgtcacaccgattatcctgggatag

SEQ ID NO: 386233 - DNA, 1284 bp, Salmonella enterica
atggaaaaacttaataacatccacgttgttgaccatgagaaagtgcactatgtcgccgggctgaactggcaggttattgacactcagtcggccagacgctcccggaaacaggccagggccgaaggggccgagtattacctggtgtggcgccagccggatacggtactgctgggcatgacggtactgtcggcttttcaggaaacacgggatcggcaggcttaccgttcgctggcgttgcatgtgcttcccctgttaccgaaggacggatatgccgttattccgctgacagaatccaccctgtggtttgtggccactctcggtggccagctctctcccctcagtgatattgtcggctctgccgaacagataaaaaaagccattaatgtctttgtcacgatgaaccctcagcccgctgcgggctggcaggtcatcgcccctgacggcttcctgccgggagagacgcaaccgccaccgggactcacggactggctggtccacgacagaacgcggaagaccccgcgactgtcaccgacgaatgtcaaagccgcggcgggattatggattgcgcttctggtgcttctccttgccgggcattttggctggcagtatctgcaggagcgcagggaaaatgccgaaattgccgcagcgaaggcagccctggcggcaaagcgcgctgcggctaaaagcgaaagccagccccggccgtgggccagccagccacggtttaataccgtgctgcgtacctgccataaccactggaaaacgctgcccctctccatcgccggctggacctttgcccaggcgcagtgttcacccacaggcagtctgtctgcaaattatgcgctcccggaaggcgggacggtggcggatttcgccagccgtctgccttactggtatccgggcataccggcgggctttaacattccgggggcagccaacatggccagcttcacgctgacgtttgcgccccccgccagtacaggtgccgaaacggttggggataatgcgacacagacccagcgattcaccagcttcgctcagcgtctgaacgccgcgctgcagcttacccggctggacaatgcgctgcgtgatgatgccggcaatatcattcctgtcccgtggataacctacgcctttacctttgtgaccgacatacctcctgaccgcctgtttctggcccagcactttgatgacacagggctgcgtctggaacaggtttcgctcacgcaacgcgacggccaactgacctataccctggagggttatctctatgctgcgaactag

SEQ ID NO: 386234 - DNA, 537 bp, Salmonella enterica
atgctgcgaactagcctgattgcttcgctgattttatttcctgtgctggtccatgcagggtccccgtccccgggcatggaaagcgccggtatcgtgccgcccccgtcagatgaggtgatggtttctgccccgcccacgggcaaaaatgtcatccacatggaggatatccaggcccagaccatgttgtacaaagcccagctgctgcgcgataaggcgctgactgagctacagaaactcagcagtggcagtgacaccccgtcaatggccagctctcccctgccgtatgacacctctgccacacagtccgcgccggcagcgtctgcccgggacgaactgcctccacaggtgattcagataacgggggaagggaaaacgctctccgcgctgatacgtctgagtggaggcaatcagttgatggtacaggccggtaataccattcctggtgccagtctgaaggtggaaaaaatcaccttcgatgcggtgaccgtcagtaaggcagggaagcaaccctggatgctggcatttactgaggattaa

SEQ ID NO: 386235 - DNA, 1500 bp, Salmonella enterica
atgagtgaagccgctgaacgttatgtctggctggccccggaccggatctttgtctctgcagaccatgccgccctgccggaagtccagagcacggtggcgcgtctgttgcgacagaagtccggtttttcactggaaacctgtaccctgcagcaactgcgcgagtatcagaacggggagaaaacccgcaccgggactgccgttaacaacgccgacaactctgccgagcaaaaccgtgtactcgggtattttcgggaggcactgctacagcattcctcggatatccattttcgcattggcgaaaaagggctgacccgaattctgtaccgcattcacggggaactcggtgaggcgggtcaccttgaaaccgctgaaggcgagacgctggcatccaccatcattcagtcaatgtgcgatcaggcagaacccagttttcattcaaaccgcccgcagagtgcacggctgcgcaaggagtttctgcgccaggtgggcctgtttggcgcacgatatgaacactaccccaccgagtttggcctgctggcggttatgcgcctgatccctgatgacgggcacaatcccccgtcgctgactgaactgggactgcttccggaacagattgccctgctggagcagatgctgatgacgcctgaaggcatcatgctgatttcaggccctaccggctcagggaaatccaccacgttgcgcaccctgtgccggatgtacatggaactgaccaacggcacccgtcatcttttaacgtttgaagatccagtcgaaggcgggatacccggtgcggttcagtgcggcataacagctgaccgcagtaatccggaagaagtgagtcaggcctgggcgagcgctttaaccagcggtatgcgactcgatccggacgccattctggttggagaacaacgggaccggaattctgcgatggccagtgttatcgcggccctcaccggtcacattgtcctgagtacggtacacaccccggacgccattcgtatcctcgaccgtctgattgaaaccttcgacgtcagcggatctctggttattgacccgcaggtcatgatgggtctgatgtcccagcgtctggtgcagacactctgccctcactgcaaactggactatgcagaacgaatcagggcggagtcgttgcccgcgctgagcgcactgcaaaagaacctgctggccgagcacactgacacgcagcgtatcgcgttccgtcatccggatggttgccctcactgctggaagggcgttaacggacggcgggcggtcgctgaaattatccgtcccgacgccatgtttatggatatgtaccagcgacatggcaagctgcagacccgcagttactgggtgcattacatgcagggcattacccgccgcgcccatttacagcactaccttaacgccggcgcggttgatccgttaaatgcccacttcatttgtccgctggatgaagacaaacgtctgttattacccagggaggcggttcatgtttga

SEQ ID NO: 386236 - DNA, 1116 bp, Salmonella enterica
atgtttgatatcagttctgtgtttacccccttcagaagcctgcttaaccccgtcagccggggatggcgccaggcggaaatctggctggggcgaaaaacgtttaatgccggcgatcgcctgatgatttatgaggatctggcctttcttctggataacagcgtaaagctggaagatgccgttaaaggcatgatggagaaccggcgggaaggcacgttacgcccacgggccagcgtgtactgcctgcaggaagtggcactcgcgctaaagcagggtaagccgctggatgtgggccttcgtcgctggataccccgcaatgaagcggccatcattcagtccggaattaaggagaagcgactggctgattcactgcgacgggctattcacctggttctggctgtgcgcgatatccgttccaccctgctggagcgcctcatccagccgctggtcctgttcttcagcttggtggctctcgcctgcatgatgtcctggagttttcttcctcagatggaaaccctgaagccccgggaacaatggcagggcagtctggtatggatggccgtgatttccgacgcctttggtcagcacctgagcctgtggattatcggcaccctgtttatctttgcgtgggtgtactggtccttcggcaacctgaccagccgtgcacgtctgttcatggatgcccttcccccctggtctgtttaccgggaagttcagggggccacattcctgctcaacttcgccgccctctcccgcgcgcaggtcaaaaacgaagatgcgctgagccagctgagtctgcatggttccccctggttacgtcagcgactcaatgcggccagccgtctgatgaaaagcgggaactctcttggccaggcgttagcggacagcggttaccggtttccgtcccgggatgccatcaaccggctgaaactgctgacgcagggcgatggcggggaagccattattgacagttttgcccgtaaccagctcgaacggacgctggccggtatcaggagtcttgcgggctggttaaatctgctgatttacgccctgtcagggctgtacatggcgctcgtcgccttttccactcaaaacctcagcgctgttaccggcgcatag

SEQ ID NO: 386237 - DNA, 594 bp, Salmonella enterica
atggacaacaacatgttatcccgacgccccacgtttgttcaccgtggagaagctaacctgctggctctggttatcgtcatcagtgtcgtagctcttatggtcgtaggcgtcatatcttttggctccaatatctctgactccaacagcatccaggccgagtacagcaacgggaccacaatcctgactaacgcccgcgcccgtctgaaaacagacggcatttatgatttcagcggcgcgtccgatatgaccggcacattcattcagttaggtggcgcaccgaaaggcatgattgtgggtaataaagcctcaggttctgcaacgctgaaaaatcagtttggtggctcagttaccctcgcgccggcaaccagcaatggtgcggctaaagcggcgtttacagtgacctataacacctatccttttgaggcctgcacacagctggcgacccagatgagcggcgcacccggtgtggtgaccaccgccattaacgggacgtccaacagtggcgtggtgtctgccgccaacgccgggaaacaatgcgtcgctgacagcggcagtacggggagcaacacgctggcgttcaccaccaacagctaa

SEQ ID NO: 386238 - DNA, 471 bp, Salmonella enterica
atggctgtcttacgcaacgcgttcctcctgcttgcactgagtctgggcctgacggctcaggctcatgcctggtgttttgccgaagcgggacagcgctaccatattgatcccctgctgctgaaggcgatagccatccaggagacgggccttaaaccgacgcttattggtaaaaaccgggataaaaagggcaacatcaccagccgtgactacggcctgatgcaaattaatgacggcaatgccagacgacttatcagcatgggtgtcattacaagttatcaggacttactgtccaatacctgtctgaacattcaggcaggggcctgggtactggcgcggcattttcaggtctgcggtatcacctgggattgtctgggttcctataacgcgggattcagcgacaaaaacgcgcccatacgccagcggtatgcgcgggacgtttacaccatttatcagcgtttacgggggagctga

SEQ ID NO: 386239 - DNA, 612 bp, Salmonella enterica
atgaacctgtggacctggggactcactttcgcgttactgtgcctgactctttttttacagctgcggcaggtcaatgcatttttgcatgagcatgatgctccggccttaccctcccgactgtccgacatcgtgtcactgctgtttctgctgctcgggctgtttcttgtcagtcaggacaatatacccgccctgttaatgttcagcgccctgcttccgctgctgtggctggatgcctggcagcactggctgccgcttcgttttactaacgcattctggtgtgcaggcctcctggtccggctgctgcccgacgggcagtctttgtcgctgctgcaggcgctgttcaacagcacagtgatgttctgtctgatgtgggccgtgtggtggagcgtaaaaagactcacccggcgcgaagcgctgggacggggggatgttcacctcatcgcagggctgtttgcctggctgccggcgaccaccgcgctctggagctgcggtttcgcttttttaatgatgcttgtgccggtcgccagcaagccccagccactggccccctggctatgtctgtcattaatggcaggtgtgttcagcgggaacatcacacttctgtggacttaa

SEQ ID NO: 386240 - DNA, 1335 bp, Salmonella enterica
atgaaaaaaatcaaccagggcaatgcgcaacttctctctctggtgctggtactgacgattgccatgatggctgctccccggggaattgaaatgatagcccggcaacagtcagagcgggtctgggatgtgacagccagccagttcaataccgtgcagatggccgcccggcagtatatcagtgacaacatcgacacactggccacgcaggtgaaacccgggcatccggtgtatgtctcggtaaacaccctcaagacgaccggacaccttcctgctggttttggtgcaaatgatcacaaccagagctacttcattgcggtggtcagtaaccccaaaatgaccagccagctgcaggcgtttgtcatgaccacaggtggacaaccctgggattttggcgcacttcgccatatatcgagcaacatatcggggctgggagggtatgtctggccggataatcaggctgttggcgcaggcgggggctggaaaatgaaactgtcagactacggtctgagcagtaaacaggggtcactggtgacctttatcccttccgaccagttaggcaccagtggtcaggggaatgaccgtttgtatcgttacgccgtcaacggccatcccgatttcaaccgtatgcacactgctatcgatatggacggaaataacctgagtaacgccggcgatataaccggtaagcaggcgataatcagcggtggaatcagcggtcagagcgcaacgataaacggtgaaattaaaggccagcaggccacgataactggcgatattaaaagcacgggaggatggataaccacgcagggtaacaagggctggttgaacgaaacctacggcggtggtttttatatgtcagacagtagctggatgcgcagtctgaataacaaagggatttataccgccggagagatcagaggaggtcagttacgttcagatggcaacgtgtctgttggcggggtactggaactggaaagaatcagtgttgccaacacttattgtcctaaagatgggtctgtaagccgcaccgcaacaggtgccccactttcgtgccaatccggtctgtggacgtcgagcgaaaaaatgtccttatttgaaatggctgcaggtaatgatgcttgtggaaagtacctttactcaaaggcctactgccccataggaaaacagctaatctccggtggttttatcctttcaaagtggagtggtggtagcggctggaatagtcccgatctatccatgccgtcaccaccagagaatgcctggcaaatatatactgggggtggtgttacgggaggaacgtgcatgcgtgcaattgcgtggtgcgccaaaaattaa

SEQ ID NO: 386241 - DNA, 507 bp, Salmonella enterica
atgttcacttatctcttcagtacactcaggaacaaactaaaagtaccggctgcaagaacgctattcaatacgcagaatcttagaagaaaatctcgtaataaattactcgtgaaatccggggttgtcatagaaggtgaaattgccgttaccccacctttttattgggagcatggccaaataaccatcggtaacagtgtgtttataaacgcagggtgcgtgtttctcgacaatgcacaaatttctataggcaacgacaccctgataggaccacacgtaacactggcgactgccgatcatgctgtctcgccggaattgagaggtaatggtgtaactcaggctccaataagtattggtcacaacgtctggttaggtgcaggcgtcgttgttctgccgggcgttaatatcggtgataacagcgttattgccgcgaatagtgttgtatgttccgatgtaccggaaaatgtactgtatgcgggtacgccagctgtttttaaacgcagcatttga

SEQ ID NO: 386242 - DNA, 543 bp, Salmonella enterica
gtggcgtttgttgctcgccagttcatataccccttctcgtcggggccatcggttgggattaattcagtaatggccaactcgcggccatcaatacggtatgaattaatacatagtttaaaccgcccgagatttactgtttgcccaggccagacctggaacgtagccccaacgcggaacgaaaaatttatgtctttccagcgaccggattggcacaggggcaaacgtgccaatccggtgtctggcgttcgtcagccccataccacggggtttactcgtatgtgggcaattttaaaggtgcgtataacggaagaaacacgtccgggaagcaataccggatatttgtttcgggagggaacccaccttcccaaaaaatcaattttggcaactcagataactgcattaatacattctcacttgtcgccagtgtggatgggtacacagttgctaattccgttgatggaaactcacaatggaataaatctggcagtatttcatttgatgttcctgacggttcggcattttctgttatatcaaatggaatga

SEQ ID NO: 386243 - DNA, 432 bp, Salmonella enterica
atgaaccagccaaatactaccgcctggagtaaagcagtttgcaccgccaccagtaatttttttacctgtaggacaccatgcagttgtggatggaaaacgccatgcttcagctgtaacactgaccacctgaatatcgacttttccaacatgtttccagacaccggattggcacaggggcaaacgtgccaatccggtatctggcgggaaataggtttttcgccaaccgtaaccttcttcaaaggcgagtggagcaagcaactcaacctgggaaaacagatgttttgttcaattagccgggttactggaacagataccacttcgcccgataaattacgctgtaatgtggccatgaacgtggctacgggcgattggaccttaactcaaaatataggtattggttttaactattgtgatgctgtttgtttcaaataa

SEQ ID NO: 386244 - DNA, 1155 bp, Salmonella enterica
atgtcccggccattgcgtattaaaaaaatgtctctgtataacgcgctctccagatactacgccaccacatccgtgcataaacgggggcatcaacaggagttttaccgcgtatgcgtcatacagcgtcaccctgtggcccagaaaatgatggacgaaattaccacggtggatattgccgcctatcgtgatttccgcctttcacagattaatgtccgtaccgggcgtaacatttcgggcaacacggttcgactggaactggccctgctttcatcgctctataaactggcccgggtggaatggggaacctgcagaactaacccggttgaactggtgcgcaaacctaaaatcgcaggcggccgcgaccggcgactgacatcacaggaggagcgacggttatcccgctattttcgggaacagaaccccgcgttatacaccatcttccatctggccattgaaacggccatgcgccagggcgaaatattatccctgcaatgggagcatatcgatatccagcacggtgttgcacatttgccacacaccaaaaacggcagtacgcgtgatgtccctctgtcgcgtaaggcacgccgtcttctccaggatatgggcatcgccatgacggggccggtatttaattacacgtcagctggcgtcaaaagtgcctggcggacagcgcttcagcgactcaatattcagaacctgcattttcacgatctgcgccatgaagctatcagcaggttatttgaactgggcacgctgaacgtgatggaagtgtcggccatctctggtcaccgttcgcttaacatgctcaagagatatacccatctcagggcataccagctcgtcagcaaactggatgcccgacgtcgacagacacagaaaattgcgccctattttgtaccctatccggcctgcattgaacctgtcgatgatgaaggacagaccgttttccagatccgcctgcacgacttcgatgatcttgcggtatcgggtcattcccgtgagagtgcgatggaggcggcatccgttgcgttactccgggttctggcgctggccgctcagcgcggtgaacgtgtgccacagcccggggaactgccagacggtatggctgaacgagtcatgattaatccgcttatcagcacatccgtcagcgcataa

SEQ ID NO: 386245 - DNA, 456 bp, Salmonella enterica
atgaaattaccaaccctcatcggggtcctggtgccattcctgctgtctggttgccatcaggcccctgcatccacatcgacgtcgacatcatccctgctgtcaccgacagcagcccagatcgcgtttaagcaggaacaacagcggcttgccctgaccctgacggaagacggctggctattaccgggccgcattacgtccaactcacaacgtgtttcggtggactgggatggagatgcgattgaactgctctcaaaactggcgcatcagcgcgggcttaccctgcgttattccggtgtccgtttaccccttcccgtcaccattcacgagcgtgacgtcacttttgaaaccctgctgcgccttatccgcacgcaaatcagctggcgcgcgacagtgacacagcaatccgacgcgctggaagtcggtttcatgccaccactcaaagggaaattgtcatga

SEQ ID NO: 386246 - DNA, 807 bp, Salmonella enterica
atgacaactcgcctttacgctcagggccttatcgtccttgctctttttacccctctgtccggggtaaaggctgccaacacgactccgcagccgccttccatgtcggcttatctcagtcctgaagcagacgaccacaacggtgttaacgacacggtgtatcagatgctgactgaggccgggaaaaccgaaggatttcgcgggggaaaagcacagcgggcatgggaacttcgccagtctctggagcagcgcgcccgccagctcgacagcacgtatcttttttcaccgcttatcaaccggcagggctggcttccaccggtgattgctgaggcgacatcactggccaccatcaccgataagcaaatgcgcacagccagccacgtctacaacatcctggtgcccgagcgttttgtcagtaacccgcccggctggcgccagtatctgttcgccgggttatccatcaaatcagcacccaccgatacggtcattccgcgtaaccgggcagaacgcacggtctggcagaacgctatccgcaatggctggcaggaaggccgtcagagcgccgacgacacgctggcggccaacttcaacagacttacccgcgattacaccgggatgatgcgctattcactgcttgtgaaacaaaaaatgatcaccccgcccgttattgccgaacaacagcaaagtgtcagcggcagtcgtgaggagctgatgctcggtgataaggttcgcgacctgaagcaacgcgccggttttgatctggacaagaagaaatgggagccgctgattcagacaagggcaacacaatga

SEQ ID NO: 386247 - DNA, 1170 bp, Salmonella enterica
atgacaaccctggataaatttgatttctcagcaggtctgacgcccgatgtattccgcgcattctttgtccactgttaccggcatggcgtgtcagacattcatttacagtccggcggtccgctggtacttggccaccacgaccgaaagattcgggcctcggcgttcacgctggaccattcgacactgctcctgcttatcgactctctcttcagcccgctcgtcaaggcccgtattcaggccgggaaaggtgatgatgccgcgttacaactcgagggtgacagtcagcagcgctacggccttgaaagaggagaacgcatccgttttcgcgccaacttcacccaggccaccatccggggcctcaatactgctattgccgttaccctgcgcgtcattaacaaccaaatcccggcgctgaacagcctcgggcttcccgatccgctgtatcagacactggcgcatctcccggttgaaggtatcggcctcatcgtgggccccaccggctcgggaaaaaccacgttactgacgtcggtataccagcatcacggtgaaacgacccctgactgcaaggtcaccacctatgaagatccgattgaaggcttgctcggggggccgaactggttgctgcagccgcagcagtgtgaaatcggccgcgacgttccgacctatgccgaaggcctgcgcctgtcaatgcgtcaggcgccgacgattatcgggattggtgaggtgcgcgacagtgagaccgtcgaaggcatggtcagtgcggcactgtccggccacctgtgcctgggaacggagcacgctttttctgccgggcatgcctttgcccgcagcattcgtatgctgcctgcagaaaaccgcgaaccgctggcccatgacatgctggaactgatgcgttttatcgtcatgcaacgcctggtccccaccacggatggccgacgctgcgccatccaggaatatgtgctgttcgatgatgagttgcgcgagtcattgcgccggcatgaatacacgcagtgggccacggtgctcaataaagaccttgctgcacaggaagcccgtatcagcgacctggtctggaaaaagtaccaggaaaaccgcgtattcgaagagacagtgcgcagctatctcggtaacagtgaatttattaagcggaggcaacatcatgtccggtga

SEQ ID NO: 386248 - DNA, 267 bp, Salmonella enterica
atgtccggtgattatcacccggggcgggatgcctcccccccggttaacatttttggtattccggcgctggcatggctcattttcgcgatctggtttaagtggccatccacgaacatgtttctgttctgcatcggactcatcctcttctatgccgttctggcgcactttggcttcacggtgacggtactcagccagcgcatcttccaccttcttcgcggtcgtcgcctgacaggcaggccctggtggtaccgaaaattctttgagtaa

SEQ ID NO: 386249 - DNA, 471 bp, Salmonella enterica
atgaaaaaattattgctcacgggcctgttgctgtatgcctcactttctgcccctgcggtctatgccgccagctgcgctgccgcctcatctgcactggcgggtgcacaggccggttatgagcagaaccggaaagccgcagagtcatggtcacagcgggaaaagcaggccagtaacggatttcagcaatgtctcggggacatcagtaccagcattacggtgccgacttttccggacttcagccagatatttgaccagataaaggacaaaatctgttctgctgcccgggataaagtctcctccctgttacccgggaatatcgatccgtggggggacctgggcggcggctatataccgacaaccgacattcctgtcagtacccgggccgcaaaaagtgccgcccccggacggacctcaccggccccctcatccggtaccccgtcagccagctccgcttaccccttctcactgtag

SEQ ID NO: 386250 - DNA, 1029 bp, Salmonella enterica
atgaaaaagacactgatattcatcaccgcactggtcagttgcaccgccgtgatggcggcggagacgccacaaccacaatggcaaccggcacagtcattatccaccccccccaccacggcgctgccgcctgcacctgcacctgtgacagtggctcagccggcagtcacttcaccggcgccggcaggtgtaccggccccggaaagtgccgcgacaggctcagcacctccggctccggtgccgccggatgcagccctgcagtatgcggagaatgtgacggcccccctgtctccggaggcgataaaacagctccgttccggactggatggcgttcagcgcagctcaggaacggcccctgtcaccgccgcgccccggatacgctctctgacagtgaagctcgaacccgggtcatccctgccgatggtacaggttttacctaacttccccggcgtggtgaatttcaccgaccagaccggcgcgccgtggccgatagcggccccgccggtgaacggtaatccggcaggcttccaggtgaactacctgcccgacacgccctcgatgtccattcaggcccgcagggcctacgacacaggcagcgtgacggtgtacctgaaaggcctggcagtgcccgtcgtcgtcagtatgaccagcggtgaacccggtaatccggatgcatcgcagcccacggacagccgggtcgatttacgtatcccgcagcgggggcctgccgcccttcccgcctctgcgccccggcagaaagtcgggctgtatgacaataccctgcaggcctttctggatggtgttcccccgaaagaagcacagcgcatcaaaacacagggcggtgttccggatgtccaggcctggcagcttggcgatgacatttatctgcgttcccgcgctgacttacgcgatgcgttcgacagcacactctcgtctgctgacggtacacacgtctggaaaatgccggtgacaccgtatgtcaccttttccgtaatgggacataacgtcccgctgactctggagttgcaataa

SEQ ID NO: 386251 - DNA, 1203 bp, Salmonella enterica
atgtcgatcgaacaggatgcagccagtgacggtaaaaaaacactggcactggtagccgtcgccgtactcattgttgccggcgcgggttatgtgggctggggatggatgcaccagtccgccgtccccgagtcgcagtacaacctgaaccgcgtggccaacaacgcgacagtgtccgcccaggaaagtcgccagtaccgtgaattactcaggctggccaaccagcagggcgcgcaggaggctgaaaacgacggcaacagtttcgtggcctcgctcagcgaaagttctcagcatgacgacgtgcccgttgttccccgcgttcaggccacgccggtagccctggacacgcgtaacggaacctctccccaggataccggacaacagggcgggctgaatgatgagcaaaaacagcagatcactaatctgctcacgcagctgaatgcgcgctggcagaccagcgacatgcagctggcctccgcctttggcagtgagggacaggacggggcctcgcctttcagccagtgggctcagagcgtgccgggtctggcatcgccccctccccaaccggcggcacagaccactgcaggcggatcaacgtcgggcacaacgtcacgcatcaacataccgggattaagccgctatccgggcactatcgacaccgccattgattctgataacccggagtcaaaagtgctggccatcatcccggccggtaagctggcaggcgccacgctggcggcacccaatgtccagcttgccggcgatggggtgattgtgaatttcaaaacgctcgcgttcaacggcatgacctgcaccatcgatgcgtatgcgcaggatgatgaaacccagcgttcatccatcgccagcagcgtcaatcaccggtatgtcacccgcatcattttgcccgcactcgccaacggcctgagcaaagtgggccagctgtacgaggacagcaacacgcagatcctgaccaccaacagcgggaccgtcacaggacgaaccagctccccggacagcaaagccgtcgccggcgtcatcgcgggcggtatcgggcaacagaccgcgcaggtgatgacacaggatgcgtcccggctgccggtcacacaggccaacgttgaccgccgccaggtggtctccattctgtttatgaaacccgtcactgacaaagactgcacccccacgcccgcaggagaaaatgcgaaatga

SEQ ID NO: 386252 - DNA, 756 bp, Salmonella enterica
atgaaaccacactttgaccctgaactcgacgcacccgttcccctggatgacgaggcgttacaggccgatgaacccataacaccctctgccaggcctgcaaagcgcccgttatgggatcagcctaaagtccagatcgccgcgctggcggtttttgccgttctcgggctgacctggaaaatgtccggcagcagtacccccccgaccgcccagccacagttcacggcaatggagccggtaagtacgcccgcgccggtgacggtggattctcccgtccgggctgaatccttaccgatgcaacagacggatgcgccggtgaccgaagacatcccgccagcggcagcgccgcattcagagacggattctctcgccggggaagtgtcccgggcactgaactcacagcaggtctacagcgagaaaacccgggaagggctgaccgccgttgcccggcgtctggataatctggagcgacaggtcgctgaactgaagcaacaacgtcaggcccctccggcagcggtcagacaggccacggtagccaccacagtctccccagccccgaaatcctcgcgaacatcgtcctcccgggcctggtccggtaacggggcgaaggtgaacagcctctatccggggctggcctgggtgacctggcagggaagcagctgggcgctgcggcccggagaccggtttgcgggggcgacggtgttacgcatcgatgagagtaaacgggaagtggtgacgtcatcgggggtcatccggtaa

SEQ ID NO: 386253 - DNA, 453 bp, Salmonella enterica
atgattaacttcttaagaaaaacgtctttatggataaataaagcaacaggaaacaccacctttcaatttatactcatctttatttccggaataatcgcagggtatcaggcgggaggacaaactaaattttacaatctgtcgaaagatccgcaagcatcgcttgtggaattgatatacaagaaatgtggaggtaatacaattgtagtgaaagacatcagtggcccgtggacgacggagcaaatgacatgctggagtgaggaacttactcatgccagtgataacacattcaaaactgagatgtattttaaaatcagtaaatttatccatgaatgcaacctcaaaaaagaagacaaaaaaaaatgcataaacgacatttcatctgaatatcaaaagcgggtgaagaaatatcgagaacttaaaactctgatgagtgagtcatcccgatataattaa

SEQ ID NO: 386254 - DNA, 267 bp, Salmonella enterica
atgataaaagaaggtattattctaaaagctgaaatacttagtgaatatatctatactttaaaactaatctggctcttaactgaaaataacttattgagtaaccagatgaaagaaggttacacaaaggaacagttaattgatgaactgaaagaagctgtaaaaaaaacaacgctatcagaactcttatcagacactggccactatgaacttgctgaatccatctttttcattattgagcaaagagccaatgaatgcagcaagttgtaa

SEQ ID NO: 386255 - DNA, 609 bp, Salmonella enterica
atgcctgaattagacctcaaacaaaccattgccggtgaaaccccggaaacagacagcgcagagcgaaacgcctatgcgcagtcactcgggtgtgaatgcgaatactgtggttatccttccggccacaatacagcgatacacagtgacggaaatccactcaatcgcgatgacagcaacctgacggtcgtcgatcccttctgccgcgcatggcgggaactcaacacgctcaatgccgataatgcggtgatggcgttgcttcccggcatttcatcagtggatatcagtcatttgcaacgcactatccacatcgctctccattgtgacgatgcggccacacgggcagatgcccgccagttactggactggctcaccgagcataacgcactcgccgaaaagcgtttcgacacgtcacatccgggcgcgtttgcgcaggcgctgcaccggacagccccctcgcaacgtcatgaaacccgggtggcatggcgtcatatcgcaccggtactcaacccggcccgtctgcctgaccccacagagttaaccccactggagtccacaacggactggtggccaatgatgtaccaacattaccgcacgcagggtggcgcatga

SEQ ID NO: 386256 - DNA, 2148 bp, Salmonella enterica
atgaaatggttacgaatcctctgtgccagtgttctggtgaatgtgctgtgggcgcagtcagcactcgctgataccgccgtgagctttgacagcattgaagcggcagcgaaacgctcaaccgacctgtcccgccagcttctggtgatgatattcggggacgttgtgactgacccgttatccaccaatgcgacaatggtcggccagctgttcttcatctttaacggaattgtctttgccctcgcggtcatctggtttctgctgataagcctcaaacacatcaccaaagccgggcatacggggaaagtgtttggcagtggggccacgccaatggcagtggtgaccaccgtcgcgggattcctgttcctggtgccgaccgcctccggctggtcgctcgcccagctggtctttctgtgggcggtgtccgtgatgggtatcggcagcgccaacctgatgaccgacaaaatcgcggacctgatgaaacagggttactcactggtgatgcagccggtggcgccacagaccgtcagttctgcgcgcgccatctatgagatgaatctgtgcatgtatgccacgaacgcggaactcagcggcatgtacaaccagtacgggaagagtgacacgcccctgatggccatcaaaaccaccacagagggttttgaaatctccaacggcagcgccagctgcggttcggcccgactgccggcatcgagtaaacatagcctgaccggctggctgttcgcgccggatgtaaacacggatgccattgagtcggctcagcgtaacgccatgaatcagatgcagaacacgctgaaccagaacgcctcgtcgtttgtcactgccctgctgaataagcagaagaacgggagtggcacggtcccggatgcggaaacggctatccagcaggccgcgcgtacttacgaggactccatcaatgcggtcgtcaacgcacaggggaacggcgatgagctggccaccgcaatgacaacagaactcaagagaagtggctggctctctctgggggcgtggtatcagacattcgcgacagctaaccagaaagtcaacgatgcggtagcactcaaaccagtggtcagcggtcagtcatctatgggcgatattggcgtcagcgatacgttaaataacgtcatgacggcttatcaggctcagttgcagaattcaccatatacaccacctttgggtactcagactgctaaagttacacaggaagcaaaggatgcttctagtccagattcagtattcgttaacatacttgataaaccattattaaactttaccaattacattgctaatttaaatattggaagcgatcaagttaacagtaaccagatgaatccactattaaaaatgaaagcgattggagattataccttatccagtactgaagtagcctttatatctttcagcgcagtaaaagtatctgttgatacctatgctaatggatttacaggaaaaatattctccttgctttcacttaagggaagtgaccttttaagaaacaccataaatacaatatctcctttcgtatacttcattttactaatgttattcggcattgggttcagtctatcgatttatcttccaatgataccatttatcttttggctatcagcagccgccagctggattgtaagtgtgttagttggtgcaaccggggggtcgttatgggctgcgacacacataggaacagaagaagaaaaaggtagcagatcggcgtatggttatattttcctcattgatgcacaaattagaccaatgctaatggttttaggttttgcatttgcaagcctagttatagttgcgataggaacattgttaaatatgctatttggcccaactattgctaatgttcaagcaaattcaataacaggcatagtttcattggtcggtttattaatgatctatgctagaatttgtactaccactgtaactcgtgtttttgctctgcaggtaaccatgcctgattatgtcatttcttggttgggaggtcgtgaagctgcgagtatcttgggtgggatggcagagtctacgaaaagtatatttgctggtttttctcatggacttatgcgtacccctggtgctaatataaactacagtaaaaacaacaatcttaatcaagatggcgttaaatga

SEQ ID NO: 386257 - DNA, 495 bp, Salmonella enterica
atgagagagttattttatttagcaaaattcatgtatgttttttttgccgttgggctaggttttatatctttttgcataacagtaccagtgtttggcgctgatgcactgagaggtaattttccaccgccactttcatgggggcttgtgttaatcacttttttactttttttcactgccaaccacatatataaaaatggcaaacgtaagcttgaagataagctgaaaagtataaacttctctgcatctaatgggttacaactcttcaaccctattgccgaacgatacattggcattaatctaattacacagaagatcgttctaatatctctaacaagcaagcaacccataatcgaattgccacttaaggtactttcagggtatgagttaagaggatctaatttaacactaaagcttaatgactatgatactccgagttttgctatgtcacataattctggatttcgagatagactagacgtatacctcaatagttaa

SEQ ID NO: 386258 - DNA, 516 bp, Salmonella enterica
atgcttctaaggattgaagaagtatcaaagcaccatgatcgaaaggcatttgattgtggtgttaacgaattaaatcagttcctgcagctgcaggcccggcagaaagcagaaaagaatattgctaaaacgtatgtcgcctgtagggattcgtcaccaaccaaaattcttggttattatacccttacagggtattcagttattatcccgccagattataagcattacaaaaactatcctcatccgctcaatgcggtgaaattagcacgattagcgataagtcgtgtgcatcaggggcagcgactcggagagaaactgttaattgatgctatctacagaacggtattagtatctgagcaaatatcggctattggtatctttgttgatccaacaacgccggatgtagttcagttttataagcaatatggatttttgcaggcagacagtggcaaccctgaatgtttagagatgtggttaccaatcaaaacgtgtaatgaagttattaaaaacattagctaa

SEQ ID NO: 386259 - DNA, 294 bp, Salmonella enterica
atgatgagcaatactgagcgtaaagatattcgtctggttgcccgcacctctgctgagatccaggatttcatccagcgtgcggcagaccactccggggcgacactctctcaatttctgattgagtcagcgatggagcgggcacgtaaagtcattcagcagactgaaaccctgcatctgtctatggaaggtgctcacaatttaatgtcggccctggaaaactctcctggtgctaataataagttgctgaaagcagctcagggctataaggatgcggttcatgcttctaaggattga

SEQ ID NO: 386260 - DNA, 159 bp, Salmonella enterica
atgagcacacagactcgcatcccagatagtgacgaaggaagcaccagtatggggctgttcaacgatcctgagcaggataaagaggatctacgatcccttaaccagttcatggaaaaagcaggactgcttacggatgacgaattcttcggtagcctgtaa

SEQ ID NO: 386261 - DNA, 654 bp, Salmonella enterica
atggcaaggatagacattaacgtaccctacgctgaaaaagatgaagcaaaaatattaggggccaaatgggacgctgcgaacaaaacctggtatgtgcctgatggcgtatcagttgaccacttcttgaaatggttatcagattataatgtcatcgcaccttactggtatatcgctcagacatacgattattgttggaaatgcggatgtggaaccgtaatgacctcagttcttcttccagaagggcatcaaacacttgaacaggatgatgatggtgtcatttactgggaaaagcatgaaatccctgcttttatattctacatctatgatattccggtccatatcctgaagaattttgaacgtgtaacacactatttatcaaaagattatagtaagaccgtagataacaaatactggatgaaccactgtcagcactgtcatatgaagcaaggcgattttcagttgcattgtgaggttgatggtgcatttacaccagcgaatcgggaacaggcctctggaatctatctcaccagaatcgaacaaagcttttctgcatcatgtggcggcatttcacacgaacacctgcatgtccggtttggctcggaagaggcgttcttaacttccggggagtggtttccctatatggacaaaatatag

SEQ ID NO: 386262 - DNA, 195 bp, Salmonella enterica
atgagctttacagaacctaaaatgccccgtagggattgtctgtttgatgacgtcctgaatctgtcagttgcgggggcagacgatttaactgcggcgctggagagtgagcctgtagtgaacgaaaaattacttagggctgcccaggcaaataaagatttattaaagggcggggagcggttaactccccacccttag

SEQ ID NO: 386263 - DNA, 195 bp, Salmonella enterica
atgagctttacagaacctaaaatgccccgtagggattgtctgtttgatgacgtcctgaatctgtcagttgcgggggcagacgatttaatagcggcgctggagagtgagcctgtagtgaacgaaaaattacttagggctgcccaggcaaataaagatttattaaagggcggggagcggttatctccccgcccttag

SEQ ID NO: 386264 - DNA, 1299 bp, Salmonella enterica
atgtctgccccccaacactacccgtcccccaacaatgaccaggggactatgatgttgatggcgctggctctgatactgatagccatcgtcatatttcattcaattttttactacgcatgttgcgccatgctgtattacctgtggtatctggcagacttcgcatcgatacacacctacgttgccgggaaaattaacctgctggcctgggccagtaacagggtggaagacctgagcctgggcgagtttctggaggtcatgaaccagactgccggtattctgtatgtgtttatgcttcccgtcacggtgtacggccttgtggccacacgcaaccatccactaagcatcacccgccgcaaaattgacatacatacactgccgaagattatgtccaccttttccccggccattatccctgccctgcagtacggtgacccgaaaacacagttactgaatgtggacccgccggaacaccgcagcgccatgaccccggatgaatttgccatcagtcataaactggtgatcggacagcgccttgaccatgagcgggcccgacaggccttcgatgcgcagctgggaacacctttgctcagcgagtccagtttcagtgcgcatgaacgcgccctggtggccatcatcggcctgcaggtattttgcgacgatcggtctgcggcacttgaactgcgggatgcgttaaaccgctcctgcgggaaacgtcagcgcgaacacggcaataagcggggttatccgcaattaagcctcgctgaaaaggcattcagacaggtgatggccacgccacaggcgaaagcctggatacgccgccacagcacaacacgcacggcactttcagcgctgcatgcgcaggatctgcgcctgcctgcaggtcagttccggtggctgaagggtatcgaccggacactgtggtatgtgctgtcctcatcagatcgcagtaaatgctttgtcgagggagccggtgtggtgacggctgcacaatgggaatcgctggtttcacagctgtctaaaaaactcaaagtcgtgatccctgcgcctgagaatctgaccgcttttgctgtgcgcggtctggaagacgacctgcgtaatatcggcatggttatcgacgaccatgaacgcaagacccgtattgaagaggaagaagacaacacaacattcgatgatctggtttttctgcacaatgcagatatccctcccactgtgacgtcctccgccggacatacgccagaaatagttatcccgcaggaaagccagagtaattctcagccccttttcaggccgcaaaaataa

SEQ ID NO: 386265 - DNA, 1020 bp, Salmonella enterica
atgactgataccttttccgtcctgtttaagaacgggatgctggcagcttacgccggtaattcacagaccccgttatttctggttatgccaggtcccttaagtcgtttttatctccgtgggaacgtggtggtgcatgacagcaaaacgcagtccccccaggagatttaccaggctgaaacgcctgaagaagcggccatgctactgaaggctgtgcaggatgaaagacagcgctgtcataaaagccggaagaactttttactttcctacctgatgctgatactgctcatcctgattggtgtagcaaccttcacaatggccacctcgtacatcaggcaggatgagattaatacgccacaacgggtacctgccatatcgcttttaaaacccgccagaaatgagcccgtttccgtggacatcgcagcagcgccactggcagctgttgcgcagcagaaatccgtgccggttgcgccgtccatccaggtcacacctgacgactcccgggttatccgtgctgccagtcttaaaaaagccaccgacagcggtcgttacaccattaatttatccggcggccgcgcacggacgatttatgtcttttccgacccactctgccctcactgccgtgaaatcgagcccatgcttgaggcactgacgcgcgattacaacgtggttatcttcccggtgacgcttgtcgggaaacaaagcaccactgaagccgtggcaccggttctttgtgccgcgccgcaaaaacgcgcgcagctctggcagtccctctttaaggcggacggtgtgctgtccctttccgctgcggaagcagactcaccggcacaggtcagctgcacggacggggaacatgctctcgcaatcaatgaccgcgcctttgattattaccagctcccgggcacgccacagttaattgcggatgatggccgggatatccccttcagcgccctcaccagtgatgacgtgctggcccgcttcatgaatgcccccataaaggagcctggcaatgaccaccggtaa

SEQ ID NO: 386266 - DNA, 567 bp, Salmonella enterica
atgttcagatcccattccgcacaggtcatgagcgcatcactcaggtcactggcactggtttttctggcgggtattccggtctgtaccgtgacggccgcttccatccaggtgggtttctctccggaaggcaccgcgcagcaggtcgtactgaataccatcaaccagtccaggcagtctgtccggatgatggcatattcttttacgtcgcccgaggtggtaaaagccctgatcaatgccaaaaaacgcggtgttgacgtcagggtcgttatcgatgaaaaagggaatacctgcgagaaatgcaaagccagcaaggctgcaatgaacctgctggttaatgctgatatcccgctgcgcacggtcagcaaatataaaatcatgcacgacaaggtcattattacggatggagccaacgttgaaaccggctcttttaatttcagcagcgcagcaaataagtccaattcagagaacgccatcctcatccaggatgtaccggagctggcacagcaatatcttcagcactggcagtcacgctggcaggcgggtcgtgactggaaatcgacgtactaa

SEQ ID NO: 386267 - DNA, 564 bp, Salmonella enterica
atgactacagacactactgatttactcggccatttcgcatggtgcgcacagattgcgcttggcattgcccgccgagacaaaaccgtcactaccccggttcaggaacatatctttttaatgaactggcttacaacagcccagaaaaggaaattattcccacgggaaatcgcgggtgaaattgattatctggttcgcctcggaaagcaacaggggatcatagcggggctgaaacgcaagctcacttttatttacaagtcctgctgtgaagatatcagcgaacagagtgatttatttcgtctgacctttgcgctggaagaactcaaaaacactggctggagaagtcataccctctcgaccacagactggaaaaagggatgggaaggtcccttcagcccggccatctacattgaattacccgcgctgcaggaagcatttactgatgaaggaaaacaattaaaacccttacatattcgtatttctggagacagtgaacacatcagtaaaacacttaagcgttacaaggtgaaaaatataattattacccggacacatccatcaccctga

SEQ ID NO: 386268 - DNA, 597 bp, Salmonella enterica
atgttgatgttaaaggcagataatgacaatgctattatagttttacatgagatctatggtataaacgatcacataaaaaggatgtgtgatatttatcatgagtcagggtttgacatcttttgtcccgatcttctgaggcgtgatacccattttctttatgaacaacatgaacaggcgtataattattttaagaataactgtggttttaacaccacagccgtagaacaactggtaaatgaacttaaggagaaatataaaaaagttattattatcggattcagtgtcggagcaactctttcctggctttgttcagaaacgagccaatgtgatggcgtagtgagtttttatggtagtcgcattcgtgattacatagatgtcatgccgcgttgccctacactggtcattcaggcaaagtatgaacaggcatataacccctctcatcttcagcaaaaattagccagtaagcccatgatgtcattctatatttttaatgggcaccacggtttttgcgatcgtttcagtccctcatttaatgaggaagaatcaaaaaaagccatgaagctttcatttgattttatcactaaaatagttggttaa

SEQ ID NO: 386269 - DNA, 966 bp, Salmonella enterica
atgaagaagaaaaacagcacacccacgccacatgatgcggcattccggcagtttctggcacagccagagatagcccgcgactttatggaactccatcttccggccgaactgcgcgccatctgtgacctcagtacgctgaagctcgagtcaggctcttttgtcgaagatgaccttcgccagtatttcagcgatgtgctttacagcctggaaacggctgaaggaaccggatatgtgcatgttctgatagaacatcagagctcgccggatgttcacatggcctttcgcatgacccgctatgccgtcgccgcgatgcaacgccatctcgatgctggccataaaaaactgccgctggtgataccggtattgttttatgtggggaaacgcagcccgtacccctactccacccgatggcttgatgagtttgataatccggaactggcgggtaaagtctatggcggggcttatccgctggtagatgtgaccgttattccggatgatgaaataatgaatcatcgcagcatggcggcactgacgttactgcaaaagcatatccatcagcgtgacatcgccacgctgaccgatcgtctggccacgctgttgatggcggattacctctcttcaccccaggtgattgcgctgatacactatctactacaggcaggcgagtcagctgactccgaagcctttgttcgcgaactggcacagcgtgtgccgcaacacggagacgcactcatgaccatcgcacaacagcttgaacagaaaggcatcgagaaaggacgccttgaaggtatccggatcggcgaagagaaaggccgtaatgaaggcaaactcgaaggaaaactcgaaggaaaactcgaaggcaaactcgaagtcgctcgtaccatgctgcaaaatggactcgaccgcagtaccgtcatgaagatgaccggtctggaagcggaagatctggagcaaatccgccattaa

SEQ ID NO: 386270 - DNA, 465 bp, Salmonella enterica
atgaagaaaattttgaaacctttttttctcatctccgcattggtactggcagtcatgcctctggctcactccagcgaaaacggtgcagatacgataatgaagattcacagtgcgtttgactaccaacagacccgggaacgtctgcttcaggcggtttcaaagaatggtctggtattatttggtgaatttgatcatgcaaaagcagcgcgtgatgcaggtcttggcatgccgccaaccaccgttctggtatttggtaacccaaagggtggaacccctttaatgctggctcatcctgaccttgctctggatttaccgtttcgggtgcttgtcagccagctccctgatgggcaggttaatgtcagttatcatccggcagaagagctccagcgttatggcctcgatgcaacctcagtacaagcgctgaaaaaacttgagcaactcgtccagaaaagtattcaaccatag

SEQ ID NO: 386271 - DNA, 801 bp, Salmonella enterica
atgcttagtacattacccgatttacacagaagttttgcagagcaactcaagcttaaatttcagtctgattcgcggattcactcccttctcgctggcggctcgattattcatggcgggtttgataaatactccgatctcgattttgtcgttgtcgtagaccctctccactatgacgaaatcatggcacagcgtagggagttcgccggaacattaggccatctgctacatgcttttaccggggaacatgtcggagagcctcgcctgcttatatgtctgtatggacctgaactccttcatgtcgatctgaaatttgtcacactggacatgctcactcaacgcgttgaggagcctgcagtgttatttacccgtgataatcttgctctggagcgacagctggcaaaatttcgtgctcactggcctgacatgacgccggaatggtttgagtcccgggcctggatctggctccattatgcagtggttaaactgggaagaggcgaactctttgaagcgattggtatgctgtcatttttccgcgagcaagtgctgggacccatgctgtatcgccgagcaaatcttccgcaacgtggggttcgccgcattgaatttcatggctttgatcctgatggcctgctgacttccacgctggcaacgcacgatcgtgactccgtcagtatagccatcagaatggctgttgatgcttatatcaatctgcgtgctgatgctctgcccgaaaatactgcagacgatgcggcacgtcgggcggtacttgccatgctgaaagagtattctgacaggggttaa

SEQ ID NO: 386272 - DNA, 774 bp, Salmonella enterica
atggacaaagcagaaattttggagcagggttgttgggctgagatcaatatcgaagaatttgcacaaagggtgaaaggtatttcacgagacaagtacccttcattacgttgtatcgcatgtgagcaaagagttcatgatagtggcttagttactcctaatcctgactatagcaccagattctctcattcatctccgcctgataacggcgaattttgccctcttgggtctacatctcaacgtttcggtggcctttccgggaatgacagaacagcatcaacagaaattgctgcatctcgccgaaatcgattcatgcaatttgataacctctgcaaggcgtggatagtttgtaggtatttacgtggaggagaagggaagcttgatcaaaagtcattcattcgtttggtcagaatcgctgatagttttgggatctggcattatagctatatgccagactggggaatcccgcttcttctgatgttaatggataaccatccgacgccaaacggtaaatcagcttttttctattcacttaaaaaagatagacttcgtaaaggagtggaatggcaaaatctgaatgtccgacttgaagcgcattgggtgagcagtggtaaaccgatagtacctactgaaggtaaaaaagcttcttttttactcacgatacccttcagtgaagccatttatgatgaaatcttgagcaaggaaaatcctgcatggtgcactgaaaatactcttagaactcttcacgcttttagcgttgaagagacagatggctaa

SEQ ID NO: 386273 - DNA, 408 bp, Salmonella enterica
atgagattacagctgaaactgattatgccgggggggcaaaactttactctgcgtctggttgattgtccggtcagcgatgataagatttctcaggtgttatttaccttttccccgcaacagggagccttgcctgcggataacttacaggtatttgctaatgagttagcgcaaaataaagatggtgcgaaaaatgttggcgtggtgattttttccgctcagagcaacgctacacgttttaatgtgctggatgtcaatgggatgtcaaaagctatctatagcttgccggatagcaattacagtaattcacagtggacattctacgcccggatgcaaaaaattgtcagcatggaagatgtgtcatcagggctggtaactgccagagtgctggtgaatatatcttaccagtaa

SEQ ID NO: 386274 - DNA, 171 bp, Salmonella enterica
atgaacctgatgacgtggctaacaggaaaaacactggcggagctggtgaaaaaagggcagttgatcccgccagaaattaagttacctgtgtatccggccagccactacaaaaaaactggtatgaacaaggtattcctcacggaggcgttattgggcttacggcgatcatga

SEQ ID NO: 386275 - DNA, 291 bp, Salmonella enterica
atgtctgtttttcaccgagtaaaagaccgtgatcgccacggcaagccgctgccgcatgcgcatgttggctaccctggatgtgatgggaagatggcgcactatgccgatcttgcacctggtcgctggccggactggaacaccagccacaaccccagtgcctggaacaatctttaccacacccgcccgcgccgcgcgtctgaccgtcagaaccttaaacgcgtgatgcagggagcggatccggatggccttatctggcaccgcgataaccgcccttacatctacttttactga

SEQ ID NO: 386276 - DNA, 462 bp, Salmonella enterica
atgaatcatcgcagcatggcggcactgacgttgctgcaaaagcatatccatcagcgtgacatcgccacgctgaccgatcgtctggccacgctgttgatggcggattacctctcttcaccccaggtgattgcgctgatactctatctactacaggcaggcgagtcagctgactccgaagcctttgttcgcgaactggcacagcgtgtgccgcaacacggagacgcactcatgaccatcgcacaacagcttgaacagaaaggcatcgagaaaggcatcgagaaaggacgccttgaaggtatccagatcggcgaagagaaaggccggaatgaaggcaaactcgaaggcgagcgtgaagccaccctgaaaatagcccgtactatgctgcaaaacggtctcgaccgcagtaccgtcatgaagatgaccggtctgacagcggaagacctggaccaaatccgccattaa

SEQ ID NO: 386277 - DNA, 267 bp, Salmonella enterica
atgtctaaagaacttttgatggaacgtataagccgatttgatttacaggatcaaggcgttgaaattcttctggccctcgatggtttcatcgttaatgaacctctgaatgttcgacaattaaagatgcatgcaaaactcatgaaaaacaccttgtcaacaaagggaattgttgtaaaaaccactcaatcacaggagcttgtagcatcatttcacggttttaaagactggagaaatgcagttgatcagctaggtagttcagagtcgtaa

SEQ ID NO: 386278 - DNA, 387 bp, Salmonella enterica
atgagaattcttaacatcctcacccgccggttagttcttgagagtgaatttaacgaaacagttcagttttaccagaacctgattgggcagacagccagactggcatttgattacccggaatatgatttaaagcttgcccaggtcggttctctgttatttatcgggggaacacctgaaggtctggctccttttcaggcaacacaggtcacttttctggtcagcgacatttacagttgggaaaaaagtctgcccgctatgggcgcggtaatactgaaacccgtaaaaatcgtacctaccggctggaatatgcttgtcagacatcctgacggaatgcaggtagaatatgtggaacacaagacgaaaaatcccgacgatgacattttctga

SEQ ID NO: 386279 - DNA, 1650 bp, Salmonella enterica
atgtttaaaaatataaaagtaaagacaggttttctgggcgtaatcgtgttttttgcgtgcctacaactcctctcaagcggcatcagcattatcttcctcagtgaaaaccagcaaaacatcagtctgatagacaacactgttcagcagcagaaatcgctgagtcgcttgcgtgataccatttcaaatataaggcagaccgttgatggaatacgctcttcactgcgttacaacagtgctcatgacatatcagcatcgctggccaccgtgcaaaaaaatatcaaaatcgcagcctcaacatttgatgagtttatgcgtatcccaggcctgacctcatatgaccccgaagcaggcaaaaccatgacgcgtgcttttgagagacaaatggcggttacggagaaaaattttaatgctctgaaaaacttcagtacagcagagatggctttaagtaccctttctacttatgagacagaacaaaacgccgcccgcgtggaatttgataaacagtatacagattacattaaggccctggatggcattatggcctcggcggtcagtaacagtagcaacgcgtaccggacatcatggggaacaactgtcgcaatgttaatactggtagcggtgctgtttacaggctccctgctgtggcttaaccgcctgctgatcaacccgttgcgcgagctctcggctcatatggaaagaatgggtaagggtgatcttagctttccggttgaagtcaggaataaaaatgagattggtcagctctgtaagtccctgcaggacatgcagagtaatctggcgggaacggtgaaaactatccgtgatggcgcggaatccatcaatattggcacacaggaaatagctgcaggtaatgctgacctgtccagccgtacagaagaacagtccgcagccattgtagagacggcagccagcatggagcaaatatcgtcgacggtgaaacaaaatgcggataatgcacagcaggcgtccgacatgattagagaaagcgccagcctggcacgtgaaggagtacaactgatgcatgaaatggtcgagaaaattcatgatatcagccacaatgctcagggcgtgggtactatctccgatgtcattgacagcatagcgttccagacaaatatcctggcattaaatgccgcagttgaagccgcccgcgccggcgaatcaggccgtgggtttgcagtcgtggccagtgaagtcagaaatctggcccagcgtagcgccacctcagcaaaagaaatcagtgcactggttgaacaggccggttcggtcatcagcgaaggtgtcagcctcgccaacctgagtggcgaaatgatggctaaaatctccggtgccgtctgcgacgtcaatgtgctgatggaaggtatttctgctgcatcagatgaacaaagtcggggtgtggagcaaattcgcgtggccatcacacagatggaacaggtcacacagcaaaatgcggccctggtggaagaggtcgctaccacagcatccaatgttgaagaacagtctgtgcatctcacccggtccgtggccacatttaatctgggtaaggatgaagaccggttcgttgccccacgatacatcactaagcaggaaactccatcggaaaaaacctgcaccgatgagaactggatataa

SEQ ID NO: 386280 - DNA, 309 bp, Salmonella enterica
atgacggataaaaaatggtacagcgtggaagacattgaactggctaagtcggccctgagtgagatgccagatttaacgccaaatcgcctgactaagtcggatgttcttgaacagcttaaagagcagattgttgaactgtcactcaaaaagggttacagcgttgaagacattcgaagcgcgctggacagtgcaggaattaaagcaagtgccaagtctgtacgtgacattctgaattccactaagaaatcaccatcacggacatcgagaaccagaaaatccatcaaagagacaaccgaaaaatctgcttaa

SEQ ID NO: 386281 - DNA, 279 bp, Salmonella enterica
atgacaaagccgcagcgcaagcggctgaccggagggaagacgcgcgaacgggtgcaggcagcgggcttcagccttaccttgtttcaggaccggaacggggtagcgtcagtcacagcaaaagtgaacaccgctgacgacggcagggaggaaacaccagaagaagccggtttaccggctttcatcaccggccgcacggcggccagtgagagccgcgttgccggaacggcaaccgaaggcgtgttgaccatgctcagagagtggaattcagacagtaaataa

SEQ ID NO: 386282 - DNA, 708 bp, Salmonella enterica
atgactatatctataggtgttcttgcaggcatgggcccccgctctacagccccgttcattgatatgctggtaacagactgccaggttggctatggcgcaaaatatgatctggattttcccaaaatgcatattatttcattgccaacacctttttatcccggcaggaaaattgaagatgatgcgatgatcgccgccctgcaacagggcattaccgaactcgtcaacgccagagtgagtctgataactattccatgtaaccttgcgcactgctatttttccgaaatgaaaaaggcgagtggcggtattccgcttctgcatatcgcagacagtgctctggagtctctgccggcagaagcaaccagagtcgcagtactggctacagaacccacacttgaggcaggtttttatcagtcacgaataaaagcgtctggcagagagattattgattcacagaagcttcgtaaaatgaccacgttactgattggacttgttaaagcgaaaggttttcatgatcctgatgtgcaggcagaatggaaaaatttagtggctgaagtggaaactcatcaggcagaggcacttcttattgcatgtacagatctaagccccctgataaatgtaaatccttacagctttgtaatcgtcgatacggcagcaagtctttccagagcaactattatgacattcaggcggttgtgtgggtacagataa

SEQ ID NO: 386283 - DNA, 159 bp, Salmonella enterica
atgaaactgccgcaacaacccgttatctggtgtgtactgatagtgtgcctcacactgctgatattcacttacctgacccggtctcgcctgtgcgaagtccggctaaaggacggaaaccgggaggttgctgcaactctggcttacgaatctggtaagtag

SEQ ID NO: 386284 - DNA, 432 bp, Salmonella enterica
atgcgtaacattattacccccgctgtactgaataccatgatcccccaggaattcgaagactggcgcgacggcggcgaagacctgcgccgcgaactgacccacgccgtgatgcgtgacctgacatgtcccacaggctgggacctgaacggcgaataccgcagtgagtttggtggttttttcccggtgcagatccgtttcacgccagcccacggtaatttcagcctggcggtatgcagccccggcgatatcagcccgtcctggatggtggtctttattccggtcagcggtcgcccgctctctgttatccgcacgctgccagcctggtcgccggaggttatcacgcatacactcagcctggtggctcacctcgatgccgatggttacagtcaggccagcatcatcagcgttctggcgatggagggtgcagcatga

SEQ ID NO: 386285 - DNA, 243 bp, Salmonella enterica
atgacagacaacaccatgcccccactgaaatccctgcctgacgggtctttcacccgcgaacaggccgaagttgtggcggcacagtatcagaatgtggccatcgaggacgatcaggggacgcactttcgcctggtcgttcgcaaggatggtgaaatggtctggcgcgtctggaattttgaaccgggcggcgagtacctgatgaatcgtttcatccaggactacggcatccgtaaaacgcagtaa

SEQ ID NO: 386286 - DNA, 309 bp, Salmonella enterica
atgaatctggcttttttcctggtgtccttcctttgctccaggtcccgggtgctgtgtttttcgcgggtcagcctgcgtcaggggacggaaaagtcaacaggtcgcgtgaacgctggccgcattaatttttttcgcctcaaagggacggctaaaaaaatgaacgcgtcccctgtggactttaccgccgcgcctgccgctgacgtcttcccacgaaaagcccctcaccccggagaaaaccggcagagggaaatacaccagaaagaagccagaggcttcagggagcaacatgatggcaacacgcggcgttaa

SEQ ID NO: 386287 - DNA, 1245 bp, Salmonella enterica
atgacacaatccaccgcgctggcactgactgccgacatgaccccgccgccagtatccgaagacagccccgcgcagtcgtaccgggcgacgtactccccggacgacaacaaactgcgcctttatgccgcgttacgactcgatgatgagacttatcagaagatccacgccgcaggttttcgctgggcgccgaaacagaaactgtttgtcgcgccagcctggacgcccgcccgtgaggacgtgcttctgtcccttgccggggatattgaagacgatgacaacaccctgtttgaccgtcaggagcaacgcgccgaccgtttcagcggctacagtgaaaaacgcgccggggagtcagagcagacgctggcgcaggtggacgcgctggcgtcggttatcccgttcggacagcctattctggtcgggcatcacagcgagcgccgcgcgcgacgggatgcgcagcgtattgaaaacggcatgaaacgcgccgtgatgttgtttgaacgtgcggaatactgggaggatcgggcgcatgcctccctgcggctggcgaaatacaaggaacgcccggatgtgcgttaccgccgtatcagaaagattgaggcggacaagcgcaaggcggagcggaatattgcacaggcgcagaaatatctgacgatatggcgagcgcagacgctggatctgaacatggcgcggcttatcagcaattacgatcacctttacacctgtttcacgctggataaatacccgcgccccgcagataaaagccagtacgaaggccagatgtccctgcattccgcgcttgagaatgagattatcaccttcgaacaggcccgcgatattgcggccccttatcatgaacgcacgatccgccatcagcagcgctggctgaatcactaccagaaccgcctggcctatgagcgcgccatgctggacgaaagcggcggcgtggttacccgtacccgggattttgagccgggcgggcaggttcagagccggggggcgtggctgacgattatccgtatcaataaaagcggtggtgcggtcagttcggttgtcaccccgcattacagttttatgcgcagcaacgggaccatgacactgacgcccgaccgcatcatggactataaagccccgtcagcggaagaagcccgcgccgcaaaacaggccgcgaaacgcccgccgatcgtcaactggccgggagggtttccgggcgatgaccagagccgaatggtcaaaaaccccgcctga

SEQ ID NO: 386288 - DNA, 144 bp, Salmonella enterica
atgccgggtgatggttttttctggccagtgtgtgtggttttttatctgccggtaataatacgctgcctgtgcctgtgcctgtgcctgtgcctgtgcctgtgcctgtgccttctcattctgcttttgcttctattccccttctga

SEQ ID NO: 386289 - DNA, 255 bp, Salmonella enterica
atgtccggatttaatctcgcggcaaaatcaaaagaagaccaggataaggaggccattgacctggtcgcttcaggtgtggcgtataaagaaagactggcaatgcccgtggtcgctgaactggtggccagagaacagcctgaacaactcagagcgtatttttgggggagattgcactattaccgccagttcagtgagcagctcccggataaaaaagccccggaatatgccagaaaagaggatgaagttaaaaaatag

SEQ ID NO: 386290 - DNA, 411 bp, Salmonella enterica
atgcacgcacccgtgaaagaaatcatgaccgatctcctgaaatatgacctgtcatctgatgaagcgttgctggttctctgtattacgcgggaggatatccgcatgttgaccagtgagtggaatttgtccgaagaggatattacgtgcgtcatgcagcgactggatgcgacgtatgatcagggggccgatgtgagcatgatccgtcgcatcactgaagaactgatggacgaccgccacgcgctacgtgatgtcagcgttccggccagcgcgctgcaaaaaataatgttactggcaggcagtgaaatgcagcggctgcacgccgtggcagaagacgggggcggggatgctgatgcattcctggctgaagaactggacgccatgcgccagttacagactgcgatcgacgcctga

SEQ ID NO: 386291 - DNA, 783 bp, Salmonella enterica
atgcgcttaatgacagagggaattaactggttttacactctgacaggacagggggaaccggtcctgtttttacacggcgggctggatacctgcgtcaattacacacatttactgaaagaactggcggatggcttcagcgtcattgccgtggatcgccgtggacacggcagaacagcagacacggatgcgcctttcgactgtgccctgatggcaagagaactggctgcgttcctccgtgaactgaacctgcctccggttcatatcatcggctgcagcgatggggcaaacatcggtctgcatatggctggctgttttccggagcaggtaaaaagtcttatcgctgtctcgggaaattataaaggacgatccggcatgtcagacggatgccttgccatgtttgacgcgctgtcagtggagtttgttcaggaaactatgccggacgttctcagacagtacagcgaactcaacccctcccccgcgccggaaagctatatcgcaaaaaccagacaaatgtggaaccaggagattgtcatcagccgggaatgccttgctggtatacgtgtgcctgtacttatagtcggcggagacagagatatggtactgccggaacagcttctggaaatgaaaacgcttattccggatgcatccttactgatattgccgtattgcgggcattatatttttcaggatttcgcatggagttccactgctgtatccgccgtacaactgttcagggagtttataacaacgcgtttctccggaaataacgcgatctttatttaa

SEQ ID NO: 386292 - DNA, 501 bp, Salmonella enterica
atgagtgggaccgcggtcccagatgactatccgactgcagcggaggtgagtgggaccacggtcccagatgaccatccgactgcagcggaggcgagtgggaccgcggtcccagatgactatccgactgcagcggaggtgagtgggaccacggtcccagatgaccatccgactgcagcggaggcgagtgggaccacggtcccagatgaccatccgactgcagcggaggtgagtgggaccactgtcccagatgaccatccgactgcaacagagatgagtgggaccacggtcccagatgaccatccgactgcaacagagatgagtgggaccacggtcccagatgatcatccgactgcagcggaggtgagtgggaccacggtcccagatgactatccgactgcagcggaggtgagtgggaccacggtcccagatgacgttccgacagcgaaagaaatgagtgggggcatcagtaacgttatacgtaatattaagaagtcattatag

SEQ ID NO: 386293 - DNA, 969 bp, Salmonella enterica
atgagacgtgcgccggtcattccaaaaaatgttgtaagtccaactactcctgttgaagccgatgtttcaaccacttcggccgcacctatggtggattctttaattgctcgagtcggtgcaatggccagaggaaactcaattacacttcctgtttgtgggcgagatgtaaaattcatactcgaggctattccaggagatactgttgaaagtgtttcctatatttggtcaggcaatgaacgagatcaggagctactgaccgaggactctctggatgatctgataccctctttccttttaactggtcaacaaactccagcttttggacgtcgggttgatggcaaaatagaagttgccgatggaagccgccgtcgtaaggccgcaatactgacttcctgtgattacagggtgttggtgggtgatcttgatgatgagcagatggaggctttgtctcgtcttggcaatgattatcgtccaacaagtgcatatgagcgtggtaagcgttatgcgtatcggcttgaacatgagttcggcggcaatatctcatcgttatctgatgctgagaatatatctcgtaaaattatcactcgttgtataaatacagctcgattgcctaaaactgtcgttgctcttttcactcatccaggggagctatctgcacgagctggtgatttgttattcaaatcttttactggtaaagaaaaacaattattgcagcagacagaattcttacatgaccagaagaaatcaggcgttatgtttgaagctgatgaagttgtctcgttgctaacggaagttttaaaggacacatctgcaggaacaagaatacaaagttcccggcatcagtttgctccaggggcatcagctttgtataaaggtgataaaattgttgttaacttagatcgatcacgaatatctgcagattgtattgagaaaattgaaagtattcttagaggattggaaaaacactaa

SEQ ID NO: 386294 - DNA, 480 bp, Salmonella enterica
atggccgttgttctgatgaacatccgtaagttcaaaagggaggattttgcgttttaccaccccggcggggcgttaggtaaacgactcctgacaacagtccgggatatcatgaaatcaggagagaactgttgtgccgtggatcagtcaccatcgattctggatacccttttcgccatgacatcatgtaaaacaggtgcagcttcggtgatgaatgcacagtttgagctcactggcatagttacagacggtgatatcagacggtatgtgatgtacaacaatctgttccttgataacccggtgactgaagtcatgacgacatcacctgcttgggtttatgaagatgaactggtggaagtggctgtcaggaagatggagcaaaatagcccttctccggtctcggtgctacccgttctgaacagggacctgaaggtgactgggatactcaacctcaccgatatgctgaaaagtggctttctgtaa

SEQ ID NO: 386295 - DNA, 204 bp, Salmonella enterica
atgactgtatttctcatcctcaccgccatcgcatatggcatcttcaaaaccggttgcttcatccttttagtggtcaaggggtatcagggctggacattattctggaaaaactatgaccgtctccctcatatcatccgttcccgctgccgataccagagacgattcattttaggacgcatctggaagcgagccttcagccgctga

SEQ ID NO: 386296 - DNA, 291 bp, Salmonella enterica
atgaatgcggataacgaaaggtatttcagcgatcttatcgaggccaaaaaatttaatggctatacgctggtcagtggagaacactggcagaagcccacagtcgacgaaatccagctggtccggggacttatccccctgactgacagccagctggccaaccgactggacgtggaagaacgcaccatccgcaagtggaaatccggcgagaccagtatggtgtacaccacctggtgctgcctgtgttggctggccggactgggtatgccgcccgataacattatcagcggctga

SEQ ID NO: 386297 - DNA, 1128 bp, Salmonella enterica
atggactacacaaaaaatcagcatgtactttcacagtgggtgctacgcaactttcgcagcgatgacactgccctgtctgcaaaagaaaagcagcgagtatggtgtcataccgtttatatgacgcccgataaggaaaacgttctccacacgcaacctctgccaatatccagtgtggctgtatcgaaaaactgctttcgtcttattgatgctgagacaggactgcctttcgatattgaagacgaactgggtgtgtacgagcgcctgaccgccggggtcgtgaacgatataattcacgagcacaatttctcacgcctccgtcacacactgccggaagattttccggttgagaaacttgccagtttcgcggttatgcagttaatgctcaatctgcacaatccgcaaaataaaaatccgtacaaacatgaactgcttgaacagttccatgctgatatacaggatcatttatcagaatacatccattcgataaatcagttgcctcacactaatcctgagttaatggaagatcatttctatcgcaaaattttgcgcgttgctaattctgtttcttccgaaaatgataaaagcagagcgctgtttgttttatttgggcttttatcaatcctgaataagccgaccctttacgacaaaatcaataaattaagaaacaaaattttttctggtatcataaccattgagattattcatacaggccatgatttcgacagcactgaacacaggccagcattcggaatagcacccaacattttttgtctgtacaatgatgaaaataggatatatcttcccttatcccacaatttcactctgtgcttcattactggtgctgcattgtgttttagacctcgtatagacgtgttctctccacgtcccgagctgctgaaatgtcgccatgatcggagccttaacttttataaggtctcgtttgattacattgataatgtgatgacaactattgatatgtacaatgtgggttcgtccagtaccttttattctgcctatcagttgagcaagcttaatgagtatctggataagcagaacaaagatcatgactattattacacgccggaaaaccctgtactgtggcaacctgctcaggaggatgaattatga

SEQ ID NO: 386298 - DNA, 1593 bp, Salmonella enterica
atgacatcacttatagttacttcgttacgcaaaaccggtccttgccttagctctgtacttgtagaggaaatgctgaaaacccagagagttaaccgtgataccgcgcgcaaacagatttcccgggcggcttctgcaggtcagatccactgtgttgacaagcttttccccaagcgcgaacgatttgtttatctgaagcagcagtatggtaccgggcgcttctggtccagtctcaatacagccctccttgataccgggtcggcctacggtctcgccctgagttgcctccgggctcgcggggggatcctgccggtcgggcattttcctgctgcctgcggttcaccggtagcaatgaaaaacagattatcctggaagtcagttctggacggtctgcttcagtacaaaatggtcaggttcgttacgttaccaggtctcggggagtgtgtggcgctgacagaaaaaaatgataacgggtatcagcgcgcgctacatcccctcaaaggcaggatgcttacagagtcagttctgatgaaatccctgagtcagtgggtccgtcataacggtatcatcagttacgacacgttgcgcacacgggaagaacgcgattcagatcaggcgccctgtgtggcaaattttgattttgacgtcactgcagcatcctatcttaatcctcttctgcagttctcccggtcaggggaaattcggcctggcttctttgtctgcgatatgcttctgggatgtaagctcagtcttgtgcatctccagccctttattacaaaatgtcgttcaataaacagcatcaggaacagcccaagatgcctgtttatgtttgttgccgacgaatacagcgaagaagcatttctggaaatgaagcgtgccgggataatacccgcgacaccggagaatcttttcggaaaagactttgctgatgctctctttcagttaagggatctggttggttcaataacgcacagcttaaaagataatatagccgcaatagatgacatcatgtccaaacttgagagtattgccggagtaaccagtcagcttcagggggatttatttgaatatattgttgctgagactgtgcgcataaacagtaatgatgttgaagttggtaaaatatgtaagtcagagaggaaggggactgcagaatgcgatgtcctgagccgacagggaaatgctagaatcacctttattgaatgcaagggttataagccctattcgacagtgaaacatgaagatgtgaagaaatggattggtaaacaggtgccggtatttttcgattatgccaaaagagaataccccaatgctgaaattaatgttgagttatggactacaggaaagctctgcgatgattccagagagtctcttcgtaagtttcaagaaaataacttaactaatcagcgttataatataactgtcatggagccgcatgaagttcgaaaaagaataaaggcaacctggaatgatgctcttatccgggtttttgaaaagcattttctcagctatccggaaaaaatcgttcgccgtaaacatgttcccgaaccggtcaggcttgctggtcatgatgaggcaacagaattcgatttctga

SEQ ID NO: 386299 - DNA, 780 bp, Salmonella enterica
atgttgattctcgattgctcctcacgatctcaggcgctgctttcactttcttccggttttggttgcagtgtaatggagctaaaaaaggttttgttatctctcgatcttgaacagatttacgagacggatcattccatcatgatcgactcgcaacaatatctgaaagagtacgtatgtagggaactgggttctccgggcaagttcaccaccgcatactggtttcacggtacccgcacttcagctgacaatacttttgaccgtggtttacttccgctgaacaagactgagtcactggtgatggatatgctggtaaatctcgcaccagacactgtggtcaaagagagattggaggcgtggaattttcatgctggcgtacctgatactctcttccggaaacgcaccagaaacgaaatgcactgggggccatacgggcaccttgtacaggaggctcattttcatgcccgcaaactctggcagcacgattatctgcggctacctgagctggtagaagatgtctgcaatgcttaccagaaaaggtatgggcaggatcttacagcacattatcttaaggtactgaaaccctgcatcgtctgtttcagggcagatattgagtatgaaaaaggtgcatttgaagccgcgctgagttacgcgtacacgtccgttagagatttgcctccggatagcggtgcagtgttcggtattgatcgacatggtatatcagtttgtcccgatgaaattgtgaacgttgaattcgcgaatttgcatgagattgatggctga

SEQ ID NO: 386300 - DNA, 273 bp, Salmonella enterica
gtgaacgatttaaaaattgagctcttctctgaagacgttgaatatgacctaaccaacttcgactgcggagaagagtacctgaatacttttcttactgatcacctcaaacgtcagcacaatagcaagattttacgtggttatatgcttgtcacgagagaggagaaacctcgtgttatggggtactacacgttgcttgccagcagctttgagaaaaatatcttccctgtaaaacgcaacaaaagcgtgtgccctaccaaaatgtcccaagtgtga

SEQ ID NO: 386301 - DNA, 270 bp, Salmonella enterica
atgccagtactgaagaaacaatgcatcgacatgcgactgaacgaagacgacaaaaaaatgatcgaggaagctgcagcaatgactaaccagtcaatttcacagttcatggttagtactgcttcagaacgtgcagcagaagttattaatcagcatcgccgacttatcctcaatgaggagtcatgggatctggttaaggatgcaatctgcaacgctccattacctgatgatcgactgaaacgttcagctaagcgtctccaggaactgaagtaa

SEQ ID NO: 386302 - DNA, 297 bp, Salmonella enterica
gtgaaaaccgttaaactcacgccgaaagccagccaggatctggaagatatctggttctacggttatcaccatttcggtgaggttcaggctgataaatatatcaatcatatatctgatattttccggatactgggtgagaacagtataggcactccaagacctgaactgggtgaatatatcaatgccttacctttcgaacgccatatcatttattttctgcaaactgacaccgatattattattatccgtatattaagccagcatcaggatgctggtcgtcatctcaactggcagtaa

SEQ ID NO: 386303 - DNA, 492 bp, Salmonella enterica
atgagagcaattaagataagaagcatctgcgcagctgtcagtttcctgcttgttatggcatcgtccattgtgttctatatatacaagcttgatcgacagaatggcatggacatagactgctcgacgatcattcgttataaccatcttaaccctgagtttaatgccacactgaacatgatttttcgtctcgataaacaattctccggtcaggtaatgttgtccggaaatattaattctggagatagagcggagatagtttccaggacgattcatttctcctatgaagtgaacaggcctggtgagatttcagtgaagcacatgtattatgtaaaaaaaccgcgagacaccgccagtgatgaaatattcagacacggtttcttttatgtcccggagggcactgtccgtcagctcaggatcaatccgttgttaaatggctggttaattgaaaatctgcagtcgccgtttgcactttgcgtcaataaggaccggtag

SEQ ID NO: 386304 - DNA, 807 bp, Salmonella enterica
gtggattatttaatcagttctctggccaggtatcgttcagatgatggcacaatctggccggtctcggatgaagattctgtcattattcttacagcaaccatgaacagacttttagcctatctgctggaaagacaggggcaggtgattaaccgggatgagctgctggataatgtctgggatttacacggcctgcgctcgtcaaaccacacccttaataaatatatttccgaaatcaggaagcactttgtcagcaccgggattcaggcagaatgtattaccactgtgccacggattggttttatgtttaatcaggatatagaggtcgtggtgatgacagatacattcccggtgcatgagtcggttacagcatcagacagcaccggagctggaacaaaccgtcggtattctgcttttccgaaacaacacagaattatctttaacgttgtgttattacttatgtttgtcaccagcatcgtaattttttatgcaggtagtcagatttcgacaaaaaaagcagccaccttgaaagatactccgacctattttctttttaactatcagagttgcccggtgtacaccattcagaaaaactccgacacattcttagagaaaaaaaaggacgtgtttatcactctggcccggcagaataacattaactgtatggacggggcattattcctgtatcaggcgtcagacgcttatatttatggtagtaaaggtctggtatttatcagcagatgcacaacaaaagataagcaatatatctcctgcttaaataattactggaatggctatgagagcaattaa

SEQ ID NO: 386305 - DNA, 798 bp, Salmonella enterica
atgataagcaccaacatgctcaggaaggcagaacgtttcttcagtaaggccggaacacggataagagagtcgatcctgtcagcagaactggctggagctgagtttgtgccttatgtgcaaccggtttacagggcttacaaggttgcaggcggagaagtgttattgaggatccgaaaagatggagtccttcactctccggagaaatacatctctgcaatggagtcatgcgaggtgattaatgatgtgacatgctctttgctgtctgatgttaaaacctttttcaacggctatgaaggagcccttcccgatgacttctatctttccttcaatatctgtgcgagacaactgaattccccggacgttattgaagcagtgaccgattttaataaaacatttgaaggacgcattgctgtattacttgaaattgtcgaacgtggcacgatgcatctcgatgactttgcgcttgacgcaatgcaacaacttaccgatgcaggtgtgcgatttgcgattgatgacttcggaaacggaagttcgtgtcttaaatatattgagcattcgggtttttcaaccatcaagattgataaatgccttacagtggccagcaacggttcattaatttattccgcggtaattgattcaatcgtaaccctctctgaacgattgcaaatccagcttgtggccgagggagtggaaaataaagaacaattatctcttttgaaagataaaggtgtgaatgtttttcagggttatcttttttcaaaacccgtcagcatgcacgagttctgcaaacatatttaa

SEQ ID NO: 386306 - DNA, 1170 bp, Salmonella enterica
atgtcagctaactttgcaacacctcctgaatttccgacctgtgccggaccggaaggcattctgtttgactttaattatggcgcgcgtgtttaccttccggaagggaaatggcatgtcattttaatggatgatgattccggcaatatccttttcagctgtgattctgacggcgggtgggtcgccagtaccaaaaaatattacatccgtttccgcattcaggtattccaccagggagaagcgcatccgatcctggatgaaacactggacatgaaggataagccggtcgtcatctttttcccgaccggaacactgggcgatatgcttggctggttccattacgccgagcgatttcgtcagctgcacaggtgccagcttgaatgcgtcatggggcaggaaatcattgacctgctcagcgcacaatatccggagataaccttctccacaaaagaatcccaccggacaatcaatccctacgcgtcctggtacgtcggtcttttcttcaaggctgacacacttcatcagcccgttgatttcaggaaagtcggctttcaccgcaatgccggctacatcctcggggttgacccgcgggagtgcccgcctcgcctgaagctggatgcagagcgaaaaattgcggagccctacgtctgcatcgccgcgcagtcaaccaaccaggctaaatactggaacaacggtcacggctgggcagaggtggtagcccaccttaaatcactgggataccgggtgctgtgcattgaccgccaggcccatcacggtcagggcttcgtctggaaccacatcccctatggtgccgaagacttcacgggcgacattccgcttcaggagcgggtggacctgttaaggcatgcgagtttctttatcggtctggccagcgggctgtcatggcttgcctgggcaactgacatacctgtggtgttgatcagcggattcagccttccgaatagcgaattttacaccccctggcgggtgttcagcagtcatggctgtaacggctgctgggatgacacgtcggttgattttgaccaccaggattttttgtggtgcccgcatcacagggataccccaagacagtatgagtgcacgcggctgataaccggacgacaggttacagggatggtggaccgtctgcatgcaggattagttgataattaa

SEQ ID NO: 386307 - DNA, 3063 bp, Salmonella enterica
atgaacaagatatataccaccgtctggtgcgagtcgcgccagcagtgggtggtcacctctgaactggcatccggctctggtcgcccgaaactggcaccaaagaaaagcggcctggcactgctgctgggggcaatgctgctgccctcagcgccggtcatggccgtggattatgtggacgtgatgctaacgggtgaacagactatttcttcaggagatacggccacctctactactatcaacggtggcagtcagtacatctacaatgggggctcagccactgagaccgtcatcaactatgggggcatgcaggacgtctacgttgggggctcggccactgagaccaccatcaacaacggtggcgaccagtacatcttaggtggcacagccactgacacttccatcaacaatggtggcaagcaggagatcgttagcggcggcacagccactgacaccactattagcggtggcagtcagaatgtctacaataggggcacagccactgacaccaccattaacggtggtagtcaaagcgtcttcagtggcggctctgtcactgccaccaccattaacagcggtggttatcagtatgtcaacagtggtggcacagccattgggaccaccatcaacacagatggcgagcagcgagtctccagcggtggtgctgccactgagaccaccatcaacgggggcatacaggacgtcaatggtggcacagccactgagaccaccattaaccataatggtcagcagtatgtcaacagtggtggcacagccattgataccaccattaacagaggtttccaatgggtctaccatgacagcacggccactggcaccacaatcaacggtggctggcaggacgtcagcaataggggcacagccactgagaccaccatcaacagtggagagcagtacatccacattgggggcacagccaatgagaccaccattaacggcagtggtgaacaggccatttatggtggcacagccactgacaccaccatcaatagcggtggtgtccaaggcattttcagtgggggctcggccacagacaccaccattaacagcgggggcggacagtacatatccgtatccggtggcgggacagccacaaacaccactatcaacggtggcgaacagtacgtctccagtggcggcacagccaatgagaccgctatcaacagcgatggcaggcagtacatccgcggcggtggcacagcaactggcaccactatcaacggtggtggccgacagaacgtctccagtgacggtacggctactggcactaccattaatagcgggggcatgcagttcgtctacagtggcggcacagccattgacaccaccatcaatagcggtcagtcgtggctgcagacgggggcactggctgacggcgaaaccaaagtgaacgccggtggtgaactgctgatggacgctggctctgtcgcaacggacgtgcgcatcacggggggcaccctctctgtcgccgaccttaccaataccaccgccagttataccccggctcaggtcgataagctcaccatgaacggcggtaacgtcaacttcctgcgcaacagcaaaggtgaattcgcgaaactgactattacggaactgaacggaaccggaaacttccttttcaatacctcgctggccgaccgcaaagccaactttgtcaccatcgagcagggttcaggccagtttggcattgccgttaatgactccggtaaagaaatctcagaccacaccgacctcacagtgaacctcatccatgagaagggtggtgacattgattttgaaatggtcacggctaacgggcgaagcaccagcatggttgacggcgggacctacatgtacaccctgttcagcgagcagaataaagacggtctcaacggcggtaacgtctggtacctgggcgcgatgacggaagaacctggcggtggtgagaatccgggtggcggtgaaaaccctggcggtggcgagaaccctggcggcggcgagaaccctggcggcggcgagaaccctggcggcggtgagaaccctggcggcggtgaaaaccctggcggcggtgaaaaccctggcggcggcgagaatccggacggcggtgacaacggcaataccggcggtagcggaagcggcgacaagaagccgatgaccaccccggcaacggacgccatcctggccatgtcgaatgccagcctgaatgtcatccactccgagctggaaggcctgcgcatgtaccggacaaatctggataaaaccggaccggaaagtaacgtgtggggtcactaccttggcagcaaaaaccatacggataccagcaatggcgcggcgtatcagcttaatcagaacggcattgaaatcggtgccgacacgcggacggattttgcgcgcggcagcctcgtcacgggggcattcatgtcttacagcgacaacactgttaagcatgctcgcggtggaaaaagcaaaatcgacagctacggtatcggcctgtatgcaacatggtttgatgtcagcggcttctacgctgacggtgtggtgaaaggtaaccgcctgaataacaaactgagagccgtgatgaccaacggcggcagaaccggcggtgactggacgcagtatggtctcagcacagccgttgaaggtggctatcagtttgatatgagggacgacctgagcctcacgccttatgcccgactggcgtttattcagatgagcagtgaggacgtaaagctgagcaacggcatgaagggtaacaccggcacgccgcgctcggtaacgggtgaggccggcgcgaagctgaccggcaagttcagcctcggtgcggcggaatttaaaccttacctgtcagcggcgatcgtgcaggagtatgcagactcaaatgaagtcaccatcaatgcgcacaaccgctttgacaacaacgtcaaaggcacgtcaggcaagtacggtctgggcgcatcggtcagtgtcggcaaggacgtaacgctgtacggcgaggctaattatcgtcagggcagccatacggagacgccggttcagggtgtggccggtatccgtatcggattctga

SEQ ID NO: 386308 - DNA, 555 bp, Salmonella enterica
atgcctcacataattttgacaaaagatgtttatttaaagaaagcgttgtctgtcatccttgaacaggtgtctcccgccaggaagctctgcattgttgatattgaatcgtacaaaagcctgggcgcgattgtcaggctgctgaaaagaaataagctcactgaaaggcatcacctgatattcatcggcggcagggatgtcagctccagggttctggagccgctggtgacgatataccgaaaatcgtgctttatgacgttccgaaagcagctcgttgacgggaggacacattcacctgaaaatacgttgaagtatattgcgcgctgcaggagcctcagcatgctcacggtgcaggagaaaaggacccttttcgccctgctggatacgggcgacacctgggcagcggccaggaaaatttacctgtcacccaaaaccgtttacacctataccaacaatatcgggcaaaaactgaacctcaggtcgatactgcaggtgagacaatttatcttcaccgaattcgtcctggatgccaaaaccggggcggaagtcactcattga

SEQ ID NO: 386309 - DNA, 1140 bp, Salmonella enterica
atgaacaattgggaagacttcaagcgtctagatgctcttaacataacctttagagataactatgctgccaaaagcgcagaaatctttgcgaataacgataatcaagttcctgttttaattgaaattcgcattctaaacaacgacaatcagccgatgcaatttacggtagatgaacttcttcatcatatcaaattggtgaattttaagactggtggagtgatcaattccgcatggacagttggttcaaaagaggctgagtattcgaccccttacgcatataaatcaatatataattctgatgaggtctctaatagagaaaaaaaagccataaataattatgttactctatatgtaaaaactaataagataagcgctgaagatatttctgtagaaattgacattccatttgtagggagattcaatacttcaagcaatggtactagtacacttaatggcccacagggtttaacaggtggaactttcaaatcaccatccactgttcatgttgaatctttaactccaattgattattctaatggtctagagaatcttgcggtcacggggatgccaaccaaatatagtgatctaacccttagaaaagataatgtatatatatatcaaaatggggacgattattggaatggtcaatcatcaactgcagaaattattatttcatcaacagcaaaagtttcaagtcttaaagtaacaggaaaatcaataaaagtgagtcaaggatggacttttcgatgcttatccggttatgccgatgctgtttatggagcaaatggctttaattatgacaccttgtttatgtttgttgatacatcaacttatggtttcaaaaatgataatgaaatctatattagcaaccgaagccagcgatggagaaaatatatgatttatccaacagctcatatttatagctggactacagcaataccacaagggaaaattaaagtaaatctctgtaatcatcgaattccagatatcaatggacaactatggcaaagtgggtggtacgatcaaccgactcaatatttagacgtgattgatttttacggtaataaaagcaaaattaaattaactattacaaaagatacctggcctggcttctcgattaatgatgtaatgaaaaattaa

SEQ ID NO: 386310 - DNA, 327 bp, Salmonella enterica
ttgagttcaagagaaaatagcacgtttcaagataaaaaagccctgagtaatcagagctttaatactggattgagtttgacggccatcattcccaatccatcacgcgccgcagagggcacgccatcatttgatgtagatattagtatagtattatttctacgtcaatactgtgcctgcggtccatcctactccaatggagaaaaacaaatgtggcgattcctagagcgctatatggatgccccttggcacaaaaaactgagcataatcattttattaatcttatgctcaccttttgccatatacaatctacttaaaattctttactaa

SEQ ID NO: 386311 - DNA, 639 bp, Salmonella enterica
atgaaaacacatcacggcagctttctattcagccaatgtctgctgatggcacttaccgatcagactcgtgcgggcatcacctggaccagcaaaacggactaccactttaatattgacggtaaagcgcgattcccgaatctgccgaacgtggaatatgacctgcctatttctgcgcaagttcgcgctccacagcagctgatgatgagtctggtacacgatatcgacaaacaatggtcggtcatgggcgatcttgggtggcaggactggagccagtttggcagcccgcaaattaccgtaaacggtaaaacgagcgaccggactaaccgcctgaaggatacctggcatacggctgtcggcgtacagtaccggccagatgagcaatggcgccttaacgcaggtgttgccttcgatagcactccctataaatcgcaaagagatattgcgctttcattacctacaggcgatgaatggcgtttcgcgacgggcgcacaatatcagatgacgcaggctagcaatatcggatttgctgttgaatatctacacatgcagtcatccagagttaaatctgccgcatttgaaggtgaatataacaacccctggttatggtttgcgagcgtgaattatagctaccagttctga

SEQ ID NO: 386312 - DNA, 261 bp, Salmonella enterica
atgttatattcatcgttacgctttaatttgcaacccctgcagtacctcattgagtttgatcacagcctgcatcagcatactttcacccgcagagaatatgacgtgttaaagctggtacattttgaaaacaataggatagctaaacgtcttaagctgtcacagaaaaccaccagcacctatcgcgtgaaaatacaggagaaaatgcatatgcgggcaaaaaaaccagctcgccatgcacagagtaaaatcagccatccttga

SEQ ID NO: 386313 - DNA, 1107 bp, Salmonella enterica
atgggtaagtggtttttgctgttatggatagtggcgggagccgcatgggccgacgggacgctgctgccccttaagcaggcgcgaaaggcgtaccccgtggtgggccagctttctcctccggaatcgctgcgcccctgctgcgcgtttggctacgatctgcacgtccgggcggtgggggtgcccattcccttttaccagattggcaacgttttaacgctggatacgctgggccgccatcactataacgacagcgcgctgggggcggtgaaaaacattgtcggcttgagcgacgagaaaaacggcctgatctacacccgtcgcggcgggtttatcgacatcgcccacgtccgcgacacggcggacaatacgctctacctcttctcccgcatactgcccgaactggggcgcgacgggcgtcttttctatagcgaagagctgggcgtgcgccgggttcagctccgggcctttacaccgccctctgccatgccggagcgttacaccctgacggtcttgctggccggtcgcctggcatttgagctggcccagtggcacgagatcgcccaatggtatggatttcagtcagtttcaggcttttctgaagaaatctctgcgttttcaccggaagatctctactccaatttgttaggggcccgtctggccatagaggttattttgcaggggaaagccgactcggtggaacgctataacgccgccatggacagcgcgctgcgtcatgcgctgctgcggctaggggtcgctaccgaaacggaaaccgaaagaaagtttcgcgagctggacggcgactggtggaacagcaagcgccgggtaccggataaatttctggtgttgaagcgcaactacagtcttgaacataatcgcctgccgacgccagtcgcttacgaaaaaacggcaccgtatatgctcacgatgcctgcagtggtcgtggggtatcagctctcccgcctcggggagctacagatttacccgggcgcagatatgcaatctctcccggtgccaaaggcattttatggcccctcgcagttccagaggctggccgaccgggcgaaagaggcagataaaacacagcttgaacgatttcagaaataa

SEQ ID NO: 386314 - DNA, 1131 bp, Salmonella enterica
atgaaacccggacgcctgacgctgatattgttcctgacgctgacggcatggtcaccagaggcggcgatgctggaccaaaaatcaatggatgcctttctggcgaaactgggggccgataaccagtacgatccgcagaaggggatcaactggagcgtcctgcccggcccgttttacaccccggagctcaggctggggctgggcatggcggtagcggggatttaccgggtcgatcccaacgatgtcaccacccagaactcgacgctctcgtttaccgggttcgtcagcgccagcggcgcgctggggttgggcttaagcagttacaccttttttaccggcgaccgctggcgtctgtttgtcgacggctcgttgaaccgggtacccacccgtttctggggagttggctacgatgccgcccaggggaacgaacaggattacaccagcaatgccttccggatccatccggtggtgatgcgcgaggtggcagaggatctctatttcggtgtcggcttggatttttccacgctacaggcggatatcgataatccctctccgggggatgtttttacccgctaccaggcgcagagctcgccgcttgcgtcgggggccactgtcagcctgaactacgattcccgtgacgttgtcactcgtccccggcgcgggcagctgttgaaggtggagtacagctggtttgatccgtcggtagggtcggatacccatttctcggccaccgaggtgcaatacgattactaccatctgttgaacgaaaagagcgtgctggcgttcgatctctggggacgttttacgcggggcaatgtgccttgggacaggctctcgatagccggggatgaccgtcgcatgcgcggatactatcaggggcgctaccgtgacaaggacgtggtgagcgggcaggtggagtaccggcgcaagctgaactggcggcacgggtatgtgctctggctgggggcgggggcgctgggagacgaccttcatcatctcggcgagcacccgcttttacccaccgccggggtgggataccggttcgaagtcaaaccggcgatgaacgtccggctggatctggggtttggcaaagagagcgcgggattttattttcaggttgcggaggcgttctga

SEQ ID NO: 386315 - DNA, 1116 bp, Salmonella enterica
atgaagcggctgctgcttctggcagccctcgggtgcggttcagccccggcggcggacatgatcgatcctgaagacggcatgctggatatgagccattacttgcaggacaaccaactgggttttttgcccattccggtggtgataaccgagcctgccgtcggctatggcggcggtctgtttggcctgtttttgcacgggaaaggcacccaggctaacgggcggtttatccctccggcgatgacggcattcggcggaggcggcaccgaaaacggcacctggtttgtcggcggcggccatagaaggacatggcaggaggaccatatccgctatctgatcgccgggggatatgccgatatcaaccttgatatctattccggggatgtcactggcttcagccgcaataaagccatcaacaccgaaacccagggctacggcggcatgcacaagctgctgttccgcgtcggggattcgccggtatttgtcggtgcatcccagacctggatcagggcggatatttccgccaaaaacaatccggttatcgatcgcgtttggcagcgggtgctgggggatgacagcacctcctcgtcgcttggcctggtggcggaatatgacaccaccgataacttcttctggccggggcaaggggtcgcgctcagcggtgaataccagttttacggccacttcctgggaggagattaccgctacgatctgctgaccctggacggcaaagttttcctgccgctgaaccccacctggacgctgtccctcgccgggaactaccagatgctctcgcaggaggatcaacacctgccgccgatggcacggccctatatcaagctgcgggggatcgccagctatcgctatcagggcgaggatgtcagcaccgtgcaggcccagttgggctggcaggtgacgccgcgctgggttgtgcagggctttgtcggggccggtagcgccgaagcgcgcgcaagcgatctctatacccatgcagaagtggcctggggcacagggtttcgctatctgattgcccgggagtacgggttgcataccggggcggacgtggccttcagcgatcacgagcaggcggtctatttcaacgtgggctccggcctgtaa

SEQ ID NO: 386316 - DNA, 1683 bp, Salmonella enterica
gtgcagaccagcggtttcgtgggcagtctgaaaaataacgataattgcgcgtttcgggtggtggaaatgaacagggtcctgctcgtctttttaacgtgttttctctccggtattgcttttttctcgcacgcagcggaaccccgccaggcacctactgagcaggagcgcgcccgcaccgtctatatctttcatcaacctattgtcatgctgcaggcgaagtttggcctgaccacccccgaagaacgcgtcttacgtatccgcaatacgctgcgcaactttacccaggaggatgtgcggcagccgctccggatcgtgccggtgacgcgctacaaccagcagggaaggctgatcgtcatgaacggcaaaccggtgatgctgctggctcaggcggatctggacgaaggggatgatttaaccctggatcaggccgcccagcgggtgctggcccgcatggaagcccagcgtatggccctgcgcgatcagtatgattccggctggctggcgctctccaccgtgaaagcggcggcgggattgctggtctttatactcttctgttacggggcattccgctcgtggcgctgggtgcggcgtttttatggtcggcggatcgttgaaaaccgcagcctgatcccgcttcgctggcggtgctttattggcgccatcgaaacgcgcctctatgccctgctgatgatcttactggccatcatggccttctatgcctggctgagctgggtcttcagtctcttcccctggacgcgggtctgggggacttctctcggcgactggtcgatccgcgccctgcggcagatcgccctgtcgattgtctcggccctgccgggcctgttgatcgtcatgctcatttttcttatcaccgcgtttatcctcaagctgctgaaaatggtgctgaatcaggtggaggcggggcgcctgcagctaccgggtatccacccggaaaccgtcggcgccacccgcaagctgatctcggtggtggtgtggctgtttgccctctctgcggcgtatcccttcctgcccggtgccaactcgctggcgtttaaagggatcagcgtcttcttcggcttaatgctcacccttgggtcggcgggggtgatgaaccacgccatgagcgggctggtgctgatctactcccgggcgctgcgcaaaggggatgtgattcgggtggcggataacgaggggcaggtgagtgagataggcatgctcgccaccaagattatcacccgggaaaactacgtggtgacggtacccaacgcggtggtggtgagcggcaaaatcaccaacctcagcgttcagaacccggacggcggagtgaacctgaccgtgggcgtcaccatcgggtacgataccccctggcggcaggttcacgccatgctggagctggccgccaagcgggcgcagggggtcgatctcacgcacccgccgctggtgcgccagctaagcctgatggactggtatatcgcctatgagttgcaggtccggctcctgccggggcagtcgcttgccgcgtcccgcaacgcactgcacagcaatattcaggacgtgttcaacgagtttaacgtacagatcatgtcgccgaacttcgtgatgcagcctgagggcgcggtaatggtggcgaaagagaactggtatccggctccggcatccgctcccgacggagaaaaaggatga

SEQ ID NO: 386317 - DNA, 9693 bp, Salmonella enterica
atgaacaaaatatatcgtcatgtatggagccatgtggcaggctgttttgtcgcggtaggtgaactttccacttcgcatactggttcaaaacgttgtcggcgtcgcttattggttacccgcgctgccccggtattactcttcggtttatccggcgtcgcttccgctgacgatgttaactgggcttcggtttaccccagttatttattctcaaccgctcctgcttataacttcgataccgtcattaacaccggcattgcatttagcatcgataatgaggttttaccgaatcattatgcgccgggaaccacgctgaatattctcgggccgataccggtaatgccggatgtcactgccgggaatggcgttagcggacgcacggtggcagtgaccagtgccttgcccggggccgttgcgcccgaaggggatcgtatcctgaccatcacggccaccgattcgcagggggtcgaaacaccgattacttcagccaatatcggtgagtttacctattcgccaaacccggccaacccgcagcaggatcaggagctcaacgttgaggttcccgggctggacggcagcttccaggtcatcagtatttacgactcctccacctttgtttcctcggatgacacccctgtcgggaacatgcagttgtcggtgtatgaccccaactccgtgcggatcatgaatgggtttgggatcgccgaagtggggaatgatggcggcacggcaaacattaacgtcggggcggataccaacggcgcaacgcccatagccgcagcggaaaacaccctcgatcttttgaccaaaaactccactctggcgcgggccgatgcaggagagaacgccaccagcgcggtgaactggctgtctgataactacattcacttccgtcctgcggcggtggtcagtgcgcaagagcagagcgtgggggcgcaaagtacccagtataactacaccctgacgttaccgaactataccgaattacccggcgggcgggtgattcaggtgggtacccgcgaatttaacatcacctcctccgatgacatcgccgatgtaaacaactacctcaccggacagggcgactatgccggtagtccacaaattcagtactggctgacggccggagctgaggtgaatggcgaagtgatcgactcggcggttgaggcgcagaccgtctataacagcatcatcaccgggttactcagccaggcgcaaagcacccaaattaatctcacctataacgtctgggaagacaggctggcgcataacaataacgctaccctcggtaccggagacttgcgggtgatctatgccaacggcacgggcgcaaccggcaccgtcaccactgacgcgagcctcgccgtggatggggcctcggcggtgatggaggcattcgacggcggggcgatcgtcaacaacggcaccattaacgcctggcgcagtagcggcagtagccccacctcggcggcgatgctggccagttacggcacggcgttgaataccggggtgattaacgccgggctattccttgagaaagacggcgttaaccagaatgtgagcaacgccggtagcgtagggatggttggcgtaacgaacgccacgctcaccaaccagggttacatcaatgttgcggtaacggataacgcctcccgtactgcatgggggatggccgttggcggtaacagtaccctcagcaataccggcactattactctgacgggtaacagccgtaatcccgatggacgggctgccgggtatgcgatttacagtgagtcaacgggcaccgtgaccaatgccgggcaaatttatcttggcgcaacgcctgttatctccggggataccccggaggcggtgaatctggtgggcagcggggcgttaagcgccgggatgaacaccaccgggcagggcaacatggagaacagcagcgatggcaccatcacgctgctctccggcacccgcaatgcggcagggatgctgattgagggcggtactgaggcggcgaccaacaacggccagctgaacgtgctgggtactctgacgcccactgcgaccggcgagacctctgctgccgccaactacggcatgtacgtcaaagacaatggcggggtggtgaccaacaacggcgatatttttgtggacggtgacaacaacatcgccctgaatattctggcgcaaaccgccaacgcctccctgaactccaccgccagcagcgagattgtggtgggcagcgcgggggataccggcggcaccgataaccagccttacacctaccgcaactatgccgtctatgccgaaggcctgaacaacaatgccgcgcaggtgacgctggattccgatatcaacctgttatcggcgggggcgattggcgtgcacgcccgtggcaatgccaccattgatatcggggcagatgcgtcattgtcgttccagaactcgcagcaaattggctattatgcctggggccagggctccagcatcaatatcaccaatgccaccattaccgacagcgcccagacccagtcgattctcttcgtcgtcgatcatggggcgatctttaacggcaataccgggaccggcagcagctacgatttaaacgtctcaggccagggctcgacgggggtctttgccaacggcgtggacgatctgaacaatgccgacccggcggatgacgtcgccacccagttaacgaccggggatgccaccattaccgtctccggcgcgggtgcggtgggggtcaaagtgaccggcggggccaacggcgcgatcaccgacggggcgattaacctgacgggcgataacaccaccgccgtgctggtggacgggcgtaactacaacatcgacgccactatcgatcccgacccgcgcttaacccgcgtcacttccgatgcggttatcacctctgccgccgggcagacgggcattgtggggtacaacgtcggctacctcggcaatctcaccctgaatgcgggagcggcgattgacctgctggggaacagcagcaccgggattattttgcataataacggcgaggcgacggttacggccccggtcagcgtcgccggcaccaacaacattggcgtggatattcagaacgcgggtctcctgaacaacagcggggcgatcggcgtatcgggggccgcaggcagcggtaacatcggcctgcgtgtgcagggggcgggcgcaacggtcagccagctcggcactgtcaccgccaacggcggcctggcggcggtgcagctggcgggcgacggggcgacgctcaccctcaacggcacgggtaaccagatcaccgccagcaacggcgcggacggggtgcgcatcgacagcaccggggcatcctccttcaatgccagcaataccaccatcgacgtgaccggaaccggggcgggcatcaacaacaatgccagctccagtaacatcaacctgaacaacgtgaccattaattccggcgatggccctgctattcgcacggcggtgaccttcaccgcagaaggcagcggcaacgtcctgaacgtggcgggcagcggcagcgggtttgcctttatgcaggcggacggctcgcaaaccaccggcgatctgaccatcggcaccggctacaccatcaacggtaacggcaccgacagcaccggggtgctggcgcgcacctccggcaacgtgaactccggcacttccattaacatgggggcaaccgccggggcggcgattgaggcgaccaacgccagcagcctgagcaacagcggggtcattaccaccagcagcgacaccggcagcaccatcctggcgcagaacacggcggcattcagcaacagcggcaccatcacctccaccagcaccactaacgcgcagtcgctgatcgccctgaacggcaccgccgccagccgcactatcaccaacaccgggttgattaccagccaaagtgaaaacgcgacggtcattgatgcctcgggtacggccaataacacgatcgacaacaccggcacgctgcgggctgccagcgacaccgcccaggtggtgctgaccggcagcggcaacgatctgatgaacattaacgccggaatcaccaagggcgagattacccttggcagcggcagtgaccggtttggctttacggcgggcgaattcgcgggcggcgtgaccttcaccggggccgacggcaacgacagcgccacctttggcgatgtgagcatgacccgcgtcggccacgtgctgagcgaaggaggcactaacaatacgctgacctttaacagcacccacagtagcgcggggtcggcgaatatcggctcactggcggcggacgatctggcaatgggcaccaacatcggcaccggctggagcaccctgaccctagacggcgaccccaccgatatccgcgtggtcaacgatcttgccctttcggggacgtcgcagatcaacgtcaacaacggggcgacgctgcgcaccggggataacgccgttaccagcggcgaggcgacggttcgtcagtacaacattgccactgtgggcgctaacagcctggtgtcctttgacggcgcaggggctcagacctacagcggcgtcatctccggctccggcggtatggagcgcatcggcggcggcgacaccgtcctgctgggtgaaaacagttacaccggcaacacgctgattggcccggactcacagctggcgctgggcaacggcggcaccaccgggagcttatccaccaccaccaacatcaccgacaacgggctgttaaccgtcaaccgttcagacgacgtgtcgttaaacggtgccatctccggcagcggggcgttccgccagctgggcagcggcgtgacgcgtctgggcggcaataacagctacgccggagccactaccgtcgagcagggcacgctgctgagcaacggcgtgcagaccggcaccgggctgaccacggtgatgtccggcaccaccctcggcggctacggcaccctgggcggcgacgtggtctttgaaacgggcacggtattacgtccgggcgacgatgcccgcgggaacggcaccggtgagctgaccatcaacggcgacctgaccctggcgagcgataccgacagccagttccagctgggggaagtttataccccgggcggggcgctgaacgatctggtgacggtagcgggcgatctcaccctcgacggggtggtaaacgtggcgctcaccgcggggggcagcttcctgccgggggtctatcgcctgtttaactacggcggagcactggtcaataacaccatggacatcggcaccttaccgccaaacgatgccaaccagtatgccattcagactaacatcgcgaatcaggttaacctggtgctggactttgtggtgccttctaaccagcttcagttctgggatggcgatcttaacgccaccaaccacggggatggtacctctggcaatggcgtggtcgacggcggttttggctcctggaacgccctcatcgcgggcaccagtaacaactggacccagagcaacggggtgggaaacgccccctggtcccagcgcgcctttgccgtcttccagggcgaggcggataccgtcctgttcagcaatgcctttggcgatgtcgtcaccagcgggatgcagtttacctctgatggctatctgctgacgccggacctgatcaaccaggattcgcagctgcacatggtagcgaccggtattgcgggcgtggtgacgccggataacagctacgacgcggtgggcggaacccacggcgacagctacttcgcgattcgcgtcggcgacggcgcggccggtgcggatgtgaataccaccctgaacgttgacctggttcaggacagcgatgccgacggagcgatccgcctgctgaaaaccgatccgggccgcctgatcctcaacggcgacaaccagtacagcggtgggaccgaagtctggaacggcacgctgcaggtgtctaaagattccagcctcggcgacgccgggacctttgtgttcctcaagaatggcgcgaccttccagaccggcgcggattacaccaccgaccgcctgtttatcgtcgatggcgtggcgggcggtacgtttgacgtgtacggcaatactttcgcctctcaggggggcattggcggtgacggcccgctggcggtgaaagacagctccgccggaacgggcgatgtggtgctggatcttaacgtggcgaatacgtatcaggggaacaccacgatcaccggtaaaaacggcaccggcaccctgaccgtcaatgccaacgccaccggcgcgctgggccgtgccgacagcatggtaagcctgaccgacgcggcgcgcctcaatgtgaataacgccagcgcggcccagtcgcatctgtttgacgtcaacaactccaccctggcctttaacgatacggcgacggcggacggcagcaccatcaatctgaccaacggtacccttgaactgaccgacaccagcagcggcggggcggcaaccattaacgtcgatgctgactcccaaatgctgctctccggcagcgccgacgcgggaaccagcctgaccaccaacagcggcacggtagcgttcgcgggcaatgcccaggcggcatcggcacgcatcgcgaacctggtgggcggtaacgtcacgctggcggactccgcaggcaataccgccgtcgggtcgctctccggggccggtaacgtcaatctgggcgcggccaccctgactgaaggtaacctcggcctgaacgacaccatcagcgggatcatcagcggcagcggcggcgggctggtgaaaaccggcggcggcaccctgaccctgaccggggataacagctacaccggcgcgactgcggttcagcagggcgtgttgctggtcaacggcgaccagagtgcggcctccggggcggcgaccgtcgatgccggggccactctcggcggggcgggaactctgggcggcagcgtcagcgtggcggatgatggccatctgacgccgggcgcgacgctggacagcgtgggggatctcactatgggtagcctgacgctggcgcagaacgcccagcttgatttccagttcggccagtccggcaccccgggcggggcgctgaacgatctcctgacggtgaacggtgacctgaacctcgatggcaagctcaatatcacccagaccccgggcgggaactttgacgtcggtgtctatcgagtgatcgactacagcggcatcctgacgaacaacattctggagatcggcacggcacccgctgcggcagacgatctctatgtccagacctcaatcgacggccaggttaacctcgtgaaccgcaccgggtacaccatgcgcttctgggatggctttggcggcgcgggcgggtcgctgaaaaataacgacgtgattgatggcggcaacggcgtctggcagaacagcaacggcaacgataactggaccaccgatcgcaccaacccggagggggcgtttaacaccccgttcagcgatggcgccttcgcggtgtttggcggcgagtccggcaccgtgacggtggataacagcctcggggcggtgaccatcagcggcgcgcagtttatgactgacggctacgtcattaacgacggtaccatcaccaccaactccgccgacaccgttcttcgcgtaggggatggtaccgtacgcggagcggggtataccgccactatcaattcccaaatcagcggcagcggcgggctgaataaaaccgatcttggcaccctggtgctgaacggcagcaatacctatcagggcggtaccaccgtcagtgacggggtgttgcaggtctccggcgatccgaacctgggcgccgcgggcaccggcatcaccctcagcggcggtacgctgcgctacggcgccgcgttcgacaccgcccgcgccgtgacgctcgccggagacggcggggcgatcgataccaacggcaatgacgtctcgctgctcacggcggtgggcggcagcggcaatctggcgaaacagggcgacggcaccctgacgctgacccaggacagcaccttccagggcgaaaccaccgtgagtaacggcaccctgcaactggggaatggcggcaacagcggtagcgtgctggggaacgtggttaacctcgccaccctggtggttaaccgggccaacactctggatcttaacggcatcattaccggaaccggtgattttattcagcgcggtgaaggcaccaccgtcctgaacggactcaatcgatggacgggctatacgctggtggaaaacggcactctgctggccggaggcgtcaaccgcttcagcagtggttccagccatattgtcagcagtaacggtctgcttgataccggcgggcataaccagaccgtggcggacctagtgaatcagggcacggtgaatctgcgcggcggcaacgtgggctcgacgctgacggtgcagggagactatgtggggctcgacggcacgctgaaaattgccgctcagcagaacagccccggtgtggcggaccatctggtgattgacggcggaaccgccagcggcaccaccctgctggatatcgacgtcagccggcttggggagccaaccgaaggggacggcattctggtcgtcgatgccatcaacggcggcgtcaccacggcgcaaaccaccaaagacgcctttactatcggggccgactatctgaccgccggggcctgggaataccagctgtttgcgggggatatcaacggcgcgggagaagactggttcctgcgtgccggctatcgtccggacgtgccgggcttcgatacgctgccgtccatcattcgtcaggcggatctgtttgtgctgggcaccctgcacctgcgccagggcgatgaacgcccttaccgggcggacaatcccgccgatcaggagggccgtttctgggcgcgctacctgaccagaaccgtcgaccagaaactggatgatgccacaggcagcaccagccacagccagtacaacggcatgcagatggggctggatctgtggcaggacgataagtggcgtgccgggatgtacaccacctttatggatatcgacagcgccatcgacggcaataccggcatgagcggcggggcggcgtataactccaccttctccacctaccttggcggctatgccacctggaccgacaccgacggcttctacgtcgataacgttctgcagtacggctatcactcggtcgatctgaaaaacatgaccgaccatgaaacctaccacccggacggcaactcggtgaccgcctccgtggaggtgggtaaaccctggtacttcggcgatattggctgggcgtttgagcctcaggcccagctgatctggcagtggagtgatttcgacgacgtcaccctcaacgatgccgcgaaaacccgggtcagcgtcaacgccgacagcgcggtgattggccgtctcggggcgcgtctcaccgccgagtacgacaccaaccacggcatagtgaagccctacgtgcgggtgaactactggcaggagctgaccgacggccaggatgaggtgacttaccgcaacaccgccaacagccacggcaaaaccaccctgaaggccaaccagcagttcgccgccaccgaggcggcagtgggggccacctggatggtgaccgatgacgttcaggcctataccgaagtgggcaaaacctgggacaacagcggtaagaccagccttgacgccgacatttcagcgtcgctggggatgaagatccgtttctga

SEQ ID NO: 386318 - DNA, 996 bp, Salmonella enterica
atgaataaaaagttaatgctcagcgtgctgctgcttggtgccgtcagcggtgcccatgcggcggatccgctctcagcctggaatgataccgcagcaaaaaacgctatcgtgcagtgggtacaaaataccacgaatcaggaccgcgcaacctttattccggcggacaaacgttacgtggtgtttgataacgacggcaccctgtggcctgaagcgccgctgactttccagctgcagtttgcggtggatgaagtcaaacgccttgcgccgcagcacccggaatggaagaacgatccggtgctgggcgctgtgctgaataacgacctgaaggcggtcgccgcctcgggtgaaaaagggctgatgcagcttctggcggcaacgcacagtgacatcaccaccgaggagtttgaccagcgcgtcagccagtgggtatataaccagcgcgatcaacgttttggctgccgctacgacactatgggctaccagccgatgcgccagctgctggactatctgcgggagaacggctttaagacctggatcatctctggcggcggaatcgattttatgcgggtgctgagtaataaaatgtacggcattccgcctgagcaggtggtcggctcgtttgcgctcagcgactttacgctgaccgataacggcacccaactgcgcaaaaccatgaaaggtgctttcaacgacgatgccgccgccaaaccggtcgcgatccacctgtttatggggcaacgtccggtggccgcctttggtaatagcgacggcgatttagccatgatgcaatacaccgcggccaatccggattacagaacattcgggcttattgttcatcataccgatgccgatcgggaatatgcctatgacagccatcctcctgccagcggaaaactggtagaggggttaagcgtagcgaaagaaaaaggctggacggtggtggatatgcaaaaagactggaagaccgttttcgatccggcgctgtgtaaaaaatag

SEQ ID NO: 386319 - DNA, 1017 bp, Salmonella enterica
atgaaagcctttcttcttctgctgttgctggcggtaatgcccgcccgtgcggcgatggatatctcccgcgaactggtcgcacctgaacaggtcgtgccaggccagccggtggttatcgcgatcaccttctggaccgacagctggtttaatccgcccccggaatggcccgattttgtgattaaaaacggggcattaatgaccacgccgctgccgaatcagctgttaagtcgtcgccaggggggaacaagctggagtggtattcgcctcgaaagacaggtgatggcgtgggatgagggcgatctgctgctgcccgccacggaggtcacgctcacttctgccagccaggcccctgtcaccgtgcaactgccggagctgaaaaccgcggtggcgtggcctgagggcgtggaacagccggaccgcttcctgcccgccagcggcctgaccctgacccagaaaattacccagtatcacaccagcaatgacggcgaactgcgcgtgggggatgtggtggagcgcgctgttacggtgaatgccaccggcattaccgcggcgcaggtcccgcagattctgtatgcgatccccggaaccgatacccaacggctgacccccgaaaacacgttgctgaagtcggggcgcggtcaaatcgaaggggctcagcgggttgagaagctgcgctatctcccgtcccgggccggtacgattgtcattccgcccgttaaattgcgctggtgggacacagcccatcatcagtggcaggttgccgaattaccggggtcctcgttgcaggtggctgaggcgcgcgcgcaaggcagcgaatcggcacttcggggaacaaccgatgaaaatcactggcatacggcgctgatcgtcgcggcggtcgttatcctggctgtcgttatcgtattgacgcgacgtctgctgtggcgaagcctgaaatatctccatcacaggtggcgcaacttttgggctcctgttcctctgcccaaactgacgcctgaaaaaagaggtgaacgatga

SEQ ID NO: 386320 - DNA, 1524 bp, Salmonella enterica
atgagtaattttcacttcacccatccctggtggttagcgggtctgctcgtttgtgcgctgctgtggtttgtggcgcccggaaagcgcagcgcctggcagcagattatggataaaccctttgccagggcactcattattggacgcgaaaagcgcatcaccagggtattgccgtggctctgcgcgctgggggtgatcgccctggcaggcccggcctggcagcgggaactgcccgctgccctgacgccgcaaagtaatctgatggtggtgttacagcaggatccggccatgtacgcccaggatcttgcgcccagccgccatcagcggatgcaaagcaaaattatgcaactgatgtcgcgctcaaccggcacgcattttgggctggtggtgtataacgcccaggcttatctcaccacgccgctgaccgtcgatccctcgttctactcgctgtttcttcacgcgcaaaatcctgcgctgttgcccgagggcgaaggctccgggttacgacaggccatcgctctggccctgaaaaatatgccggaaacccccgatgcgccgcgcaatattttactgatcgccgataccctctcgccgcaggatgcgatctggctcgcacaacaaaaactaccgctgcagatttgggtgcccggtacggcgcgcggcggcgaactgcccgacgattatgcccaacgtgggatcgatacccgcctcaacgtcgaacgtttcagcggcctgcgtgacggcggtattcccgttacgctggtgagcaatgatgacagcgatctgccggtaataacccgtcacatccagcagtcggtggcttcgcagaacaacgcccgcggcgatctgcactggaaaaacagcgggtatctgctggtcatcccgatgctgctgttgctgcttttcgggcggcggcaactgatttgcgccctgatcgttgtcgcgccgctgctgtatgttccgcaaagtaaggccgcctggctggatgcctgggtaagcccggatatgcaggggcagatggcattcaacaagggcgactacgcgaaagcagcgcaacgtttccaggatccgctctggcaggggatagcgtattaccgcgcggaggattttgtcgccgccgcgtcggcgtttcgccaggctccgcagaccgccgatacgcttctgtggctgggtaacagctacaccggacaaaagcagtggcagcaggcccttaacagctacgatcgcgcgttaagcctgcgtcctgactgggcgctggcgcaaaagaaccgcgccgctatcgccgccattatcatgcagttgcgccagaaagagcgtgaccgtcaggctgcgcagggcaaggagcaggactacaaacctgacgagattaagcacgatctgaagaaaggccagggggtgaatcagcaggatcttcagcccacggccagcagtaatccacaggtggagcagtggttcgacaatctggaggtctcgccatccggtctgctggaaaatctctaccgcgccagtacggagccgacgccatga

SEQ ID NO: 386321 - DNA, 978 bp, Salmonella enterica
atgtctgagtatctgagccggatcgatttagcctggccgtgggcagcgttgctgatttttctgccgctgattggccgctattttttgtcgcaggatcgcgaggtcaaagagcaggtccgggtcccgtttttaccggaactgattgatgagctgaagctgaacagccagccggtgcgcaccggtaaactgcccagcctgctgttctggctggtctggctgctactggtggcggcgctctgccgcccggagtaccttacgccgccccagcatattcaaaaacccatgcgcgatgtggtgttgattctggatgtttccggctcgatggcgaaaaacgatgtgcagggtggaacaacccgcctgcaggcggtccaggaatcggtgagaaaatttgtcgcggcacggcagtcggatcgcataggtctggtgatatttgccagccaggcctggccgtttgctccggttagcgaagacaagcaggcgttgcaaacgcgcatcaatcaactggctcccggcatggttggccagcaaacggccatcggtgatgcgctgggcgtcggggttaaactgctggataacaccaccgataaagaggccagcaaactggctatcgtgctgactgacggcaacgataccgcttcgcagctggcaccggctttggccgctcagctggccgctgcccatcacgttcaggtgcacaccatcgcctttggtgacatcaacagtaccggggatgacaaagtggatctgccgctgatgcaaaacatcgcccggatcaccgggggacaatcctggaccgcggccaactccggggccgcgctggacagcgtctggaaagagatcgacgccattacccccgtacaggtgaaatccatcggctggtcgtggcacgttccgctcttccagtggccgctgctactggcgctggggttactgatcctgctcgcggttgggcgattcattcgggagagagccgcatga

SEQ ID NO: 386322 - DNA, 441 bp, Salmonella enterica
atgctggaaaaaggatttagcgttcctgagctcgccgttccggcgctgccgcagggtatctcctggtttccgttacctccaggctggtgggtgacggggggagtggtgcttatagcattgctgctcttcgccctgttccgtctggcgcgctggcggcgtaacgcctggcgtcgggaggcgcgggcctcgctgcaacaaccccacagcgtcgatggctggctggaactgatcaaacgcatcctgctgatgcaccagccgcgcgccagcgtcagcaacgccatcaccccggaacagctgctgcaaaaggtcgacattgacgatgatttgcgccagcagttaagcgtcagatattgccagcccgataaccagctcgacgccggtcgcagcgcgcgtttgcagcttcagctgaaaaactggctggagaaactgccctatgtctga

SEQ ID NO: 386323 - DNA, 906 bp, Salmonella enterica
atggacagcgcactgcaggtcgatcgcgacacgctgatgtcactggcaggggaagcgcggttgctgaccaatccgccggggcaaatcccgcccggtgcgctggccggggagcgcgtctcccgtcagcagggacgtgggcttaactttgacagcctgcgccgctaccagcccggcgacgacgtgcggttgattgactggcaggccacggcacgcctgagagcgccctggatccgcctctataacgaagagcgcgagcgtccggtgtttctgattgttgaccagcggctggatatgtatttctccacccgcgggcagaccaaatccgtggccgccgccagaattgccgggctgctggcctggcgcagctggcacgacggcgaccggctcggcagcatggtgtttggcgacagcgattacagcctgcaaaaatgccgcgccccggcccgcaatttaccggcagtgctggatgatgtgctgcgctataaccaggcgctaccggcgcgctatcctgacgaaacccctgcctctgtctcgcttaaccatgttctgcaacgcgccatgcccattattccggcaggctcatgggtggccgtactcagcgattttcacgacctggatgctgccggagaagccttgttggcaggcctgagacgacgctgtgagatcagcgctttcatcacgcttgacgatctgcacctgcggctcccggcgcacggcgatctggccgcccgctatcaggggcgggaagctgcgttttcgctttcccctcagctaaaagatgacatcgaacagagcattgcctcccggctggcgcgtctggaaaatcgcctgacacgcctcggtattcgcgttaatcagattgtggtcactcaggatcttatcaaacagttacaaaagggcctctga

SEQ ID NO: 386324 - DNA, 999 bp, Salmonella enterica
atgacaaacagagaaaaactgcttcagcttgagcagcgcatgaatcaacaggtattgggccaggagtcggtcgtaaaaatgctgattgtggcgctgctgtgcgatggccacgtcctgctggaagggctgccgggactggcaaaaacccgggcggtacgcgagctggcccgccatgtggaaggggagtttcgccgcattcagttcacaccggatctgctgccctctgacatcaccggcagtgagatttaccagcaaaatgccacccgtgaagaggaccagttccgctttcgtccgggcccggtgttcggcaacatcattctggcggatgagataaaccgcgcctcggcacgcgtgcagtcagcgttgctggaggcgatggaggagcgtcatgttaccgttgccggaaaaacctggccgctacccggcgtattcatggtgctggcgacgcaaaacccggtggatcaggaggggacctggccactgccggaagcccagctcgaccgctttttaatgaaagtgctggtggagtacccgtcaggtgaaaacgagcaaaaagtgatgcagatggtgcgggccgaacagcagcagaagtatctggcgcaaagctctgagcctgccgccgttgagccagaaaccctgatgctctctcagcaggatatcgccacctgctggcaggatatctcgacgattcatgttgccccaaccattgaaaattacattgtgaatctggtgaacatgacccgccatccgcagaaggtcagcgacacgctggcaggttacattggcatcggcgtcagcccgcgcggtaccctggcgctggaccgctgtggacgtgccctggcctggctggaggggcgtgacgcggtgctgccggaagatattcagcgcgttgctccgccggtactgcgccatcgtctgatgctgagttatcaggccagtgccgataaccgttctgcggacgacatcatccggatgctgctcgacgcagtggtggcgtga

SEQ ID NO: 386325 - DNA, 1296 bp, Salmonella enterica
atgaagtacagcaccacgttgcctgttaaagcgttaccgtccgcagaaaaatatgacggcaaggggccagcgtataccagacgcttccatgtcatggcgaaacccaccggctcgacctgtaatctcgactgttcatactgtttttatctgcacaaagaagaacttctgcatcaggaccgccataccggcatgagcgatgaagtgctggaaaacttcattcgccagtacatcgatggtcaggatggcgatcaggtggtgttctcctggcagggcggtgagccgactctgatggggctggagtttttcgaaaaggtagttaaattccagaaacagtatcaaaagcccggccagcgcatcgaaaacgacttacaaactaatggcgtgctgatcaacgataaatgggccgaatttctcaaagaacatcgctttctggtggggctgtccatcgacgggccacgagaactgcatgaccgctaccgcgtaacgcgaagcggtaaaccgaccttcgataaagtgatgaaaggcgttgaggcgctgaaaaaatataaggtgccctttaacgccctggtgacggtaaaccgcaccaatgcgcgcttcccgcttgacgtttaccgctttgtcacccgtgaactgggggcgacctacgttcagtttaacccctgcgtggaacccgtcgatttcaagagcaccgcaccgcagttctggcgtgatgagaccatcccggtaaccggcacccgccgtgccagaccgggtgatttagactccatcgtcaccgactggtcggtggatcccgacgactggggcactttcctgaaaactgtgttcgaagagtgggtgaataacgatttaggccgcgtgcaggtgaacctgttcgaaacggcagtggcacaaaccatggggatgcccgcgcaaatctgtaccgcctctgagttttgcggaaaaggactggcggtggagaaaaacggcgatatctactcctgcgaccactatgtctaccccgaataccaaatcggcaatatcgccgacacaaaactggcacacatggccttttccgaacggcagaaagccttcggtttaggcaaaaaagagaccctgccgggatactgcaaacagtgtccttatctgaaattgtgctggggtgaatgcccgaaaaaccgcattgtccgcgccccggacggtgaagccgggctcaactatctgtgccccggcatcaaatcgttcttcaattatgccgaaccgatcctggtcggtatcgccacgcttctgaaacgtgactttgcaggattgcgtaaatga

SEQ ID NO: 386326 - DNA, 1587 bp, Salmonella enterica
atgctcaaaacagtgccattcaagcggacagtgttggccagtatgctaacacttgcatcgagtgcaataaccgcagcctatgcagctcccgctacatcgcccacaactgctccagaaaaaaataattcgaagcctaacattgttgtcatttttggtgatgatattgggtactggaacttaagtacttataaccagggcacaatgggttataagacccctaatattgatagtattgcaaatgaaggtgcgaaatttacctcttattatgccgagcaaagctcaacggccgggcgttcgtcctttattacaggccagatgccgttccgtaccgggatgagtaaagtgggaatgcctggtgcgccacaaggtctgagtaaagatgaccccacgatcgccaatattcttaaacaattgggctatgccactggtcagttcggtaaaaaccacctcggtgaccgggacgagtttctgcctaccgcacacggttttgatgaattccttggtaacctttaccacctgaacgcagaagaggagccagaaaatccggactatccgaaagatccggaattccgtaaagagtttggcccgcgtggcgtcattaagagcagtgcggacggaaaaattgaagataccggcccgcttaccgtcaaacgtatgggcaccgttgacgaagaaactcttgccgcgaacaacgactttatggaacgtcagaccaaagccggtaagccattctttacctggtttaacaccacccgtatgcacaataagacgcacctcaaagatgccagcattggcgcaacggggctaggtacctatgccgatggcatggttgagcatgacaaaatggttggtgaggttcttaaaaaaatcaaagatttgggtattgaagataacactatcgttctttacaccacagataacggtccaatgacagcgacctggcctgacgcgggtatcacaccattccgcggtgagaaaaacaccgggtgggaaggtggcttccgcgtaccggccatgatcaaatggccagggcatattcagccgggcacgcttatcagcgatatctttggcagtaatgactggttcccaacccttgtggccgcagctggggttcccgatatcaaagagcaactgttaaaaggctataaaacctcgtcgaccacctacaaagttcaccttgatggctataaccagctcgatttcatccagggcaaaggtgaagacccgcgtaaagagttcttctactggagtgatgatggtgaccttctggccattcgctatggtcgctggaaggcacactttatgattcaggaacatacagggcttgatctgtggcgttatcctttcaccaaactgcgtgcaccgatgatcttcgatctggaagtagacccactggagaaaggttcagatggtatgggctataactcctggttctacgatcgcatgttcctgatgggcggagcccagaaatacgtgaaggaaatgctggcgacctttaaagagtttccaccacgtcagaaaccggggtcgtttaccgtttcagacgcagcggaaatgattgagcagggttctaacgcaaacaactag

SEQ ID NO: 386327 - DNA, 222 bp, Salmonella enterica
atgaataaacagtctcttgtcatgaagatcccgggaccttggctcaaaagcgaatccgagcagatgcatcagcgcgaaaacatgcttagtgaagcctgcggtgtcggtgtaatgctctttaatctccagctcgcttgcgggtctccactctggagcaaacaacagagaaccaacgcagagaaatcgaaactgccggttttgctgtcagacctcagcgaataa

SEQ ID NO: 386328 - DNA, 399 bp, Salmonella enterica
atggaaaatggagatgtactgattgtcaccaaacttgacagtcttggtcgtaatgcgatggatataagaaaaaccgtcgaacaacttgcagtgtctgacattcgggtacattgcctggcgttggggggcgtggacctgaccagtccggcagggaaaatgaccatgcaggtgatttcagccgtggcggagtttgagcgagatttgctgctagagcgtacgcactctggtattgcacgggcaaaagcagcaggaaagcggtttggacgtccttcagtgctgaatgaagaacagaaaactacggtgattgcacggattaattccgggatcagtatcagcgccattgcgcgtgaatttaataccactcggcaaaccatactcagggtaaaggcagggcaataa

SEQ ID NO: 386329 - DNA, 543 bp, Salmonella enterica
atgatagtactgctgaaattgcttaaaaaattctggaagccattagcagaaatactgctggtggcttttttgttatgcgcggcagcgtactggtgttattcacgcgggtatcagaaggcagattcatcctggaaattccagtgggcgcaacgagaccttactgatgcgaccgctgcattgcagcgtgaagtaaccgaaagagcgaaagagcagcgtcgccagcacgccgcagatgaagaacggaaaagagccgatgaagaactggcaaaaatacaggccgatgctgatgctgctgagcgtgctcgcggtgggctgcaacagcagctcgcagcagtacaacggcaacttgcaggaagtgaaaccggcaggctttccgctcttgccgcagcaagccaggcaaaagccgagaccggaatactgctcgcccagttgcttggcgaagctgacgatctggcgggaaagttcgcaaaagaggctgatgagcgttatgtcgccggaagcacatgcgaacgtacctgggacaaagtgaccgggcagaactga

SEQ ID NO: 386330 - DNA, 552 bp, Salmonella enterica
atgtgtgtccctcgccgggtgtacaacgctttattatcggtaatgactatgcgccgtatattagccaccgctgccgcactttgtcttggcggctgcattactgtgtatggtccggttaaaacaggagggcagcaacagcaggacagccaggccgggcagcagccagggatgagcgaacagatatcaaccttattcatcggtaaccgtaaaccggatgagttgctgaatgccgtggcgctgtatttcagggagaaggccatcacagccagtgttaacgaccagaccacaggtattatcgccggtacaggggatgacccggaactgagttcgttgtatctggactgttcactgttaccgcagacacaaaatatccaggagcattaccgtatcgtcgcgcaggtccggagtgccggtgaaggcagtaatgtttcggtaatggtgacaggcactgccggactggatactgcagacggtaacgataaggtgaagccggtggagtgtaaaagtaccgggatatttgaaaaagatttgctggaacgattacgtaagtaa

SEQ ID NO: 386331 - DNA, 402 bp, Salmonella enterica
atgaacaaacacacccagattcgccacgccgtgctggcgaaacttgaatccctgtccggatcgtccgccatgctgcacgacggtttgccggtctttattgaaccagaagagcttcccgcactggctgtctggctgaccgatgcgcagttcgccgggcagatgcttgatgaaagcgactgggaggccgttctccatgtggcggtatttctgaaagctcaggcaccggatgcggaacttgatctgtggatggaagagaaaatattccccgcgctggaagaggtcatagacctggaaaaccttatcaatacgatgacgccgctgggttatgactaccagcgggacagtgaaatggcaacgtggggtatggcggaaatcacgtaccggatcacctatactcactga

SEQ ID NO: 386332 - DNA, 1338 bp, Salmonella enterica
atgcacgctcaaatctgggtagtgagcacgctgctgatcagcatcgtgttaatcgtattgaccatcgtgaagtttaaattccaccccttcctggcgttactgctcgccagtttctttgtcggcgcgatgatgggcatggggccgctgaagatggtcacggcgatagaaaacggaataggcggtacgctcggttttctggccgccgttatcggtcttggcaccatcctcggcaaaatgatggaagtttccggcgcggcggaacgcatcgggcttacgctccagcgctgccgctggctctctgctgacgtgatcatggtactggtggggctgatttgcggaatcacgttgttcgtggaagtgggcgtcgtgttgctcatcccactggcgttttctatcgctaaaaaaacccatacctcgctgctgaagctggccattccgctgtgtaccgcgctgatggccgtccattgcgtggtaccgccgcatccggctgcgctgtttgtcgcaaataaactgggggcggatatcggctcggtgattgtctacggtctgctggtcggactgatggcctcattggtcggcggcccgctgttcttaaagtttctgggtaatcgtctgccgttcaagcccgtaccgacagagtttgcggatcttgaagtgcgcgccgaaaacaccctgccgtcgctgggcgcaacgctgtttaccgttctattgccgattggcctgatgctggtgaaaaccgtcgctgaactgaatatggcgaaagacggcacgttgtatacgctgctggagtttatcggtaatccgatcaccgcgatgtttatcgctgtctttgtggcgtattacatactcggtctgcgccagcatatgggtatgggcacactacttacccacaccgaaaacggctttggcgccattgcgaacatcctgctgattatcggcgcgggcggcgcgttcaacgccattctcaaaagtagcgggctggcggacacgctggcggtgatcctctcaaatatgcatatgcacccgattctgctggcatggctggtagcgctgattctgcacgcggcggtcggctctgcgacggtagccatgatgggcgccaccgcgattgttgcgcccatgctgccgctctatcctgacgtcagcccggagatcattgcgattgccattggttccggcgccattggctgcacgatcgtgaccgattccctgttctggctggtcaagcagtattgcggcgctacgctgaatgaaacgtttaaatactatacgacggccacgtttatcgcatctgtcgttgcactggctggcacattcctgctttcctttatcatctga

SEQ ID NO: 386333 - DNA, 213 bp, Salmonella enterica
gtgaatgtctaccagacctttatcggctgcagcggtgataatcaggaatccttcggcatcatcaccgcgttcgaacggtatgctgccgatcgccgccatgaatattggctggccgtcagcccggtggatgaagtatggctgtttcttggcgccttccttcttccactcaaaccaaccatcagcaaacacgatagctcggccatgttgccatag

SEQ ID NO: 386334 - DNA, 420 bp, Salmonella enterica
atggattttttcagacctacagagttgcgcgatattatttctctgccatttttcagttacttagtaccgtgtggcttcccaagccccgcggcagactacattgagcagcgtatcgatcttaatgagttgctcgtttctcatcccagctcaacgtattttgtcaaagcaacgggtgattcaatgattgatgcaggcatcaacgacggtgatctgctggtggtggatagctcacgaaccgctgaacacggcgatattgttattgcagccgtggatggggagtttactgttaaacgcctgcagctgcgacctacagttcagctcaatccgatgaacagcgcttattcgccgatcatcgtcggcagcgaagacacgctggacgtattcggcgtcgttactttcatcgttaaagcagcgagctga

SEQ ID NO: 386335 - DNA, 294 bp, Salmonella enterica
atgggcgacaaccactactacagcaaatatcagcacgaaaagaaacgtgctgatgagactgtacaaaatgccaaatcggcaactgtcattaccaataacgtcctgcaatcactgcaaatcgtcaatacagttttggaggctaacgatgacgtggtgaagcctattaaggagcaggcggaaaataaaatcgatggtgcagttgcactgattatggcggttggcagagccatgctgtacgagaaagaagacacgctgtctgaccacattgagtcctacgggatccgctcgctttaa

SEQ ID NO: 386336 - DNA, 351 bp, Salmonella enterica
atgagtcgtatattaaatacagaaattatcattccggttatcgaaaaacttgtaaaaaaagcttgttatgaactggatgataatctcatgtgttcttttcgtaaagcatatgataaagaagagtcaaagatcggcaaggaaaccattaagatattaattgataatggagagtatgcaaaaaaagaacaacttgcatgctgccatgataccggcacttgtatcgttataatggaaattggacaacatgtatgctgggaaggtaagccgcttaaagatcaggtgaaccagggtgttcgccagggctatgaaaatggatacttaagaaaatccatggttgcagatccattataa

SEQ ID NO: 386337 - DNA, 288 bp, Salmonella enterica
atggaaatcgtaaaaatcgaaatgaacctgaaagcagttaataagagcattgctttattcaattgcgaaaagagagtctcaggcgttattcactcaaattcaactggcgaaaccactgtgattctcgacggtggatatgtactcggaaagttcgacagtcctcattgtgctgtaaaagccatttcgctgctcacagtcaaggtaagtgatggagaacaagcagggtttggtaattaccgaagttacaagcttgattactcagaaaaattttatcagaccatccattaa

SEQ ID NO: 386338 - DNA, 240 bp, Salmonella enterica; identical to SEQ ID NO: 375702

SEQ ID NO: 386339 - DNA, 2916 bp, Salmonella enterica
atgagtggaactaatcctgtatttttagtccgcaaagccaagaaatcatcgggccagaaagacgctgtactctggtgcagcgatgattttgaagcggtaaatgcaacactggattatctcctgattaaatccggcgcaaagttgaaagattattttaaagccgtcgccacaaatttccccgtcgttaacgagctgccaccggaaggcgaactgagcctcactttctgcgattactatcaactcgctaaagacaatatgacctggacgcaaatcccaggtgtaaccctgccatcatctgaagctgccgcagcggctcgacagcgcatcgttgacggtgttaacactgaaacaggtgaagtgctggaggaccacaacgaaaattttgagaacaaagacagcagccctaccccgtcccccgagctaacggttgtcgcaactatgcccctccgtcaccgcgttcttgctcagtacattggtgaaggtgagtatctttatcacgtcgatgcctcccagaaaaaagaaattctgcgtctcgaaatggacaccgataattcatatgtccagaacctgctgcttgccgccgagaatgttgaagcgttcaaaaaagctattgagcatgatattcacaaagcagttaatgccatcaaaaatgtattcccagttgacagaaaaattcctgaactggggactattatccagttccttaaaacatggttcgataccgaacatatcgatcgtggtttgctcgttaaggagtgggcgaagggtaatcgtacatcggctattcagcgcactgaaagtggcgcgaacgcaggcggcggcaataagactgatcgtcatcctgatgtaaagcataattttgacgttctcgacattgaaatagcactcgccactctgcctatggattttaatatctatgagcttcctggtagcgtttaccgccgcgcaaaagagatcgttaagaaaaaggaaagtccattcaaagaatggtccgcagcacttcgcgcaacgcccgggatcctggattattcccgcgccgctattttcgcgctgatccgaagcgcccaccctgaatattatcagtatccagggcgcctgaggggttatatcaatgccaatttaacggaaagcaatcacgagaaacctactgcagagactcttgctgccgcccgtcacacaccggaaaaagatgcagtagaagaagccaaccgacagctggctgccgaacgcggtgacttcgttcctggtataagcgacccaaacgatccgaaatgggtgaagacagggacaagccaaccggcatctgagcccgagctggttaaaaatgttggcaacgggattttcgacgtgtccgctttaatgcagaactcatcaacttatggcacaaaaacggctccggaggccaccagcagtgtgcaggttcaagaaattgtcagtgatgaaaaacaggctggtgatgcgatgcaggcaggcgaaaacgatctggggaatggtgaaaaagcagataccatagagaaccagagtcaggctgaaacgcaccagaataacacttcagtgagccaatctgagcctgaggagcaacaaaacgtgccagattcgccacaggaaaaaccagaagcggcctggccggaatacttcgagccgggccgctatgaaggtgtaccgaacgaggtttaccacgctgccaacgggatcagctcaactcaggtgaaagatgcgcgcgtgtcgctgatgtactttaacgcacgtcacgttgagaagaccatcgtcaaagagcgctctccagtacttgatatgggcaacctggtacatgttctggctctacagccggaaaacctagaagcggagttcagcgtggagccggagatccctgagggtgctttcaccaccaccgccaccctgcgcgagttcatcgacgcgcacaacgccagcctgccagcgctgctgagtgctgacgatatcaaagcgctgctggaggagtacaacgccaccctgcccgcgccagtaccgctgggcgccagtctggaagaaacaggccaaagctacatggcgctacctgctgaataccagcgcattgacgcagaccagaaacaaacagccgcagccatgaaggcctgtatcaaagagtacaacaccaccctgtctacgccggttaaaacgagcggcagtcgtgacgcgcttcttgagcaactggcaataatcaaccccgacctggtcacgcaagaagcgcaaaaatcggtgccgttgaaagtatctggcacaaaggccgatctgattcaggccgtgaaatcagtaaatccggcagcggtattcgccgacgaattgctggatacgtggcgggagaaccccgaagggaaagtactggtcacccgccaacagctcagcaccgcgctgaacattcaaaaagccctgctggggcacccgaccgccggcaaattgctgactcacccaagccgcgctgtcgaggtgagctactttgggattgatgaggaaaccgggttggaagtccgggtacgccctgaccttgagatcgatatgggcggcctgcgcattggcgccgacctgaaaactatcagcatgtggaacatcaaacaggaaggcctgcgtgcgaagttgcacagggaaatcatcgacagggactatcacctgagcgcggctatgtactgcgaaaccgccgcactggatcagttcttctggatattcgtcaacaaagacgagaactaccactgggtcgccatcattgaggcgtccaccgaactgctggaacttggcatgctcgagtaccgcaaagcgatgcgtgcaatagcgaacggtttcgatactggcgaatggcctgcaccgattaccgaagactacaccgaagaactcaatgattttgatgtgcgtcgccttgaagcgctgcgcgtacaggcataa

SEQ ID NO: 386340 - DNA, 288 bp, Salmonella enterica
atggaaatcttaaaaatcgaaatgaacctgaaaacagttaataagagcattgctttattcaattgcgaaaagaaagtctcaggcgttattcactcaaattcaactggcgaaactactgtgattctcgacggtggatatgtactcggaaagttcgactgtcctcattgtgcagtaacagctatttcactgctcattgtcaagattcgcgaaggtgagaagaccggatacggcaactaccaaaagcacaaacaaaccttcatggaacaggcttttgtcaccgttcattga

SEQ ID NO: 386341 - DNA, 357 bp, Salmonella enterica
gtgaaacaccatcaaataacagcatcgatggcgaaagacattgcttttaaacttggcgctgaactgaacaacgaagaagcagaaatttttgccgatggttataacgccgccatgcttaaagttaacaaaaacgcgtcaactgaattaccaaatgacgctaatttgtcaaccaactctccggtaattccggatggctacgcacttgtccccgtcgaaccaacggacgaaatgatagctgcggcgatgaactgcgaagatgtgctgttcaatagcgatgagtcattctgcgtacagttcgggaatatctacgaggccatgctcgcagcagcaccgcagccggagggaaataacggatga

SEQ ID NO: 386342 - DNA, 633 bp, Salmonella enterica
atgaaccagacgatgaataaatccattaaagagaaaatcattgataacgcactggcaaaagctggtatcccgcaacgtaaaaaagccctgcgtgatgcccgtgcagactgggcggaacgtgtaaggctggcagcaattggcggcccggaaacagaagctgaggtattaaaaaccgaaaagaaaattgcagcacttattgcgaaactgcccgaagaactgaggacaaactatacttttgtcagatatgacagcgatatttatctgaatctggcgggttcgcgtgttcgtgcatactttaacggcaattaccggggccatgagcagggtgaaccagaccctatcagaaaaatagtcccctacgaatataccttactggcagatgatccactcgttaccgagttctacagcttcgatgcgctttacagggaaataaaaagcgacgaaacagacattcgccagaacgtcaccgccgcactgaataaagccagaacagttaagagactgctggaacagtggcctgaagccaaagaactgttacctgctgaagatgctgttgttcctctgcctcctgctattcgccgggaagcgctgaacgagatgattgggcttccgtctgagagttctcaggagtag

SEQ ID NO: 386343 - DNA, 234 bp, Salmonella enterica
atgaagatagaactgacgatcaataagtcgaaagaactgccgcgcggtgccatacctgcactcgagaaagagctacttaaaaggcttcagaatcagtatgaaaactgcaacttaaccatccgtcgcggtagtcaggatggtctgagtattgtcggtgctgctgatggcgataaaaaacgtatacagagcattctgcaggaaacgtgggaaagcgctgacgactggttttattaa

SEQ ID NO: 386344 - DNA, 882 bp, Salmonella enterica
atgcgttttaacaccccacttcgttatcctggcggcaaaggcaagctttcaaatttcatgcttcggattattgaagataataagctttcgcctatacattatgcagagccgtatgctgggggggctggtttagcgctgaagcttttacacttaaatgtagctgaaaaaatcattcttaatgatattaatatctctgtttatgctttttggcacagtgtattaaataacgcagatcatctatgtgctttaattgaagaaactgaagtcacaatggatgagtggttcaaacagaaagaaataattaataatccaaaagaccatgatacgctagcaattggtttttctaccttttttcttaatagaacaaatcgttctggaatattaaaaggcggtgtgattggtggtaaaaatcaagaggggcaatggaaacttgatgctcgctataacaagaacgatttaatttctcggattcagaaaatatcaaaaaaccgtgaaagaatagatttgtataacatggatgcaattgatttcataaaaaagatagttgttcaattgcctaagaaatcattaacatatttagatccgccatattacataaaaggtaagggattatatatcaatcattatgaacatagtgaccatgttaatgttgcaaaagtagtgcagaatgatattaaaacaccatggattgtttcttacgataacactcctgagatccaaagtatgtataaggcatcatcattagtgtatggaataaactacagtgctcaagatcgatataagggctcagaagtgatgttcttcagtaaacgattgaaggtctttaaaaccgatgatccaactaaggtaaaagcacctatcattaaaaatgctatgagctag

SEQ ID NO: 386345 - DNA, 876 bp, Salmonella enterica
atgacttctcactcaccattaataattgaagatattttcaatcgttccaaacaagatgccaccggatttaaaacaatatatctaacagatacttatggtgatattaaaacaaaagacaatctatcatgggccgatatcaatgctgatttgcatgttgaaactgtaaaaataaatgatgagatcagccttccaaaagccaacgtatattttgaagataaagaaggtttcgattttttcaaacaattgataattgatagaagaataaacagaatattgaacccattagggaatataaatattagctgtactgccatcctagatttaattgctagaaaaatccctgaatttactattaaaagcctagttgtcttagacggtgatgttgctctcgataacagtgacaatgctaaaaaagcgaaaaaagagagaagcttatgcttacttccaagcattcttcccccggatcaaatgatttttgaattcttatataacttacctccagatgatacatattggaacaataaaaataggtttacaaaagcagtatttatgaaaataacaaaagacataattacaacgctaaaaataggtaaccatcctattgatttacaacattctatagagaactataaaaaatcaaacaaaaactatggcggcgtagttagaaaactatttaaagattttgtccatacgcctgagttcctagcacaagtaaaagggcgagttaaagataatccctatagatattgggtcgagaaacaccccgtggaatccgataatttcaagcatcaattaatcaaaaatcttaaaattattatgacaaatggacatggcgttgactctgctactatcacttcctatctgtctggcaactaa

SEQ ID NO: 386346 - DNA, 339 bp, Salmonella enterica
atggggaacgggattacgagtgaggatgtcagattcccgcccggcgtcgtcataccaggtcgcagccagtaccagtgcaggcagaacatcatcaggcgttcgcaatgcagtacgttcaacctgtgccagtcgtgcagaaatatcgcgattgagatccgtccgcataacggaaatttgctggaaaagcacatcatcctggatacgcaactgctcctggtcaatcgcagcattgagcgcggtccggatagctttcagatcttcataattcggtggagagctgccattactgactgtctgtacaccatccagcgccgggtgcataacaatgataatgtctga

SEQ ID NO: 386347 - DNA, 501 bp, Salmonella enterica
atggctgttgtcctgatggcggctgcgatcatattgcgttgcattttctgtttcgcagcagatccggagtcagtgggccaggtgccacggggggaaagaccgggatcaagcgtgatacctgacatcgtttttatcatcgtgaccagatccgatgtactgcccctgagcctgtcacctgagcgccaggctttttgcagtgcgttaacgaaatcacttgcggcgctcggtggcatcagaatgacagacaaatccccctgtaacagccgcattgctgcagacacgccggagtcaaccatcctgaaagcatcggcaacatcgcccagcatggaggcagcatcggcaataacatcgttctggataaaatcagaaatacctgacaacgagaatgtggaaaacatactgtcaatcgcatcgtcgaaaagcccgcctgatgtttccaggcgcttcgccgttgccattcctgccaccggaaaagaaagttcaccactttccacaaactga

SEQ ID NO: 386348 - DNA, 867 bp, Salmonella enterica
atgaatcaaaatccattctcattttatgactttcttggatatttaatacctggtggtttttttattctgttaatatatttctgtggtttaatattcgatttagatattcttattgacttacgtgaactactcagaggtcaaagtcaaatttttggcattttaaactacgcttcaatagttatcataacttacatagctggacattttatctctatcacgtcagcattttttatcgaaaaatacatgaataaaaaattaggatatccttcaatatatctgtttaacaaactgacagacacttcagaaaaagtctgttgcccttcatgtgatgaactaaatcccgataaaaaaacaaaaataaagaaccgtataatcaactcaatattataccctataacactatgggattatttaacacaaagactatgttattctcaatccttgccatttcatttggctaatacaacatggttaatgatcaaagaaggttatgagaaaaaattcataacaaatagtaaactattaaaagatgaagcggggcttcatgacgatcttttcagattggcatatcattatgtttatgagttttcaaaacagcatcaaacaaaaattcaaaactatgtcgcattatatggtttttgcagaaatatatgcttagtatttataatttcattttggatatcggttccaacatttatttatcgcttttttactgaaagcaatttcatttatagtttactttctatgacacttagctttttattcacctatgttttctatgttggatttgttaagttttatagacgatatactttagaagtattaatggcatttgcagtacttcaaagtagagaaactattagttaa

SEQ ID NO: 386349 - DNA, 891 bp, Salmonella enterica
  misc_feature (821)..(830): n is a, c, g, or t
atgcccataacattagaacatatagctgctaagccattacaggagaattcaaaggcaaaaggtgtcagaacctgggataccatacagtacctttcagctttggataaggcgtgtcaggatactgtttttcatgagcaagtatcaaatttaccaaaagagtatactcgtttggatgagatggcaagagatgaaaaagaatatagcttaaatatttttgattttttctttgaaccaacggcggatattatatgtgacgatattaaatcaactttggatttttattattcgaatagtccaacctttcggagattggttaattataaggtgaaccatagtataaataacgatattgataccagtaagtgtgaagtgaaagtatccccaaattatagttacgaaaatactgaagggagtggtgtgtatttatcgttgccgtttgataagaaaggctttcttgtcgatcctgaatttcacgactgtgaaactagaataacatcagaaaaaatattattggatttatttttgaagcatattttgtacgatgatttgaaggtgaatcatgatgctacaaatatatactctaatgttatttgtaaggagattgattctacggcaatggcacatgcatcgttgtgtttttctcaggcaggggtgagcgatgagcatgtattatttaatattgatagcgtgactgctctacctaaaagtactgagcaaatcatatttgagggggaggtaattcaaaaacaaattttttcatcttttcatagcagtaataattttcagccagtagccactgttaaaatagaaagaaatataannnnnnnnnntaaagagtatcactgtggcaggtttattactctcatccaaagtaacagcaatgccgtatag

SEQ ID NO: 386350 - DNA, 201 bp, Salmonella enterica
atgaaagagtattgggactctttaacaaaagagcaacagtgcaaattggctggcaatgttggctcaactacgggctatttgcgtctggtttttaacggatacaaaaaagcggggttttccttagcaaaaaaacttgaggaagaaaccgccggagaaataactaaatcagatcttcgcccggatatttattcaaaacaatag

SEQ ID NO: 386351 - DNA, 675 bp, Salmonella enterica
atgaaaactatccaagagataaggcgtttaaacgccagaaaattgagagatggtgtcggtgggaattctttttttgccaacataatcgatcgtgaacccacccaaaccagtaggtttatgggggaaggtgccaccaaaaatattggtgacgctatggctcggcatattgaaaaatgcttcgatttgccgcaaggatggctagatcaggaacatcaaacaactaacattgcaaaaaatccagatgtttcagacactagcagacaaattactatggtacctgttatatcctgggtgcaagcaggagtatggaccaaagtcggttacgctgaggtagatttgagcagcacagagacatacccttgccctgttccctgtgggccaatgacatatattttacgtgttattggtgattcgatgattaatgagtatcgacccggcgatatgatttttgtagatccagaaattccggctattcatggcgatgacgtcatcgcgctaatgcatgaaacaggtgaaactacttttaaaagacttattgaagacggcggtcagcggttcttaaaggcattgaaccctaattggccggagccatatgtcaaaataaatggcaactgctcaatcataggtacagtgattttttctggaaaaccaagaagatataaaaacagaccataa

SEQ ID NO: 386352 - DNA, 477 bp, Salmonella enterica
gtgtacagccctgatgaggttgagcaacgagaagaacgcgagattaaccctgctccagtccagcgcatgagcgtacaggaaatcaccagcgaggttagcaccaggaccagcgcgcaggagtcggcagctaacgttgatgctgttgccgacgatcttcgcgaacgcattgatacagcaagttccgttgatcaggcaaaagcaatccgtgcggatatcgaatcacagaaagcgttgctgggtactgcgctgttcaccgaattaaaaaacaaagcagtgaagcgctattaccaggtcgatgcacagaacaaagtcgaggcagtgatcaactcaattccaaaccctggcgaaccggaagccgcagagatgtttgctaaagctgaaagcacgcttggcgctgctaaacgtcatcttggcgacgaactgcacgataagtaccgcgtcaccctggacgatatgaaaccggaatacatcggctaa

SEQ ID NO: 386353 - DNA, 309 bp, Salmonella enterica
atgaatgagcaggatttgaagcatgtgatcgcattgttgctggaagacgctaaacgtttgcagcagatagagccaaatgcaggaactgaggcccgtattttgttagcaaaacaggcattaaagacttgcggggcgcaagaccctgatcgaaccgagttcatgaatttcatggctaacacgatcccccctcgtccatgcaagggagatggggtgagccgtgtttatcacgatacgatggttaaagctttaagaatcgagcttgaaaggctcaggagtcggatcgcgataaacgaaatcgttaccaactaa

SEQ ID NO: 386354 - DNA, 339 bp, Salmonella enterica
atgaaccagttttatgttcacgttcgtctatttgaagccacagccgaacaggccaaaaaatttgaagagttaatgcttaacttccattaccgaaaaacaacaaaagatgatgacggagactgcaggttgatcccgggtggctatattctcaacagcacaatgaattgcaataacatcgttaaccaaacgttatctattgctaatagcgttggcgttaatgcaaatatctttgtttgtaaatttgaacaaagtgcattcttacttccgtctgcagccttagttggtaacgatttcgtttatcgcgatccgactcctgagcctttcaagctcgattcttaa

SEQ ID NO: 386355 - DNA, 555 bp, Salmonella enterica
gtgggacatgaacctgaatggaaagttgaaaagcagccccgctggctggtggccgcgattaaaaagacgatttccagtctgcatggcggttatgaagaagccgcagaatggctggatgtcaccaaagatgctctgtttaaccgcctgcgtactggtggtgatcagatcttcccgattggatgggcgctggtactgcaacgtgccggaggaacctatcacctggcacattcagtagccagggcatcaggtggcatttttgttccgctggcagatatggaagaagtggataacgcagatattaatcagcgcctgctggaagcgattgagcagatcaccagttattcccagcaaatcagggtagctatcgaagatggcgttattgagccacatgaaaaagtcgtgattgatgaggagttgtatcaggcgatcgcaaagctgcaacagcattcgacactggtatacagagttttttgcgcgccagagaagggtgacgcccgcgagtgtgcagctccgggcgccgtggcgtcaaattttatggagaaaaccaacgcatga

SEQ ID NO: 386356 - DNA, 621 bp, Salmonella enterica
atgactgttaacgattccctcttcgcattctctctcgcagcgctgttacttaccctgactcccggcctcgatacggcacttattctgcgcactgcttgtgctgagggcggcaaaaaggcttttcacgctgcgcttggcattgatgctggctgttttatatggggggcactggttgcgttaggtcttggtgctcttctggcggtttcggagatggcttacaccgtgctcaaagtttgtggcgcagtctacctaagctggctgggcttacaactgctgatacatccgcgatcatctttcagtgatggcgatgacaacaacggttctcaggggaactggtttatcagaggaatgctgggcaatgtgctcaatcctaaaatgggtattttctatgtctcttttttgccgcagttcatacctgccggtcactctccttttatatggacatttatcctggtcagcatccacgttgcgattgggactatttggtcactcacactgatcttatccacgcattttgcgtcagccgtattgaagaaacatcgcgttgttcgggtgatggatagagccacaggtggcttatttttatgcttcgcggctaaactcgctttgagcacgagatag

SEQ ID NO: 386357 - DNA, 327 bp, Salmonella enterica
atgctcagggttcgtgagtgctacgacggtgggcaatcagaagcgtccctgcttgatgacctttgcaaagttgacctgctggtactggatgaagtcggtattcagcgcgggagcagtggtgagaaggtcattctcaatcaggttatcgatcgccgtctctcatcgatgcgacctgttggcgttctgacgaatcttaaccacgaggggctgttggattcactgggcgcgagggttatcgatcgcctccagatggacggagggatgtgggtgaattttgactggggaagctaccggaaaaacgttagccacctccggattgtgaaataa

SEQ ID NO: 386358 - DNA, 411 bp, Salmonella enterica
atgagcgattattattacagctttaaagaaaaaggttttttctggcaaccggataccgaatccgataattaccctgacgatttaattcccctgacagatgagtattatcgcgagctgatgcagggccaggtggatggaaaatatatcgagcacaggaaaggcggcccggtactggttgagcatcgcgaatatacacctgaagagctggttgcacaggctgaagccagaaaagcggaacttcttgctgaagctgagtcagttattgcgccactggcgcgggcggtaaaactgaaaattgccacagatgaagaagttaaacggctggaagcatgggaactttatagcgtaatggtaaaccgtgtggatacctcaaatcctgcctggccggagaaaccagccagtagtttataa

SEQ ID NO: 386359 - DNA, 225 bp, Salmonella enterica
atgatccggaatatttttaaacggttcaccagccaacgttttcattgccctcgtccaggacagtggtacagcacaccagaagggtacgttctgcgtattagcctggtcgatcgcgaatgtcagaaggttgtctgtgagcctcttgggcgtaattaccgcgtcaacatgcctcttattgcctttcgttccggcaaaaacatgaagcatctcggaggtgctgcatga

SEQ ID NO: 386360 - DNA, 489 bp, Salmonella enterica
atgatttccgattgccgccgcaagatggtttttcccggttcccggaccaccactgaacacaaagctcgcaaatccactaccgaagttctgggcataactttttgccatcgtgtacgcttttcgctgcccctccccgcttacttcatagttagcaaacgtacagctacgatggagatcctgaatgccagatcgcccgaaaatcttctcggtgcgggatttctgattcatcctgtcaagctcttcactgcgtttacgcccttcggcttcctgccatgcccgccactcatcagcagtcgagaatttcggctgcacactggctgggataattcttttcaggcgatcaagcgcactgccagtaccgattacgtttttcatcgttaccccctgaatccggtaggaatggttttgtctggcgcagaaatgtggttcacatctctgccagctcttcggtcgttgagagcgaacttcggtttgaatagtccctggtag

SEQ ID NO: 386361 - DNA, 162 bp, Salmonella enterica
atggttctggatcgcacgccgtccatgaaaagaatcccggggttcagcaatgttgttaatattgtgaataaattggctaacgaaggtctggtaaatatcgaaatagtgggcataagtccatgcctcactaccacgtctctgaacagggatacagactgctaa

SEQ ID NO: 386362 - DNA, 354 bp, Salmonella enterica
atggacgataacgttacgcgtggaaaacgggcattcagtttgggaatattggccgtcggcgcagtggtatatttggtgggattgtggccagcctgccatacattaagcgaaaagggatatttttttgcggcaatggtcatgtgtggtttcccaatattgattcgccaggaacacacgggtaatgaccgcctgctttcccgctgcaaatatttactgttgcttggcattggtatggttgcggtcggcatatttaatctggagcttgcgggcgcgttgaaaatgctttgtctggtggcgctaggattaagtatgtatggaaccgatctttacgcttcctacagtgatgatgaatga

SEQ ID NO: 386363 - DNA, 2028 bp, Salmonella enterica
atgaaacttgccgctttcgctctgacgctgatacccggtatcgcgatcgcctcatcatggacctcgcccggttttccgacattctcgacgcaggaaaccggacgctttaccagccatgctgcattaacaaaaggtatgcgcacgttaacgctccatattgaccagcagtgctggcagcccgccggcgccataaaactcaaccagatgttgtcgttaacaccctgcgaaggcgcgccgccgcaatggcgtctgtttaaagatggcgactatacgctgacggtagatacccgctccggtacgccaaccctgttgttatcgataaaaactgaacctgaacgcacagcgcaacttgcccgccagtgtcccgtctgggatggttcgccgctcacgctggatgttagccaaacctttccggaagggacggtagtgcgcgattattacagtggtcaaaccgatactgtccaacacgggcaaatcacgttgcggcctgccgacagccacgggcttttattactggaacgagcggaaacccacgcgtcagcgccttttaattggcgcaacgccaccgtttattttgtgcttacggatcgctttcgcaatggcgatccaaccaacgaccacagctatggtcgccataaggatggtatgcaagagattggcactttccacggcggcgatttacgcggcttgacgagtaaactggactatctacagcaattaggcgtgaacgccttgtggataagcgcgccgtttgaacagatccacggctgggtcggcggtggaacaaaaggcgattttcctcattacgcctatcacggctattacactcaggactggacgacgctggatgccaatatgggcagcgaagccgatctccgcgcgctggtcgacggcgcgcaccagcgcggcattcgtattttatttgacgtagtaatgaatcatgccggttacgccacgctggcggatatgcaggagtatcagttcggcgcgctctatttatccggcgcggaacggcaaaaaatcctcggcgatcgctggacaaactggcgccctgccgccggacaaagctggcacagttttaacgactacatcaacttcagcgacagtgccgcctgggaaaaatggtggggaaaaaagtggattcgtaccgatattggcgactacgacagtccgggatttgacgatttaaccctgtcgctggccttcctgccggatataaaaacggaatctaccacgccttccggcctacccgcgttctatgccaacaaacctgacactaaagcaaagttcattgagggctatacgccacgggattatctgacccacgggttaagccagtgggtacatgattacggcattgacggattccgggtcgataccgccagacacgttgagcttcctgcctggcaacagctaaaaacccaggccagcgcggcgttacgtgaatggaagcaggccaatccggacaaagcgctggatgatagtccgttctggatgactggcgaagcatggggccacggcgtcatgaaaagtgattattatcgctatggtttcgacgcgatgatcaattttgattatcaggagcaggcggcgaaagcggtcgattgcctggcggaaatggggccagtctggcagcagatggcggataaaatgcaggatttcaacgtattaagttacctctcctcgcatgatacgcgccttttccgtgagggcggtgataaggcggcggaactgctgctgctttcgccgggcgcggtgcaaatcttttacggcgatgaatccgctcgtcccttcggccccagcggctccgacccgctgcaaggcacccgttcagatatgaactggcaggacgtgagcggaaagtcagccgcagccgtcgcgcactggcagcgtattagccagttccgcaccagacatcccgccatcggcgcaggccaacaaaccacgctgacgctaaaacacggatacggttttgtacgccagtacggcgacgatactgtgatggtcgtctgggcaggtcgccgctaa

SEQ ID NO: 386364 - DNA, 819 bp, Salmonella enterica
atgcttgaattatccatgacgcttccgatttacgttcagaacgggggattatttatttcccggggtgaggggcgtcatccggcccgtaggctggattcctgggagattatttttgttgaaaaaggaacattgaagattcaggaagaagcgcagcttttttgcatcaataccggggaaagtttgttgctttggccgcatcgtcgtcatattggcgtagacgattttcctgccgatctcaaattttactggttgcattttgaggttaaaatggcgggtaacgatccgcgcgccttaacgcaaatctcaataccacagcacgtcagagtggcggatccgcaggctctgatggcgctgtttcgccagtttatgattgagcaggagaaattccagcgtagcccggcattggaactgatcgttttgctgattttacagcagctgacctgcgatactcctcggtatgatgaccacaatgaagctggggcgtcgttggcgtggaaagcgcagcaactgattcgcacccgttatcatttgccgctttcaacagctctactggcgaaagcactgcattgtaatgcagattatcttgggcgtgtttaccgtcgcatattccatcttacgttaaccgacgcaattcatcggcagcgcgtgcgggaggcggagaaacggcttatcagcgatgcgcgttcgcttaaagaagtcgcggaattatgcggatttaacgacgtgggttattttcgcaaaattttccataagtacactggcttgactcccgccgcctggaagcggcggtactgtaaagaacacattaattcggcctga

SEQ ID NO: 386365 - DNA, 1401 bp, Salmonella enterica
atgacttccacatcgatgacaacggctaatatcgcgcaggataaagccgggcagacattatccgtacgcgaaaaaataggctatggtcttggcgatgcaggcggcaccgtcatcacctgcctaataatgaactttctcacctttttttataccgatgtcttcggcctgacgcctgcattggtcggcacattattcatcgccctacgcgtattcgacgcaatttccgaccctgtgatgggcatcattgccgaccgtacgcaaagccgctggggacgttttcgcccgtggcagctatggatggcgattcccatcggcattatcggcatactgacctttaccgttccggacgccggtatgggcgtaaaaatcacctgggcattcggaacttatctaatactttcagttggttataccgctatcaacgtaccctattgcgcgctaatcaatacgatgaccacccgccatgaggaagtcatcgcctgccagtcctggcgctttgttctgtgcggcggcgccggttttgtcgtctcggtcggattgccctggatggtggatttttggggccggggtaatgctgcgcggggctatcaatggggcgtcggcgtgctctgcgccatcgcggtcatcatgttcctgtgctgttttttttgggttcgcgagcgcgtcccgctggcaatgatggggaaattcactctgcgtgaacatcttgccgggttgcgtaaaaatgaccaactgctactgatgctggtgatgtcctttctgttgattaacgtctttaacattcgcggcggcggatacatgtattttattacttacgtactggaaggcggtacggcgtatacctcgctgtttttcacgatggtcaccttcgcgtcagtcctcggttcagtaattgtcagcccactaacgcggcggatagataccgtgaaactgtattaccgtactaacctggtactggcaacgctagctattgcgatgtggtttctacctgtcggcccggcttatcaggtcttatggttagcggtaattctcggcaacggcattattctgggctttacattgccgctgcacttttcattgatggcctttgccgatgattacggcgagtggaaaaccagcgtacgctcgtccggtatgaacttcgcgtttaacctgtttttcatcaagttggcctgggcctccagcgccggaatcatcagcctgctgtttatttttgtcgcctatcagcctggcgcgagcaaccaaacgcctgcctcgttaaacggtattacggcaatggaaaccctgcttcctgcgctgttccacctactgctggcgctggctatccgcatctgcaaactcaataaccctatgatgtcgcgcatcgctaccgatctgcgtcagcgtcatgtacagctttaa

SEQ ID NO: 386366 - DNA, 1956 bp, Salmonella enterica
atgaacgtaccggaagtcgacctgcataaacttacggtcagcgatccgtttctcggacaatatcagcgattagtccgcgacgttgttattccttatcaatgggatgcactcaatgaccgtattcccgaagcagatcccagccacgcgatagagaatttccgcatcgccgcaaaacgccagtccggggagttttacggcatggtttttcaggacagcgacgtcgccaaatggttggaagcggtagcctggtcgctgtgtcagaagcccgaccctgaactggaaaaaacggcagacgacgttattgcgctggttgccgccgcccagtgcgccgacgggtatcttaatacatattttacggtcaaagcgccgcaggagcgttggaacaacctggcggaatgccatgaactctattgcgccggacatatgattgaagcgggcgtcgccttctttcaggctacgggtaaacgccgcctgttagaggttgtgtgccgtctggcggatcatatcgatagcgtttttggccccggggaaaatcagcttcacggctatcccggccatccggaaattgaactggcgctgatgcgcctctatgaaatcactcaacagccacgctatatggcgctggcggactattttgttgagcagcgcggcacgcagccgcactactatgatgaagagtacgcaaagcgaggaaaaacagcttactggcacacctacggcccggcctggatggtgaaagacaaagcttacagtcaggcgcatctgccgttatccgcccagcaaacggccacgggacacgccgtccgttttgtctatctcatggctggcgtagcgcacctggcgcggctaagtcaggacgaagacaaacgccagacctgcctgcgcctgtggaataatatggcgcaacgtcagctctatatcactggcgggatcggctcgcaaagtagcggcgaagcgtttagcagtgattatgacctgcccaacgacaccgtatatgccgagagttgcgcatctatcggtctgatgatgtttgcccgccgaatgctggaaatggaagccgatagccgctatgccgacgtgatggaacgcgcgctgtataacacagtactcggcggtatggcgcttgacggcaagcatttcttctacgtcaacccgctggaagtgcatccgaaaactttaacgttcaatcacatctacgaccacgtgaagcctgttcgccagcgctggtttggctgtgcctgctgtccgccgaatatcgcccgcgtcttgacctctcttggccattatctctatacgccgcgtaacgaggccctctacatcaatatgtatgtgggcaatagtgtggaaataccgctggaaaatggcgcgttgaaactgcgcatcagcggaaattatccctggcaagagcaaattacgattaccgttgaatcatcgcagccgctacgccatacccttgcgctgcgactgccggagtggtgcccacaaccgcaggtagaggtcaatggtcagccagtggagcaggatattcgcaaaggctatctacatatccaacgtgactggcaagagggcgatactatcgcgctaaccttgccaatgccggttcgtcgagtgtatggcaacccgctggtacgccacactgccggcaaggtcgcagttcaacgtgggccgctaatctattgtcttgagcaggccgataatggcgaagcattgcataatctctggctaccgaaagagagtaaattcaacgcatttgaaggcaaagggctgttcgctaatcagatgttgattcaggcggaaggcgtaaggcggggtacgacagaaacgccgccgcaagcgttgtggcatttcgatgccgcgccaggcacagcgcagccgcatacgctgacatttattccctggtttagctgggcgaaccgcggcgaaggcgaaatgcgcatctgggttaacgaacgataa

SEQ ID NO: 386367 - DNA, 549 bp, Salmonella enterica
gtgagaagtcctaagttttccctcgaatttcggctcgccgttgttactcattatctcaacacccgcgatggctatcgtgagacggctaaacgttttggtgtgagccgcacggcggttcgtcgctggatttccgcctggcagcagcacggcattgacgggctgacctggaaaactgctgattacactcctgaattccggctgaaggttgtccgcgccgtcatcgatgataaactttcgctccgcgatgccaccgctaaatttaacctttcaggtgaaagtaccgtttaccagtgggttaaacgctttcaggcgtcaggggccggggcgctctccggcataaaaagcggaagaccgaaaaagccggaacctatgcataaggacatcacctccccgccagcaccccacgataattcccctgatgctcaggccgaactgcgctaccttcgagccgaagtcgcctggcttaaaagagccgaagggctggatggtggtaagtttcagcgccggaaagcccttatcattcaggaactgcgccgcgagcacggctga

SEQ ID NO: 386368 - DNA, 786 bp, Salmonella enterica
atggcgcgtagcacgttctaccataacctcagcgctctcaggaaagctgataagcacctggcgttgaaagaactaatccttgatatttatcacctccataaggggcggtacggttatcgccggataacgctggcgctccggcgcagtaatggccctgttaatcacaagacggttcagcgcctgatgggtgagttgtcgctccgcgccgttatccgcatcagaaaataccgctcatggaaaggtcaggtggggaaaattgcccctaaccggctgcaacgcgacttcacggccagcagcgccaacgagaaatgggtgagtgacgtgacggaattcgccgtcaacggcgaaaagcgttatctctccccggtgattgacgccttcaacagcgaggttatcgcgtacagcctgtctgaaaggcccgtgatggcgctggttgatacgatgctggacaaagcatttacgcggctgacgccgggggatgcgcccgtgctgcacaccgaccagggctggcagtaccagatgacggcttatcaggacaggctccgggcagcaggcgtggtgcagagcgtgtcgagaaagggcaactgcctcgataacgcaatggctgaaagttttttcggcacgctcaaatccgaatgcttctatctggaggaatttaacagcattcctgcgctgagagaggcgattaacgcctatattcactactacaatcatgagcgaatcagcctgcggctgaacggcctcagcccagttgaattcaggttactgcacctgaaagcagcatga

SEQ ID NO: 386369 - DNA, 363 bp, Salmonella enterica
atgcaaataatgagaatgagctacaacgacctgactaatggtggtggcgaagccaaattacacgtttatggtgttggtacttttcctgtcttctctggtcaaaaaccatatacaaacgatcctaactgcacataccttcctaatagtggtattcctgttggacgctactggatagttgatcgcccagagggaagtcttgctaatcagcttagaggtagggtgatcgacgcctggaatggttctaaccattcagagtggtttgctctttttaattcccatacgatgagtgatcacatgttagtcaacggtgtgtctcgtggtagttccgtttgtacccactacgacctgatggctcaggcataa

SEQ ID NO: 386370 - DNA, 744 bp, Salmonella enterica
atgcagcagattaatttttatcgtcagcgggtagcgattaacgtgctggcaaaggatatcgccaacgcgaaggctatctatgaagccgccgaaggccatgcggtcattggcgtactttccgcgcagttctctacggtagaagagggcgtgccggaggtgaaacgctggatggcggaggtgccgtctatctcggtgggactgggcgcaggcgacccggcgcagtactacaaagcggcgatgattgccgcccatgttcacccggcccatgtcaaccagacctttaccggcagcggcttcgcggcgggggcgctggcggcgacaggcggcgggcaaacacatattaacgccctggttagcccgacgggaacgcctggcgaggtgttgatttctaccggcgtcagcagcagccagggaacgccagcccgcgtttcctgtgatgcggcggtacgcatgatgcaggatatgggcgcacatgcggcgaagtttttcccgatgggcggcgaaaagtcgttaccggaattatatgcgctggcgacaaccgccgcccgctacggcatgacgctcatcgagccgaccggcggtatttcactggataatttcggtattatcctgcaaacctgcctggaggcaggcgtgccgcgcgtcatgccgcatgtttacagctcaattatcgatccgcaaaccggcaatacgcgccctgaagacgtcattcggttgatggagatagtcaaagcgctggtgtga

SEQ ID NO: 386371 - DNA, 1479 bp, Salmonella enterica
atgaaagtctcctggtcaacaatgagcgccgatgacgcggcggaaatcattcagcataacgatatggtggcgttcagcggctttacccccgccggttcgcccaaagcgctgcctgccgcgatcgccagacgcgccaatgcgctgcaccagatgcggcagcctttccagattcgattattaacgggcgcgtctatcagcgccgccgccgacgatgcgctgtcggaggctgacgcggtctcctggcgtgccccctatcagacctcaaccggcctgcgccaaaaaattaatcaggggcaggtaaagtttgtcgatctgcatctgagcgaagtcgcgcagatggttaactacggcttttttggcgacatcgacgtggccgttatcgaagctacagccattaccagcgatgggcgcgtctggctgtccagcggtatcggcaatgcgccgacctggctgctgcgggcccaaaaagtgatcatcgaactgaatcactatcatagcccgcgcgtcgccgaactggccgatatcgtcattcccggcgcgccgccgcggcgcaacagcgtcgctatttttcatgcgctggatcgggtcggtcatcagtacgtacagatcgatccgcgcaaaattgtcgcagtggtagaaacgaatcttcccgatgcaggcaacgtgctggacaacgccagccccatctgccagcagattgccgataatgtggttacgtttctgcttaatgagatggcgcaggggcgcatcccggcagaatttttaccgctgcaaagcggcgtgggcaacatcaacaatgcggtgatggcgcgacttggcgaaaacccggatattccgtcctttatgatgtattccgaagtgttgcaggagtctgtggtgcatctgctggagacaggcaaaatcactggcgccagcgcctccagcctgacggtttccgccgactcgctgcaaaagatttacgataatatggatttcttcgccagccgtatcgtgctgcgtccgcaagagatctccaataatccggaaattatccggcggcttggcgttattgcgctgaatgtcggcctggagtttgacatctacggacatgccaactccacgcatgtcgccggcgtgaatctgatgaacggtatcggcggcagcggcgattttgagcgtaatgcttacctctctctctttatggcgccgtccgtcgccaaaggcggaaaaatttccaccattgtgccgatgtgcagccatgtcgatcacagcgagcacagcgttaaagtgatcattaccgaacagggtattgccgatctacgcggcctctcccctctgcaacgcgcgcataccattattgaccgctgcgcgcacccgctttaccgcgactatttgcgccgttatctggaaaacgcgcccggtggtcatattcaccacgaccttagtcacgcttttgatcttcatcgtaacctgctggaaaccggatcaatgctcggttag

SEQ ID NO: 386372 - DNA, 258 bp, Salmonella enterica
atggagctggccaggcaccaggaatttaccagcagctccggagtaaaagtttatttctgtgatcctcagaactcctggcaacgcggtacaaacgagaatacgaatggactgattcgacaattttttcccaaaaaaacatgtattattcagtatacgcagcaggagttggatcaggttgtggcacagttgaacaacgggccgagaaaaacactgaagtttaaaacaccgaaagagataattgaaaaggtgtcgcgttga

SEQ ID NO: 386373 - DNA, 231 bp, Salmonella enterica
atggcctttcataacagtatgatgggggtaaacgcttctggaatgaaacttgaagcgatagcttcccggtacagtagatgcccactgtaccgggttagccagatatttatccgaggtaacgtgtctggtgggggcccgtattatgcggcggggcgggcagcatctcagaacgaccatgacatgcctgccgtcgcccgccagggggactgtactccggccccatccccgtaa

SEQ ID NO: 386374 - DNA, 1176 bp, Salmonella enterica
atgacggtgaacaatggcgctagcctgcagttaaacaatgctggcgcgtgtaccacaaactgtctgtacactctgaacagtctggtcctgtcaggaggcagtgtcgcgcgttataactcccctccgggtacctccacaggctggaatacactgaacttatccagtctggccggtaatggcgatttttatatgcatacggaggtggccagtggtaaaggagatcttttgaacataaccggaaatgcgacaggttcgtttcggttgtttgttcaggactccggagtcagtccgacttcagatgacagcctgttgctggtcaaaacagggggaggtgatgctgttttcaccctcggaaataaaggagggctcgttgaactgggcacatgggaatacagactgaaagaaaataatagcggaagttggttactcagtccggatctgagaccagcaccacagccagacccgacgccgcagccagacccggcgctaccggctgagaatataaaacggcgtatttcggcatcaactgcagcggttttaaatatggcagcagtacagccgctggtatttgatgctgaactggaaagtgtacgggagcgtctgcaagccagaaaaatggccgagcgtgaagactcgttatggatgacgcagtacaatacatggaataacgtctccacctctgcgggggctgaatttaagcagtcgcttggcggtctgatcatgggcattgatcgcctttcacagtatgaaaagaattcaggtactctgggggcatttttcagctattcacactcgaatatcgacttttcgcgtggtggcgaaggtcacgtggacagctattccttcggcgcttacgctgggttacagcacgaaagcggtttttatctggatagcatcgcgaaggctaatcttttcgacaataacgttaaggggcgaatgaacaacggagacgctgcggatggcgattatcgtacctggggcattggggcacacctggaaaacggaatacgattaagcaacaataactggagtgcgacaccatatatggcatttaccggttttacgggcagcgcccggaaatatgtcctttctaatggtatgcaggctgacgtggatactacgcgtatgctaaggcctgggtatggattatcgcctgatactgagcaaagggggtga

SEQ ID NO: 386375 - DNA, 315 bp, Salmonella enterica
atggataatgaattagaagagatactggcgaaagcgggtatgaaaaaaaaggattctgttattctaattaagctggcagaaaagaaaaatatcagcctgggtcgggccttttttctgtatgcatggaaatattatgcctggagtgcggctttgctattagcaataattttcgcctcactttcagaggggatagagttctttttaataaacgttcttttgtgtatggctgtagctcttgtttcactcttctttacaccgtttgtcataaatttgatttggagtattaaaattcaatttaaattgatcgggaaataa

SEQ ID NO: 386376 - DNA, 369 bp, Salmonella enterica
atggtacagggaagcgaaaatgtttgggaaaatggttattatttattatatcatcaagaacctggaaaaatgcctttacggtatgcctaccgtcaggcagcaaagctcatgggcggggatgaaaaggatggcgatattgctttttcaacgggagatcttattctttctttcggttcagcctcgacgttgacgttgagatcagattcatggaaattattccactatatacgggaagattatatccgcaattggagaaccttgggagtggctggggggatgagcgagttaatcggtgatgcagttagtggattcactatttatcaccttcttggtggagaaagcactaactgggccgaattgagagaataa

SEQ ID NO: 386377 - DNA, 348 bp, Salmonella enterica
atgctcttcaaggaatatgatcagaatgataagtctttagttgaaagtatcaaaattgcgggtttaggtgagcataaagcgcagaaacttattcggcttgctaataaaaacaaaataaacatacaaaaagcctatttgttaacggatgcaagtatcatcaaagttgatattgtcctcctttttgttatgtcattctttatattttcaattgcacaacaagatttcagtgagttatgggctttctttttaatattcggactgttattttttgttattgagttaacctgtcggtttcacaaaaattatttcaaagtatggatggtttatatcaagttacgaggtctctaa

SEQ ID NO: 386378 - DNA, 228 bp, Salmonella enterica
atgacgaaagacgccggctacaccgctgttatctctcaccgttctggcgaaactgaagacgctaccatcgctgacctggctgttggtaccgctggtggccggatcaaaacgggttctatgagccgttctgaccgcgttgctaaatacaaccagctgattcgtatcgaagaagctctgggtgaacaagcgccgtacaacggtcgtaaagagattaaaggtcaggcgtaa

SEQ ID NO: 386379 - DNA, 786 bp, Salmonella enterica
ttgagcagttatgggttaatgagtctacaacgtgagaaagaaaagattgaccagcttgtctttgatattggatttcaatatcttcatgatccggctatgcgttcgaaatatatgattgaggaacgtagggttacatcacgttaccttgatgaatatcggtatggaaaattagatttcggcaggtctatagatagattacgtgaatatcatatgtctttaactaaatatcatatgcaattaaggatggggagtataaaactttatgctattgctcagaaagagagaaattccacttccctgacgacactttcactaaaaggtgtcggttttgctagtgggctatttcagattcttggtggtattggattttgcgttaaagatatccgcagcgcatgcggaaaatttggtgtgccattaattattcaggggggagaaaactcttatgagaatggatattatctttttacacataaagagcctactgacatacctatccgtcatgcatatcgttacatagctaaattattgggtggtgatgataaaacaggggatatcgctttctcttcagtcgatattgctctttcggttgggtccttgggtagtttgactcatattgatggtaccagaaaacttttttactccattcgtgaagactttatacgtggctggcgagctatgggagttgccgggattggttctgagcttgtgggtgatgcttccagtggattttctatataccaggttgtttctcaacctgaaacaaattggtctgagctagaggattaa

SEQ ID NO: 386380 - DNA, 330 bp, Salmonella enterica
atggaatctcaaatcactgttgaaaaattggtagcgttggggttaacagagtataaagcagagcatttgataaaattcgcgcaggacgagaatcttagtctacaaaaagcatattatgaaagtcattgtcgaatttttagagctgatatggcattattgagtgttttcctttttttctttgttagtattctcattggtggcgaccgtgatgggcttttcgtactactgtttttagcgttattatatggggcgggggagttatgttttcgtttccataaaggttactgggaacgactgaaaatttattgtgctctgaaaaactctaattaa

SEQ ID NO: 386381 - DNA, 315 bp, Salmonella enterica
atggatgacgatataaagaaaatactagtgaacgctgggatgaaagaaaaaaatgtccgtttcttgcttaaattagcggcaaagaagaacatcagcgtaagcagagcttttttgctctacgcctggaaatattatgcatggggtggtgcgttattcttctctatgctttttcctgcaacaatgggagggtttgagttatttataatttatatactttgttgcctcgccttagccctgatttcagttttctttaatcctttctttatcaatttggtttggagcatcaaggtccagattaaactaagaggtaagtga

SEQ ID NO: 386382 - DNA, 954 bp, Salmonella enterica
atgccagtcactttaaacttcggtaatcatcacaattatacgcttaatgaaagccggctttcccatctgctaagtgcagataaagaaaaagcaacgcgtatggggagctgggataagctccaggaccactttcgatcggaaagaaaggaccatgctctggaagtgttatacagcattattcacggtcagggtcgtggggaacctggagagatggaagttaacatagaggatatgggtaaaatttacgcgtttaaaaaattgcaatatttagcctgtcccgctcaccaggatctgtttaagatcaagatggatgcctctcagacacaatttttatttatggttggcgacacggtgatcagccaaagcaggattcaggatatcctcaacctctcagataatgtagtagtagagtctatgaatagcgaggagaaacagctatttttacaaatatgcgagataattggttcaaatattgcctggcacccagaattgcttcaggcttcggtatcgactttacgaaaagaggtgaccagcaatgtacaaatcaaagaggcagtttatggattggtgcgtcctgcagaggctcccgaccaccagtttgtagaatggcagagttcactctctgacgatgaaaaatcgatgctgacttgtattaatgcaggcaactttgatcctatcactcaattttgcaaaataggttatcaggaagtacaaggtgaagtcgctttttgcatgatgcatccgtgtatctcctatttactccatacctattcgccgtttgcggagtttaaagaaacaaatgcaggttttttaaataaacttaatcaagattataaagactatcataaaaataaagtttttattgatgcaattcttgaaaaaatatatctaacacatgaacgttctttacatattggtgaaaatgagtgcagtcgcaatatattactggcataa

SEQ ID NO: 386383 - DNA, 300 bp, Salmonella enterica
atggcgactcttaaagaattaatggctcaacaaagcccgaaaagccaggaacctatagccgcgaaagtggcagaaatgcgtcaaaccattgccttaagtatgttaagagaagaacttaacctgtcccagacagagatggctgcggctatgggcgtcaagcagccaacgatcgcaaaaatggaacaagctgataacgacccgcgcctatctacattgaaacgttacgtcgctgctcttggcggtgagctgagtattgatgtcaagctcccgacagggaaaagagtggcgtttactctctaa

SEQ ID NO: 386384 - DNA, 726 bp, Salmonella enterica
atgaaggaatatctggttttccagctttatgcgccgttggcatcgtggggggaagaagcgtccggcgagattcgccattccgcgccggttcccacgcgatctgccttattggggctgcttgccgccgcgttagggatccggcgcgacgaagaagagcgactgaataattttaaccagcactatcatctggcggtacatgcgctggcttcacaggatcgctggttgcgagattaccacaccgtcagcgcgccgcgagaaaacaaaaagtatcgttattacacgcgtcgggatgaactcacccttgcgccggatgacgtgggaacgctgatctcacagcgggaatatcactgtgacggctactggcatgtggcattaagcgcaacgcctgatgcgccgcatacgcttatggcattgcgtgacgcgttattgacgccgcattttccgctatatctggggcgaaaatcctgcccgctggcgttaccgttggcgcctcgtttgatgacggggactttaaaagcgatcttcattgaggcagcgcaggcgctttctgccgtggagttaagcggatttaccttaagcgagggcgtgtgttactgggacgatcctgatgaagccagcttgatctggcagcaaaaacaacacagcaacaatcaacctgtcagccgtcagcgttggcagtttggcggctatacccggttcagcgggccgctgccagggagggcataa

SEQ ID NO: 386385 - DNA, 705 bp, Salmonella enterica
atgtatctgtcacgtatccagcttcggttcaataatctacggccggaaatgttgaaaaaatggcattcagccaggccttatgccagccatcagtggctatggcagctctttccagaacaggactcgcgttcgtttctgtttcgggaagagccgagagggggtttttttatgctttcggctacactgccattagcggagcattccttgtttctcattgaaactaaaccgtttaatccccagctaacaaatggtcttgtgctcgactttcagctacgcgccaatcccgttgttacgcgtaatggtaagcgcagtgacgtgatgatggatgcgaaatatcaggccaaagcgaatggcgtgccgcaggagcagtggtgggaacgccagcagcaggccgcgcagatgtggctggaaaagcaagggctgcagcatggtttccgcttacttgagccagagcctgatgattttagccagtgggcaggggcggaatacagtgaaatgcaggcgcggtgtggatgcgtgcaggcgtatcaacagcatcgctttgtccgtaaggatcaggaaaacgccattgcttttagtagcgttgattttagcggaacgctctgcatcacggacgccgcactgtttgaacaggcgctgttttccgggttaggtaaaagtaaagcaatgggttgcgggatgttgatggtgaaaaggaggcgttaa

SEQ ID NO: 386386 - DNA, 2058 bp, Salmonella enterica
gtgctgctttctctacttaacagtgctcgtttacgacctgaattactgatcctggtactaatggtgatgatcatttctatgttcgtcattccattacctacctatctggttgattttctgatcgcactaaatatcgtactggcgattttagtgtttatggggtcgttctacattgacagaatcctcagtttttcaacgtttcctgcggtactgttaattacaacgctctttcgtctggcattatcgatcagtaccagtcgtcttattttgatcgaagctgatgccggggaaattatcgccacgttcgggcaattcgttattggcgatagcctggcggtgggttttgttgtcttctctattgtcaccgtggtccagtttatcgttattaccaaaggttcagaacgcgtcgcggaagtcgcggcccgattttctctggatggtatgcccggtaaacagatgagtatcgatgccgatttgaaggccggtattattgatgcggatgccgcgcgcgaacgacgaagcgtactggaaagggaaagccagctttatggttcctttgacggtgcgatgaagtttatcaaaggtgacgccattgccggcatcattatcatctttgtgaactttattggcggtatttcggtggggatgacccgccatggtatggatttatcctccgctctgtctacttataccatgctgaccattggtgatggtcttgtcgcccagatccccgcattgttgattgcgattagtgccggttttatcgtgactcgcgtcaatggcgatagcgataatatggggcggaatatcatgacgcagctgttgaacaacccatttgtattggttgttacggctattctgaccatctcaatggggactctgccgggattcccgctgccagtttttgttattctggcggtggttttaagcgtgctcttctattttaaattccgtgaagcaaaacgtagcgccgccaagcctaaaaccagtaaaggcgagcagccgctcagtattgaggaaaaagaaggaacgtcgttaggactgattggcgatctcgataaagtctctacagagaccgtacctttgatattactggtgccgaaaaatcgacgtgaagatttggagaaagcgcagcttgcggatcgtttacgtagccagttctttattgactatggtgtgcgcttgccggaggtattattacgcgatggtgagggcgtgagcgataacagcattgtattgttgattaatgagatccgtgttgaacaatttacggtctactttgatttgatgcgcgtggtaaattattcggatgaagtcgcttcctttggcattaatccaacgacctatcatcaaggtagtagtcagtatttctgggtaacgcatgaagaaggagaaaaacttcgggagcttggttacgtgctgcgaaatgcgcttgacgagctttatcattgtctggcggtgacactcgcgcgtaacgtcaatgaatatttcggtattcaggaaacaaaacatatgctggatcagctggaggcgaaatttcctgatttacttaaagaagtgctcagacatgccacggtgcaacgtatctctgaagttttgcagcgtttgttaagcgaacgtgtttccgtgcgtaatatgaaattaattatggaagcgctcgcattgtgggcaccaagagaaaaagacgttattaaccttgtggaacatattcgtggagcaatggcgcgttatatctgccataaattcgccaatggcggtgaattacgagcagtaatggtatcagctgaagttgaggatgttattcgcaaagggatccgtcagacctctggcagtaccttcctcagtcttgaaccggaggcctccgctaatttgatggatctcattacgcttaagctggatgatttattgatcgcacataaagatcttgtcctccttacgtctgttgatgtccgccgatttattaagaaaatgattgaaggtcgttttccggatctggaggttttgtctttcggtgaaatagcagatagcaagtcagtaaatgtcataaaaacaatataa

SEQ ID NO: 386387 - DNA, 1032 bp, Salmonella enterica
atgggcgatgtgtcagctgtcagttcatccggaaacattttaatgccgcagcaggacgaagtcggcggtttgtcagaagcattaaaaaaagcggtggaaaaacataagacagaatattccgatgataaaacagatcgcgagtatggcgatactttcatgatgcataaggaaacggcattaccggttttactggcggcattgcgacatggcgcgccagcgaaatcagaaaatcacaatggcagcgtttctggtctgcatcataacggaaaaggcgaactgagaattgctgaaaagctgttgaaagttactgctgaaaaatccgtcggtctggtcactgcggaggccaaagtggataaatccgcagtactgctatcgtctaaaaataggccattagagggtgtaagcggtaaaaaattatctgctgatttgaaagccgtggaatctatcagcgaattagcggataacaccacggcaatctctgacgataatattaaggcgttgtctggggataataaaatcatcgtaggtgaaggcgttcgtaaagagggcacgccgctggcgcgagagggcacgccactggcgcgagatgtcgcgccttcccggatggccgctgccaatatcagtaagtctgatgataaagagcataaaaagatcaaagaggcttctcagcttcccctgcaaccaacaacaatctccgatcttagccaattatccggcggcgatgaaaaaatgcctttagcggcgcagtcaaagccggtgacgactatttttccgaccctcgatggtgtgaaaggagaggatagttcgttgacttaccgctttcagcgctggggaaatgactattccgtcaatattcaggcacggcaggcgggggagttttcgttaataccgtcaaatacgcaggttgaacatcgcttgcatgatcaatggcaaaacggtaatccccagcgctggcacctgatgcgagatgatcagcaaaatccgcagcagcaacagcacagacagcaatctggcgaggaggatgacgcctga

SEQ ID NO: 386388 - DNA, 2043 bp, Salmonella enterica
atggtagcaagtgtaagaattcaggctcccgtcgtaatgcctggtatgcaaaacgacatcaggacgcaggccacagatcttgcggcgaatctttccgccgtcagaggaaatgcggcagcgacgctatccggggaaattaaaggtactcaactggaagattttcccgcgctgaccaaacaggcgaatctggaaaagttattcaactatgggaaagacgccggggcgttaaaagacatttttaccagttcaaataatgttggcgctaagaaggcggtaatggagtttgcgggactctttcattcagcgctagacgtcggcaaaaactcgtctgcggcgatggagctactgacgcaggtggggaaagagtataccgcgcaaatcatgaaagatggcctgactgataaatcggcttttgggccatggacgccaggtactaagaaggcggaagcgaaacttgaaactctaaaagataaactgttagatatcatcaaagataatactggcggtgatttaggtaaattatcgaccaattttgttatgcatgaagtgatgccctatattgctgactgtattgaacataattttggcggtaagttagatccgttaacccgcagcaatattacacagcttgttgataaagcggcggcgaaggcggttgatgcacttgatcagtgtcaccaacaattaatgcaagagcagggcaccagcttcggaatgcaagcacggcaccttgaactgcaagcgttgatccccctgttgctacgtaatgtttttgcgcaaattccggcagacaaactacccgagtctaaaatcccggaaccagcggctggaccggtgcctgatggtgggaaaaaaacagaacctgcaggtattaatatcaatattagtattgatagcagtaatcatagtgtggataacagtcagcatattaacaatagccgaagccatgtcgataatagccagcgccatatcgataatagcaatcataataatagccagaagactattgataatagccgaacacttattgataacagccaacgccgttacgagtcacaccattcgaataccagcagtagcgtaacccataatcattctacgcatcaaacggagacgtcacacagcgccggcaaggggatagttgaccagggcattgcgggtaaaattgacgtcacggctcatgcgacggcagaggttgtcaccaacgcttcagcggaaagtaacgacgcaaaggtggtcacgtctgaaaagggaaccacgggtaaaacggttgcttttgatgaagtcgatggcgtaaccagtaaggtcattatcggcaagccagtgcaggccacggtacatggcgttgatgataataaagagcaaagccagacggcaacggttgtggatgttaaaacgcctgccagccaactggctggtgtcgagcgtgaaaaaatcgatactttgcagtcagaaacatcagtaattacacataaccaatcgggtacgatcgctaatgatactcgccaggcagagaacgctggccagttttccggcctgaggtttaaacaaaatggtttcctctcagtaattccgagcgttacgaatatgcattcgatacattttaatgcccgggaacggtttctggaggttgtacgtaaagccctggagccggatggcgccacaccgtttcctgtgcgcagagcatttgatgggttacgtacggaaatattgcccaatgactctataaagagtgcagcattgaaagcgcaatgtagcgagatcgataagcacccagaattaaaagcgaaaatagatacacttaaagaggtcattacccatcatccacaaagagcaaaactagccgaggtggcgcggcaatttgccagagagggagggttgacaaaactaaaaggggaaactgactatgtgttaagtaatgtgctggacggcattatcggaaaccccaactggcgtgatggcccggctttcgagtcatacctgaataaacctggcgtggatcgggtgattacgactattgatggtctgcatctgcagagttaa

SEQ ID NO: 386389 - DNA, 393 bp, Salmonella enterica
ttgcaagcacaccagagtattatcgctgatattggtgaaaaattaggtttgccactcacttttgatgacaataatcagtgcttattacttcttgattccgatatttttatgtctattgaagctaaagatgacatctggttattgaacggtatgattatacctctatcgcctgtttgtggcgattctgtctggcgacagattatggtgattaacggtgaattggcaacgaaaaataagggtgtgttagcgtatattgacaccgcagaagcattattgcttatagatgcaattaccgatctaacaaactcataccatattatatcgcagcttgagttatttgtacatcagcaggaagaactgaagaacaggctgcaagaatacgctaaactatga

SEQ ID NO: 386390 - DNA, 882 bp, Salmonella enterica
ttgaataatttaacgttgtcttcattttcaaaaactggtttgccgagtgatacccgattgtatatcgctaaagataattctcgtgagacatatgttgcgccagagaaatttgcgtcaaaagtattaacctggcttggcaatatcccgctatttaaaaatattgctgcggtgcaaaaacatacagaaaataccaaggtacaggatcaaaaaagcttacaagtatttctcaaagcattaactgagaaatatgatgaaaaaacgatcaatgcagtaaccgtggtggccggattaaatgatacgatcaagcccttgactccagccagaatacaacagattaagaagatggcggagaatgccaaagaaggtttttcaaaagacattatgtctaaacaacatgtgggcctcccgaaacacttttctttagtggttaaaggcggtgagataaaggtgccagaacaaaatgtcgatgcagatgcattgaagacgcaaatgttacttgagatcgctgtaaacggacttaagagaacaataccgcaactggaaaaagtggacgggaagagtttacgagaaaatttccatgcgatgtcttcgggcaacggagcgctgcgttcattgatgacgaatttgacgaatttaaaatatattccagaggctaaacaacttaatgatgatgctattaaattaaaagggattccagtaggagtagctctgttctcacaatgggggaccaacgggggagaggtcgcgaaatggattgataaagcctccgatcaagaattaaccctggctgcaaaaagtattcaggctattattaaagaagtacaaaaaattgcaaatgaactttccaatataaaaattggcgcaccagtgttacagagttga

SEQ ID NO: 386391 - DNA, 1056 bp, Salmonella enterica
atggaacgttcgtccgataatctggctggtatgactgcatctgcttttggggcgggaacttataccgctatgcggcatgcaacctctacccgaggtattttggagtttctcattaatctttttacctgtggaggggttcatcggagaaatgaaaaacattatcaagagctgatagaagctatggctgagacattgaaaaattcaatgtctgatagaagaaatgctccgttgccagaaaatattatattagataatgttgatggagctcgtatcgaatttagtcttcctggcgctaataacgaaaccagacaggttattgtacgtgtcagtaaaggcggaaattctgagtcgaaagaaattccgcggggcgcttttgaaaaagtctgtcgtgctttgctattcagatgcgagttttcactccctcaggatcctattatcttaactgcccagggaggaatgtatcttaaagacgcggttcttaccggagcaaatctgacgctggaagatttatcctgtgcagacctgagcggcgcgaaattagatgaggctgtgttgtttatggcggattgtaaaggtgcaaattttaagggagcaactctatcgggggcatcgttaggcaatagtaacttaacggacgcctgtttggaagatgctattatgtatggcgctaaccttgattatgccaatattatgggcgcaaatttacaacgcgcaagcctgttaggctgtagtatgatggaatgtaatctttgcggagcgaatatggaacatgccaatgcttcaggcgcaatacttactggtgctaatatgactgatacgatattaaaaaatactaatatgatggccgctagtatggacggtgccatcttaaatcgggctaatctgcaaaaagctaatttaacgtctgctagtcttaaaggggctgatttgtatcaggctgatttaaaaaatacctatcttaaagattgtacgctaacctcttcatgtaccgaagaggccaaaatgtctacgagtacacaaacactctttcacgaattttattgcgatgacgtttag

SEQ ID NO: 386392 - DNA, 312 bp, Salmonella enterica
atgcctggatgtaacaatttatgttcatgtgtttccagcccgacgcctcccgagcctaaggagccccctaagcctaagtggatagaattaaaaggttatagtgttacatgtactggtcaggaagatattcgaccccctaaaggggatgaaccaaagaaaagaatgtcaccccatgaattagtgatgttacgacaacttttcaaagaccttgggataacagaaaattcctggcaagacccgacagtaaaacccaataactgtgggatgccatttttcccggtagaatcgggagaacgagaaagcgatgtttga

SEQ ID NO: 386393 - DNA, 1071 bp, Salmonella enterica
atgtttaaacccatacataacaatggtgcatctaacattatatttgattttgatagagcggagaaagatgatattaccggcatgaaagacattgtagattatagagaaaggataaaacaattatctgcagtgtccttacaattttctcaattattttgtcaatttgaaaatttctgtaaaaaaaataatgtgctcattttttgtcatagtgaggaagagctggctcagtgctttgccaatgaaaacccccaatataccttttctgaaagtcttgactatatctcccgaacccattcttatgggtttactgcatcaacagaaaatagaatttattctatttctggagcacaaggaaaacatggtgccaatcatgagttgatgcatctgttatctgctcccggagggaagacaaaaatgttattgcaaatttctgcaaatatgatggaaggaaccaatgagtattttacacgtgaagtagaacagtctatgccagttattgaaccggaaattactgcggcatactcattcacttatcctaaacaatatgaatttattaaaaccatcatcgatgtatgtggtgaaacggtaaaaaatgcactgtaccagattcatttttgtgatgaagacaccgcttgtcttattgatgctatgctccttcaatggaagcaaaaaagcgccatgggaaatatgaagccagtttataaaacaccacctaatgaggtacaagcaagaaattttttaaaaaaatttttaatagaaattaccagtagtatggatggagagtctgataatagtcttgcgcttacggggtttcaaaagcgctttcctacgcctgaaccagagctacctctgcctccaccaccgccacctccgccattaccaggtgcgcgaccaccattaccaggcgcaataccgccattaccaggcgcactaccgccattaccaggcgcgccacaagtttcggatcagatagatttcggcccggatgaggcggcggcataccatatttttaaagcacagatgatggagtttctgcatttagtgccatctccccctccgttgctattctaa

SEQ ID NO: 386394 - DNA, 159 bp, Salmonella enterica
atgtacacggtgaagtggaaaatggttcgtaaggccgttgacgttcaggaggcgacagccgaccagggcgtttgcgccccctggactcgtggcaataactgtccccctgttgaatatttgaaccagataagggggatttacccaatattaaaactatga

SEQ ID NO: 386395 - DNA, 132 bp, Salmonella enterica
atgaatgagaaggaactgcaggattatctccacaatatgggccagaaggcgcggcgggagcttaccgccagattgagactggtaaaaccgaagcggaaaaaagcatacaaacagaatatttcggaacagtaa

SEQ ID NO: 386396 - DNA, 237 bp, Salmonella enterica
atgaaaaagaacgggcagttacgttttagcgtagcgttgggtaactactttgccgggctgggcagtattgcgcgctcataccgtatggagcgcaccacgatgctggtcggtaagcaacggatgccagagggctgcagctatttttatcagaatttgatgctaccagctctgttaaatagcctgcgtggcggctggcagttcaatgagctggcgctgcagcttgatgaacaacgttag

SEQ ID NO: 386397 - DNA, 480 bp, Salmonella enterica
atgacgatcgcgtatatcgcgcttggcagtaatctggcctctccgctggagcaggtcaatgctgccctgcaggctatcgccgatattcccgatagccgtatcgtcgcggtctcttcgttttaccgcacgccgccgcttggtccacaggatcagcctgactacctgaacgccgcggtggcgctggatacgacgctcagcgcagaagcgctgctcaatcatacccagcgcattgaactgcagcagggccgcacacgcaaagcagaacgctgggggccgcgtacgctggaccttgatattatgctgtttggcgatagcgtgattcataccgaacgtctgacagtaccgcactacgacatgaaaaaccgtggctttatgctgtggccgctgtttgaaattgcacccgatctggttttccccgatggactccccctgcgacagcaactgacatttctggcagtagaaaaacctgccggctggtaa

SEQ ID NO: 386398 - DNA, 177 bp, Salmonella enterica
atgatgacgctggtcgagtggtttgaagcgcatggcgtgcggaaaggcatcccaaaaggcgtcgagaaaggggaaagggaagcggcgcgtcgccgcgcgaatgctgcaaaacggcttgtcgcgcagatgacggagtcaacggatgacgagatcgcgcgtctcattaactggcgctaa

SEQ ID NO: 386399 - DNA, 1023 bp, Salmonella enterica
gtgagcgatctgctttacctgaaaataacaggtgagaaacaagggaatatatcctctggctgtgaaacgtacgagtccgttgggaatcgttggcaggttagtcatgaagatggaatttttgtattttccttagttaatacagtaaccagtacgtgtaatggccttaatctacaggggcttaacttttgcaagttgatagacaaaaacacacctcgtttttgtaatgcgataacacaaaatgaacggttatatattgagattgacttctaccggataaataatcaagttcgctgggaacgttattattatattcaactgaggaatgcttcagtagcaaatatccatacaaacttcactcataataatcttgatacagaatccattactgtaacgtatgaatatattgtatgtaagcatcttattgcgaataccgaattcgactatctggcgtttcctgctgactataatggcatgtttattccccatcagatcgcgcccgcgtgccgggtcgtgacgaattctggtatgaagaagaattgcggcagaaagcgctggcggggagtaccgccacaacccgggggcgttttttctggcgggatgatattcacggcaggccgcaggtttatggcgtgcataccggtgaaggaacgccgtatgaaaatgttcgcgtggcgaacatgctgtggaacgaggagacgcagcgttataaatttactcccgcttcccgatgtaaccgattttaacgacgacatcctggtctttccggcgaattcgggtattaaaccgatctacgtctatctgaaagatgagccgagaaagcagcctggcgtggtgacaggcaagggggttgagctatcgccgggaacacgttggctggatatgtcagtgacgaaccagggtaacggcgcgcctatcccggcgcatattgccgataaattgcgcgggatgaagttcaaaaattttgatgattttagagaggcactgtggctggaagtgagtaaggatccggtgttaatggagtag

SEQ ID NO: 386400 - DNA, 855 bp, Salmonella enterica
atgacgctgtttacgacattactggtgctgattgtcgagcgcctgtttaagctgggcgagcactggcagctcgatcatcggctggaggcgctattccgtcggattacgcatttttcgatgttgcgcacgatgggaatgacggcgatcgcgatggcagtgacttttctactgctccaggcgttaaaagggctgttatttaacgtgccgacgctggtggtgtggatcctcctgggcgtgttgtgtatcggcgcgggcaaagcgcgagtacattatcacgcctggctaaaagcggcgtcccgtaacgatccgcatccttgcgaggcgatggccggcgagcttacgctgattcacggcgtgccgccggattgtaatgagcatgagtttttgcgtgagctgcaaaacgcgttgttatggataaatttccgtttttaccttgcaccgctattttggtttatcgttggcggtccgtgggggccggtaacgctggtgggctatgcgtttttacgggcctggcagacctggctggcgcgctatcagacgccgcaccaacgtttgcaatccggcattgacgctattctacatgtgctggactggattccggtacgtctggcgggcgtagtgtatgcattactggggcatggcgagaaagcgttaccggcctggtttgcctcgctggcggatctgcatacttctcaatatcaggtactcacacgtctggcgcagttctcactggcgcgcgaaccggatactgacaaagtggaaacgcccaaagcagcggtgtcgatggcgaagaagacctcatttgtcgtggtagtgattattgccgtgttgactctttatggcgctctggtgtaa

SEQ ID NO: 386401 - DNA, 1458 bp, Salmonella enterica
atgatgcttttctctataatatccgccgtaaaagatggtgtgttattatctgtgcgcactcattttcttttagatgaaaataagctcgttgagcctgatattattggcagtaatgaagaacgaacagtgcaatttgagatgttacttgaccagcttaaactctatccacatgaaacagcagatccattactcgtgtctataaacgcggtaaccccatgctgcgatgagagtaatgtctaccaattggcggtatctacaggggcgctccctttgtatgtctctgagattaatgagttgatgaaagattttttttatcaatatgttattgatgccaatggtcatgtaaaaatgactttccccgatgtatgtaatgggctgaatacgttatggaggacgttcgccgaaggaaattcaaacgcaactttaaaagatgaaaaggttcagtgttcgctttataccatgcctgtagtggcgcaggaaaaaaagagtcctcttgaagaagaaaatatgacgtctgaagaagaaaatatgacgtctgaagaggaaaaaatgacgtctgaagaggaaaaaatgacgtctgaagagaaaaaaatgacgtctgaagaggaaaaaatggcgtctgaaaaggaaaaaatgacgtctgaaaaggaaaaaatgacgtctgaaaaggaaaaaatggcgtctgaaaaggaaaaagtggcgtcgaaggatgtgaggaatttcaagaaaatacaatctgcttttaagcacgaattgcattccattcagagatcattaaatgttcttaatagccatgaagcaatgaagcgttttaaagagaataaaacgctcgaactcttgctacaaacggggatacatactgggtttagtatcactggtagtatgttgggggctgtagtcggcacggcaatcgctcccggctttggtacgatcatcggcgggggggttggcacagggttagcatggacaggtaaaaggttttacaattatgccgcaggcgttgtcagcaataaaataaatcctaatccccatttaaaaaccagggagattgaccggaaaataaaatctgccaggaaaggtgtcgtctgggagtattacgcaaaaataaaatcacgcgttgtggaaccctcgcagacgggcggcattctcctggctagccttatctcgtcagtaataagaggggtctctttacctgttcatgatatagctactgcttgtcatgattataaaagagctcgtaaaggattaacacctgaaaaagcgtctaagattgaagctttgctggtaaaatatcatagtaaattgaatgaagaacatgaacaagtgctcgagtatcttgagaagaatccgacacgagataaccagcgacgtaaaaacaagatccttgaacggggcgcagtgattagcgagcggttagcggctatccgcgaaagtattaaggacgcagtagaaacttga

SEQ ID NO: 386402 - DNA, 417 bp, Salmonella enterica
atgaaaaaatattttctaattattttttcattatttctgctatcccctttggttttttatagttggtttgccctgacatcaggggaacatcattacaaacgtgatgattttttttcttattggttatacacgcccgacattctgaaaaatacgccattaatatcaaaagatgttgaatatgaatatgatttagatgaacagcgaacacttgttgtaataacatggcgtcatattaatgatgttgctgaaaaaaaaacactcttaaatgattttctacaacaacgtggctcttcaataaaatatgattgcttatggatttatcatgaccctaatgatttctccaggaattatcaacgttattgtgtctatcaaaaatcagatactctcgaactggaattcgttgagaccgctaagtga

SEQ ID NO: 386403 - DNA, 858 bp, Salmonella enterica
atgagtaagcgatttgatattactgatggatcttttgcaaccacaaaaaaacagggtttaatctatacagaagagctgggatggatagatttaggtcacgcgcaggggaacgatgccagacgcttaaaaaaaaagcttgagcaagagcagtgggcaacgtactccaaagagttcaatgattggtacttcccggtaaattattatcaagaaatggggaaagggaaaaccttatttgggataaaccttgcttttcatactggtgtacatactcaagtcatggtgcgtgcttgtctttctcctgcgctcaaggcgcgagtggctttgactattatgtatgggacggcaaaacggttcgaagcatggcagaactctgtccttttcaactggtacacggatagtggatttagtgtggaggatttggtttctgatttagtaggcttttatcgcgtttttggtacggggccagaaccgctgtggcgagcaaaacctgtatcctatgaaacagccatacagatatgggatgcccatgatcccattggcacttttaagaatacagagttttctccatacctgttttcaacaaaaccgccattgaagtatggtaagcctgtcaaaaaaaatctcccagagtggttgagttatataaaaccattaggtgattcattctcaggtttattgtacaatcagtttaataataatcctgttgataacttttttaagaagaaaaatagattgaatcatgagctttatgctacgctttcaatttctggtacacggaggttcgcagactccccttttgagagaccatttttttttctgcttcatccccattctccatttaagggaatgacgagatga

SEQ ID NO: 386404 - DNA, 228 bp, Salmonella enterica
atgacattagatcaggttcgcgccagtaaattaaccgaggccggtatagtggcgaatcaaaaagatgacttcgccattaatctggaaggctacgatactcagtccagccagaatgcggcggttatttttaatggccagcaggacgcaaacccgccggggtcgctggcgaatacgggcggagcaggttcggcgacgaatgccgccacagaccgtgaaactgacgcgtag

SEQ ID NO: 386405 - DNA, 390 bp, Salmonella enterica
atgaccgtttccatccataccaacacatttgacgtcaacagcgggtatcaaaaaatcatcttaactttcatcaatgagagcgatcaaccggtcgatatgaaccatgccgcgataatattcatggcttccggacacatcgatccatggggaaatcgcggcggtacgctggacactaacgacatcatcattaataacagcgacgcattacttcttcaaccgggcgaacgcgggacgctttccctgagtctcgcggctacacaggtgccggtaaaaatgtccgccatcacgttgacgctggcgccatcttccaccgaaggcgctgcgtctgaaacgatatccgatgaagactcgccagttatacccgctacagatacagcctgccgggcgtga

SEQ ID NO: 386406 - DNA, 2082 bp, Salmonella enterica
atggctactagcaaactgatccagggtgatacgcttactgaaaccagcaatgcagcagatggttttaaccctgcaaaagaagacagcaaatttagctatacttccgcccgcgtagcgaagcgtgtgtataacaaatataagaaagctgacaataagccgaaagtgtttggctacttcactgactggtcacaatatgatggacgtttacagggtaacgatacgccgtcggaacgtggtcgtggctacgatttggcccaggtctctcctactgcttacgacaaaattattgcaggttttgttggtattgttggtttccgtaaaattgacggtcagtctcgtgacgtagtacaggaagcggcagacgcgtgcggcaaagtaaaatatgagccgaccttcctcgacccgtggggggatttccagtcttatgttaacgtcggccattcagtcagcggctgggatgttgatccgaagacggtcacgcagtccaacaccaaaggtttcctgggcgggctgcgcgatctgcaggcgaaagccaaacagcagggccacgatttgacgctttctatgagtattggcggctggaccatgagtaacggcttccatgaaatgacctccagtgccgaatcccgttctatcttcgcgaaaggcgtagtgaaactgttcaaacagttcccgatgttcagcgaagtcgaccttgactgggaatacccgaacgttgaagctgccggcaacccgtatggcccggaagatggcgataactttgcgctgctgattgcggaactgcgtaaagagctggacaacgcgggccgtagcgatgtgaaaatttctatcgccgcatctgcggttgtcgccaacattgaatactccaatgtgaaagcgctgatggcagccggtctatactatatcaacgtaatgacctatgacttcttcggtacgccgtgggcagagacgctgactcaccacaccaacctgaacgcgctggagaaaggggcatggggcgttgatactattatcgaccatctgctggcggaaggcttcccggccgatcgcatcaatattggttatgccggttacacccgcaatggccgcgacgccgaaatcaatagcttctctcctttaaacggcagctacaacccaggtaccggcaccactaccggtacgtttgagtcgggtaccagtgaatggtacgacgttatctataactacctggatctggaaaaccagaaaggccgtaacggctttaacgtgtacaccgaccaggttgccgatgcggattacctctacaacccggaatccaaactgttcctgtctctggatacgccgcgttcagtgaaagcgaaaggcgaatacgccgcgaagctggggctggggggggtgtttacctggaccgttgaccaggacaacggcgtgctggtcaatgcggcgcgtgaaggtctgggctacgagatcgaatctgaagtcattgatatggaaccgttctacttcgaaggcatcaacgtcgaaaaagatgaggatgaagaagatgagaccgtggttgtcaatcatgcgccgaaagcggcaattgagctgctggttgttggtggttctaccgtacagttgtctggcgccggttcttctgatgaagatggcgatgcgctgacctttagctggggtgtgccgaccgagatcgatgttgcggacaaaaccgtgtcagtcattcagttcaccacgccggaagtaagcgcgaaaacaacccttcagttcacactgtttgtccgtgatgagcagggtgaaccctcttctcaacagcgtttcgtgctgacggttgttccggcggcttctgacgtccagccagaacccgcagatgacgttgttccggacgaagaagatgtgacccctgaggaagatgacgttacacctgctgaggacaatacgccgaatccgctgtgggataaagatactgtctatggcgcaagttggggcactttcgaaatcgttagctggaaaggccataactatcaggtgaaatggtggtctgtgggtgaccagccagacctgaactgcagtgccagcggcgcatggaccgatcttggcgcttactaa

SEQ ID NO: 386407 - DNA, 684 bp, Salmonella enterica
atgaaacacataaagagatccatgttggtagtattactggcaagccatgttgcccatgccagcattgttgttggcggaacccgattggttttcgacggcaataatgatgagtcgtcaatcaatgtcgagaataaagacagcaaagcgaatcttgttcagtcatggttatcggttgccgatccccaggtcacaaataagcaggcgtttattattaccccgcctctttttcgccttgatgccgggcaaaagaacagtattcgggttattcgatctggcgcatccctgcctgcagatcgggaatctatgtactggctcaatattaagggtatcccttctattgatgataatgcctccgcaaaccgcgtggaaatttccattaatacccaaataaagcttatttatcgaccaccagcattaacaaaatcgacgcctgatagccagagccaacaattaaaatggcagacagcaggtgatgttattacagtaaataaccccaccccctattatatgaactttgccagtgtaacgattaacggccatgaagtgaaatcggcgacattcgttccgccaaaatcatcagcgtcatttaaattgagttctactgccgcccctcacggtacggtaacgtggcgattaatcagcgattatggaatgagtttagagccgcattccggttcattctag

SEQ ID NO: 386408 - DNA, 369 bp, Salmonella enterica
gtgacctgcagggtttcaatcctgccttccgcctgggccatcaccgatattgtcgggtcacgccagtgttgcagaatgggcaggttattgtttatctggtgtgtgcgccaggtaacgtcatcttcctcttccttcatctgttttgccggcggggctgagatatcctctttagtcgagggaagcgatcgtttttccccgctgctcgccggtggggtactcacgctgacggttatctcatcacctgtggctgcggatgttgatgcccgtggactgtcactcgtgacggtcgcggacggctgcggacgcgatgtgccactggatggtatctcgctgtctagcggtgccagatactttctggcgcttatgtag

SEQ ID NO: 386409 - DNA, 153 bp, Salmonella enterica
atgccactcctggtcgctcaggtgaagtgtgacgggggggaagtcgctgtttttaccggaggcaatcatgcagatggtttcaccagtaccgagtatccgctctgtggcgaaattatcctgacgtcccggagaggccagtgctttcagttttaa

SEQ ID NO: 386410 - DNA, 264 bp, Salmonella enterica
atgaaacatcatgcttttatgctttggtcgttaattattttttcatttcctgccctggccagttcatgccgttcccccggcttacaacagacctcatgggaaatttttatctatgattttggtagtaaaaccccacaaccgcctgcaagtaccgataaaaagcaagccagaaaaatctgctcatcatcctgttctactacaaaaccccgaatgtccgagccaacaaacgcgtctaaaaaagagaatactttctccagagcgtaa

SEQ ID NO: 386411 - DNA, 162 bp, Salmonella enterica
atggcagtgatcaacacccttctccattatcagacccagcgccgccttcgggcggccttttgggaggaaatatggtcgctaaaaataaaattcacggtcgtcgtattcgtcaacctctacaacggttacctaatcgttgtcttttccagcaactggcggtaa

SEQ ID NO: 386412 - DNA, 546 bp, Salmonella enterica
atgattcgccatatcgccattttcctctgttctttattgatgtgtagcgccacttttgctgattcagtaacgtcggtatcgcttggcgcgctctctggcatactcaatgaacgcctgttattaatgaaagaagtggctgcctataaaatgaagcaccatctaccagtagatgatttcgttcgtgaacaaaacgttttcgccggggctgaagaagaagcgaaaaataacgggctggacccgaattcaataataccttttattcgttcgctaatggacgccagtaaagcgatacagcaccgctacatagtgcagtggcgagccgggcctgaaccctcctttccgatacaaaccttgtcgctctcccggcaacgtattcgacaacttgataatcaactggtgatcgttatcagccagcgtttgatggtgggcgctttcagccacgaggatatggtgtggctgaaagcgcagcttactgcgccgaatctgcatgagagcgatatcagtgatatgttagctgcattgtctctggtgcgtcgcgtgcgttaa

SEQ ID NO: 386413 - DNA, 189 bp, Salmonella enterica
atgaaacgatttaaacaaatggcagcaatgttgctttttgcattactgaccgcgggttttacgtcgtcagctatggctgatgatcctttttcacatctttttgataggattcctatgtgtacgattaaccctcaaggcgtagaacagcctatacatttagggccttggggctggccgtggtgttggtaa

SEQ ID NO: 386414 - DNA, 141 bp, Salmonella enterica
atgcatccgatggtagataaggctgcgcaggggcgtaacgtcacggcggcgcttgagatagccttgtcagcagagaaactgaccttaccggataacgcctgggctgccccaaaaggagaaactgcgttggatatagtgtga

SEQ ID NO: 386415 - DNA, 291 bp, Salmonella enterica
atgaccctgaaaaatctgcgccagacgttagtggatacccagtttcttattcgctctctgagtgcgaacaattcttggcctcataattatgcatataatatgacgctcatatgtattaacatgaatatcatgctgtgtccttttgggctcattttttttgatggttttaatgtttacctgttattaatttttgttatggtagcgttgttcttaatgatgagttcatttaacgtctgcctgattaatatcagtcaatgctcaccacctgtattattagggggctattattaa

SEQ ID NO: 386416 - DNA, 375 bp, Salmonella enterica
atgaaagctaaaaaaacgatgaacgcgttcgaattacacgcattacgacacatttttaatatgacgattgaagaatgcgccgcctatatcacccaggataataattcaacggcctgggaacgatgggaaactggcgatgcgataatccctccagaaatcattaccaggctgatggagatcaaagcaaagaggcagcggcgaattaacgctattattgacaaaataaatcatcgtatcggcaataatacgatgcgttacttttctgatttacctacctttcaatcggtctataccgatggtgattttatagactggaaaatttatcaatccgttgctgcagaacttttcgcgcgcgatctggagcggctatgttag

SEQ ID NO: 386417 - DNA, 324 bp, Salmonella enterica
atgataaagaaaaagactgtttttagtgaatatcgtgatttagagcagagttacatgcagctaaatcactatcttaaaaagtttcatcaaatcagggctaaggtgagccaacagctttctgaaagggcagagagtcccaaaaaaagcagagaaacagatgctatttttgacaacttatttccacaaggcgttgccggagttaaccaggaggctgagagggacctaaagaaaatagtgaatttgtttaaacaacttgaagcacgactgcaacaacttaatgctcaacccccgatggaaataccgtcaggcaaaacgaaaaggtaa

SEQ ID NO: 386418 - DNA, 594 bp, Salmonella enterica
atgtattcaggaaacatcttttggggaaatcaatcccacattacagttggaaagaatttcggcattagcaattttgatacaggggggcaggatgacttatcccaaaaaaacccttttgccgaagggtatgaggttttgctttttctccttatagttatccaggctatcgcaaatgctaaatttatggagattcagaagaactctgaacgcgccagaaatacccagcaaaaatcaaatgaaatggatgaacttattgctcgagcggcccaagaaaaagaccctaaaaccaaagaggaggttcctaaggatgtaattgattacatgagcagaaatggtattttaatcgatggtatgactataaatcagtatatggataaatttggcgatcatgggaaactggataaaggtggtctacaggcgataaaagcggctctggataatgacgccaacaaggggaccgatcttctgagtcaggggcaggtaataattcaaaaaatgaatcaagagatgaacgctgtccttacccaactgacgagtctgatcagtaagtggggggacatttccagtatgattgcgcagaaaacgtattcatga

SEQ ID NO: 386419 - DNA, 1458 bp, Salmonella enterica
atgaatcgaatttacagtaatagcgatagcgccgcgggagtaaacgccttatcacatcatcatttaatcaatgtcagtagcgtttcctcgggatcgctggcaaaacaccagcgtgtgaatcttgcctctggcaatagaagaattagctcagcgtgtgtgggaacagggaaaattagccttatggaggcagacggcgcgttgcagcaactacttaatgccgtccccggaaatcataaggtgccaccattacctgactttttgcagataaatcccgcgcttttatcaatgatgctgacggcattagtactcagcgttttcggtagtaacgcgcaattgttatgccaacagcttgaacgggcaactaatgtacaaaatgccttacgtaataagcaggtgcaggagtatcaggagcagatccagaaggcgatagagcaggctgataaagcgcgtaaagcaggtattttcggcgctatttttgactggatcaccggtatatttgaaaccgtgattggcgccttaaaagttgtggaagggtttctgtcaggtaatggtgcagaaatggctagcggcgtagcctatatggccgcaggttttgtaggaatggttaaagctggggctgaaacagcaatgctattaggtgctaatcccgacgtctgtaaggagattattagcgttacaggtaagattcagattggctgtgaaatcgccgcgctggtactggatgttttccagattggtcgcgcgtttatggcggcgagaggcctgactggtgccgctgaaaaagtttttgaatccggttttggagaagaaatcgctgagcgtatggcaggcgcaggcgaagaagaaatagaggcactggctgaagagtttggcaataaggtgagcgaaaatttttccaaagtattcgagcctcttgaacgtgaaatggttgatctgggagagatggaagaggaatctgccaatttttctcgtgacgtagaaaaaaatatgacgcaacgcgcgggaaaaagttttaccaaagagggggtgaaggccatgacgaaagaagcggcaaaagaagccctggaaaaatatatgcaaaaaggggaaaaatttctgttagacgattttcgtaagaaggttctctcaaaaatatttaaaaaaatcatatgtgccttaataagagattattcatttaaaagtttacaggctatcagatgtgcaaccgagggaggcaatcaggcgaatgctggcgtgattaaaatagacaaagcgaagctagaaaagaaaatagaacaattgatagctcagcaacagtttctggagttcataatggaacaaactgaaggccaaaaaaagatggaacaaaagcgcttgcaggcactttataaggatagcggcaccgcggttaaagatacgttagataccattgatagttatagtagcgttcaggcgagaatggctggctggcgcgcttaa

SEQ ID NO: 386420 - DNA, 585 bp, Salmonella enterica
atggaagcgagtaacgcagtatcggtattgccatcttccttgtcagcttcatccacatctcaaacccagtccggggagagagtagattttgaatcattactgctgttatttgataaaatctggatgaagctactagagcttgccaaaaagctgcgcgatatcctgcgatcatataatgaagtaagacagacgttgagttgggaattacaggtcaatgccttaaaaacgcaaatgcaagcgattgataaaacatgtgaagcagcaatacttactggggttggctcatgtctttcgggaatgctgaccatgggattcggggttgtaggcggagaatccggcgttatattcggtcaaggcgtaggacacaccgctatgggagggtttggcgttggcgctggtattgtgcaacgtcaaggcgatcaagaaggtgcgattgctggactgcaacaagctggggctcaatcttatagcaaaaacatgatggatatcatggataaagcgcatgaaatcatgcagcaaattatgggtatggggatgtcattggtcgaggttcttgctcaaatgctccggtcattagcgaggtaa

SEQ ID NO: 386421 - DNA, 414 bp, Salmonella enterica
gtgcaagaaatagaacaatggttgcgccggcatcaggtgttaactgaacctgcatatttaggagaaacctcaatattacttgggcagcagtttatattatcgccttacctggtggtatatcgcattgaggcagaagacatgattatttgtgagtttcgacgcctgacgcccgggcagcctcaaccgcaacaattgtttcacttactgggtcttttacgcgggatatttgttcatcacccgcaattgaaatacttaaggatgttggtaatcaccgatattctggatgaaaaacaggcagtgctacgcagaaaattattgcgcatcctgaccgcgatgggcgctacctttacccggcttgatggtgataactggacaattttatccgcagagcatcttattcaacggcgtttttaa

SEQ ID NO: 386422 - DNA, 789 bp, Salmonella enterica
atgagggggcatattccgccagcggcaagcaatatagtcagggacaatagtattccttccgatgtgcaagcggaggaggtatcgtttcctccccccgcaattccagcgcctgacactcccatctcccctgtgctgcttacgcctgaacagataaagctacagagggattatgctattcattttattcaatacacctttcgtgcgttgggggcgacagtcgtatttggattagcggttgctgctgcggttatttctggcggggcaggattacccatagctattcttgcgggggctgcgctagtgattgccattggggatgcttgctgtgcgtatcataattaccaactgatatatcagcaaaaggaaccgttacacaccgccagtgatagcgttgcttttgtggtcagtaagctggcgttaaaatgtggagcaagccttaactgtgctaacacccttgccaactgtctttcggtattgattcgttcaggaatcgctatttcttccctggttatacccttacagtctccattgcctgtcgctggcgatacagcggcttctttggacatggggactgtaatttcctcagctagcctgatggcgataggtgcggtactggattattgccttgcccgccccctaaatgataatcaggatactccttttgatgagcgccatgacgatcccagtgtgttattggctgaaaaaattacagagttctgtcagtcagatactctacctgcattaatggaaagtatgggtaatgaacatcgaggagctggaggaccatga

SEQ ID NO: 386423 - DNA, 696 bp, Salmonella enterica
atgaaacctgttagcctgaatgtccacgcgggggggcaacttccggttcccgcgcctgcggactcatcgccatgtcccacattgccgcatccggaaaccaatatggatgtggagagcggtagaatagggcctcagcaaggaaaagaacggttattggccggatttgctaaacgagtgatagcggtgtttccaaaagaaatttttagctggcaaatggtcattttgggcggacaggttttatgttgttccgccgggatagcgttaactgtgctaagtggtggaggcgtgccgctcttagctctggcgggagttggcctcgccatcgccattgctgacgtcgcttgtcttatctgtcaccatagacatcatttacctatggctcacgacagtataggaaatgccgttttttatattgctaattgttttgtcaatcaacgcaagagtatggctattgctaaagccgtttccctgggtggtagagtagccttaaccgcgacggtgatgacgcactcatactggtgtagtgctttgggactaccatctcatttattagaacgtatgaatgatattacctacggtctaataagttttactcgttttggtatggatgggatgtcaatggctggtatgcaggtcagtagtccattctatcgtttgctggctcaggtaaatccagaaaaaaacgtaccggagtag

SEQ ID NO: 386424 - DNA, 267 bp, Salmonella enterica
ttgaatatttctgatatcagcagcgtaatgcctgtaagcactcaatcttctgcaacgtcccctatggaatcgggtcaggagcagattgatctttttaaacaattactgacagatggtatgacaaccggtaacgccagtgctttactaccttcggttatgttggacagacaaatgaattatatggaattgacagtaggagtggattttcttgccagaatatcaggttcagcatcgcaagcgcttaataagctggtaagtatgacatga

SEQ ID NO: 386425 - DNA, 432 bp, Salmonella enterica
atgcggacccgagttactaataaaacaattacaacaaatactcaccgagtgattctggaaaccttgctggagataatagcgcgacgtgaaaagcaactacatggcaaaatagccatacttgatcagcagaaacaagcgcttattactgaacagcagagttgccagacgcgcactttagcagtgaatgccagactgaaagaattaatgggctggcagggtacattatcttgtcatttactgttggataagaaacaacaaatggccagacttttcactcaggcgcagagcattttgacgcagcggcagcagctagaggagcaatatcagcagattgtctcccggcgaagtacattacaggagaatttcaatgcgcttatgaaaagaaaagaaaaaattactatggtattaaacgatgcgtattaccaaagttga

SEQ ID NO: 386426 - DNA, 969 bp, Salmonella enterica
atgttaagaataacgaatgaagagctcccgtggatggatatacttccaccggaaggggctacaattggcgagttaacattacgtatgcaagaatatccggtacaggaaggggtgttatttaccataaattataataatgaactgggcagagtatggattacagaacaatgctggcagcgctggtgtgaagggttaattggcaccgctaatcgctcagttattgatcctgaattgctatatggagtagctgaatggggactggcgccgttattgcaagccagtgatgcgaccctttaccagaatgagcctccaacatcttgcagtaatgtgccccatcagctaacgttgaacatcaaatggatggttgaagaacatgaattccatggcattatttttaagtggccaacggcttttttgcgaaatatagttggagagctttctgccgagagtcagcagatttatcctgcgcttcccctggaggtccctatatacctggggtggtgtcagcttacgttagctgaacttgagtctattgaaatcggaatgggcattcggattcattgctttagtgatatcagaatcggtggttttgttattcaattacctgggcgtatctatgccagggtattgctaacagcggataatatgatgaaattcgatgaattagtacaagatatcgaaacgctgcttgcgcaaggacatccaatttcaaagagcgacggagcgttttcagtcgaactcgagcagttaacgcaaagcctgctctttgagatcggtcgagcgagcgtagaaattggacaattgcgacaccttaaatcaggtgacgttttgcctgtaggtggatgttttgcgccagaggtaacgataagggcaaatgaccgtattattgggcaaggagagttgattgcctgtgagaatgaattcatggtgcgtattacacgttggtatctctctaaaaatacagtataa

SEQ ID NO: 386427 - DNA, 408 bp, Salmonella enterica
ttgtcgacccccattaccgcacaatacgaaaacctgtacaatcatgtgatcattaaccggaataccgttaccggggggcttaagacactggtgctttcgtatcgcaatatccaggcaggagatacccttcatctgcattatgaaatcaccggcacgctctctacgccgctggatcctgacgcatcaattaccccccttccttacacctgggatacggattataccatgacggcagatgatattgcgtccggaaaacctatcgagtttatcaatccggataacctggcatggactgacgcccccggtggagaaccaccactggaagccaaacccaccgttaccgttgtatgtccgtcaacgctggaacacgaggtcgggactattagcgtacctcttgatactcgctga

SEQ ID NO: 386428 - DNA, 123 bp, Salmonella enterica
atgatttttggattatgttgcgaatttattttcgttccggccagaatagaccagacctccttgaaacaggataacgtgaaaactaaccagacagggatggtacgcttgcaacatgcatggtga

SEQ ID NO: 386429 - DNA, 960 bp, Salmonella enterica
atgccagttacgttaagttttggtaatcgtcatggttatgaagttaatacttcacggctagtccgcttgatgagtcctgataaagaagaagcgctatacatggggccatgggatcgatgtaaggaatatttcagaacacacaaaaaaaaagaggcactggaggtattatatacactcatccatggatgtgaacgtgaaaatcaagctgaacttaaagttaatacagaagccatggaaaggatatatgcctttgaacgattaaaacaatatgctaatccaccccaacaagaacgctttgttatgcattttgataacagccagacacaagttttatttgagattgatggcgaggttattgataaatgtagtttgcaacgtatcctcaacgtttcagatagctgtgtttttaaccagatgaatgatgatgaagtaaagttattttttaaaatatgtatttattatgggaaagcaattttcctacatccagaattgttacaatgctcttcttctgaacttagacaggcagttaatgaggatgatgatattaaggatgaagtttataaatttatgcgacctggagaagatcgaaaaaaggcatgtgttgaatggcatggtacgcttactccggatgagagagataaactactctgtcttcaaatggggtcttttggtattcatacccaattttttaaaataggttacaaggaatcagaggggggagtccagtttaatatgcttcatccaacacttctctatctgctacaaggatatacaccgtcatcgttaccagattttatagctatgaacaccgggctgttaactttggtattaaaaaaggattatgatgattatcacaataataaaagagaaattgatagtattctcgaaaaaatatatagatcacataataacactttatttataagtaaagattctagttgtcgtaatatgcttatataa

SEQ ID NO: 386430 - DNA, 153 bp, Salmonella enterica
atggtccaggggatacatgttcggcatcaagatcttacgcaatcgatgatgctacctgtcggggtcgcgatttacggccagattccgccaacattatgggtgtctgcccagtcaggtacgttaaggatgtcctgtatgagccttcaccagtga

SEQ ID NO: 386431 - DNA, 855 bp, Salmonella enterica
atgaccaccataacaattgttactgcttattttgatataggcagaagtcaatggacatcacaaaacgggtttgctccacgtattgagcggactactgatgaatatatgacctggttttccaatcttgctgaactcgaaaatgacatggttattttcacctcacctgacctcaaaccaagaattgaggaaatccggagaggaaaaccaacaacaattgttacattgaatttcaataaaaaattttgtcatatcaggcgccggatcgcttctatacagtccgatgtagcgtttaagctcagaacgcctgtcgaacagcgagggaatccagagtttctgtcggctgattacgttttactctgtaatctgaaaacgtactttgtgaatcaggctatcaggcaggggttaatcaaagacgatatggttgcctggattgattttggatattgtagagattctgataccacgaatggaataaagaaatggtcatggcccttcaataaggaaagaatgcattttttcacaatcagaagggggcttaaacttagaacgctggagtcagttttcaactgtatgtcaggtaaccatgtgtatatcatcggtggagttctggccggagcattagagaagtggcaagaattttacagactggtttggcaatgccaaaaggaagcattgagcgagggtattgtggatgatgatcagggtatatttctgatgtgttattattacagccctgacatgataaagttaaactacttgggtaaaaacaggtggtttgacttattcagatgcaagggaaagaggacgatccggaccttttctcataatatgaaaatattatgtttgcacaaataa

SEQ ID NO: 386432 - DNA, 249 bp, Salmonella enterica
atggcaggttaccagtatactgaattcactgatcatcaaacaggatctgcacgccctggagaaggatacgacgactggctgtatgaagcaggccgtgacgttgatgaagccgaagagcagatcaaagaatggttgccacgtctgtggtctgccatccaactggcacgaaatacattcggtaccggcggtgggtttattgtgacgacaaacaaagatggtcgggtgatcccgaacacgttgaataactga

SEQ ID NO: 386433 - DNA, 174 bp, Salmonella enterica
atgaaagagaacaatctggttaaacagacaatttcaagtgttccttaccgggaaaatgaatgttgttatgtctttttatggaggaaggttactttgcacacaaacacgcaaaatttattatcagaaaagccgcagtatgcatcagaaccctttgatctgactgagtacaggtga

SEQ ID NO: 386434 - DNA, 999 bp, Salmonella enterica
atgaagtgttctgctattgctgccagcctttcggttggcctcttactcagcatgtctgcctctgcgacagggaatgctaattattctgatgtggtaaatcaggcctggcaaaaatttaaagatgataatagcgggaaagtagctgattatattcctgcgctggcgaagtatagtgccgggaattatgcgattgctctcgcgacagtcgacggaaaactgtaccttgccggtaataccgggcagaaatttccactggaatccctgacaaaaatattcaccctggcaatggtgcttaatcagtacgggagcgatgaagttctgaataagctgggcgcaaacgcgacgggattaccgtttaattcaggactggcaatcgaacttcggtcggatcgtttacagaatcctctggtaaatgccggtgcgatcagcaccgtcagtctggtgaaagcaaaggatgcagatgcccgctggcagacgattatcagcaatatggatgcgtttgccgacagccatctgaatgtcaatcaggacgtatatcgctcggaatccgcaacaaaccagcataatcaggcacttggccgtctgatgctctcttacaggcggatctacagtaatgtcgatgaggccgtggatttatatacccgccagtgctctgtcgaggccacaacggtacaactggctaaaatgggagccgtgctggcaaacggcggccgctcgccgtttaatggacgacaattattaccggcacgctatgttcctggtgtgctaagcgaaatggttattgctggcttatatgatgattcaggtaaatggctttactctgtggggcttccggccaaaagtggcgtggggggcggtatggtggcggttgttcccgggcagtatgccgttgcggtgtattcaccgccgttagatccgcaaggcaatagcgtcagagcacaggaggcgatccgttatattgccaacgaaaccggctccagcctctggcaaccacattaa

SEQ ID NO: 386435 - DNA, 492 bp, Salmonella enterica
atgaaatcctggtatcttatttattatcgtacccgcctgcatgagcaaataaaaaaagagatgcagaacattggcgttgaattttttatgccggtatacacaaaatatacggcgcgagcagatcggactcaccattaccgtacgcgtgaagcacccctttttccggggtatctttttatttatttttctccagaagatattcataccacggtgatttcccggcaacccagtgtgataggctttgttcgtttcgggcatcgtatccagtctgtgcatgatgaaattattctcacgttacagaaaaatatccccggacattttttgcccactggaaatcacatcggcgtcaataaaaagaaaccggacccgctgttcagcaacatgctgaatgatgaaagcccggaaaaaagaaatcagtttctgatgacgtttatagaacgctactcccgtcgtgagcgaacgggtcagataacgtattaccattcgacctga

SEQ ID NO: 386436 - DNA, 1398 bp, Salmonella enterica
atgcctcagaaaataaaaacacgattcgcgcccagcccgactggttttttgcatgtcggtggcgcgcgtaccgcactttattcatggttgtatgcccggcaccatcagggggaatttgttctccggattgaggatactgatgttgagcgggaaaaaacgggtgcggttcaggccattctggatgccatgcgttggctgggaatgacctgggatgaggggccttactaccagacccggcgcctgactcgctataacgaggttattgatcaattactgacatccgggaaagcgtatcgctgttactgcagcaaagaacgactggacatgttaaaggcggagcaggagaaaaaccaccagaattttatttatgaccgtcattgccttggcctatctggaggtaatgagagccagccgcatgttattcgtctgaaatgcccggaaacggggatcaccggatgggatgaccttattcgcggacgcattgaattcaataatgccgagtttgatgattttattatccgcagaacggatggctggcctacctataatttttgtgtcgtggtggatgatatggatatggaaatcagccacattatccgggctgaagaacatatcaacaatacaccaaagcagatccacgtttatcaggcactgaaccatcctctcccggtttttgcccatgtgtcgccgatccttggcgatgacaacaagaagttatccaaacgccacggtgccgtcagtgtgatgcagtatcagcaggatgggtttttaccggaggcgctgctgaattacctggtcagactgggctggggtcatcaggataaggagctgttcagtattgaggagatgatttcagcgtttgatatccggcacgtcagtaagtcacccagcgcatttaacaccagcaagctgttgtggctaaaccgacattatattgctgaatatccggctagccaactggtgccctgggtgagggcgcgactgaaacaactggaggttgatgtttcccggggaccggatattgaacgtgttatctctctttatcaggggcgggcccggacgctggaggaaatcgcacaggcggtggttagttattacatcccgccgtgcaataatccggacgctgagcaggctgattataatttctttattatccagtccctgcgacatgattttgccgggctggaagaaaaacagtggaataaagacaatatagccggcctgcttgggcagtgtgtcagtgattatgagaccacgcttcaggtggtcagtatgccattacgaatattcctttttggaagcaggaacaccccttcactgggagagtgtctggcagtgctgggaaaaaatgaaacactctgccggatggataatcttctccataatatccatatataa

SEQ ID NO: 386437 - DNA, 1344 bp, Salmonella enterica
atgtctgatttatatatcccagtttattccactgatattgctcagcaggctttaccggaagaccggatcccggaaatgtcacattcgcccgaaacggtttttaaccttgtcaaagatcgactgatgcttgatggcaacgagaagcagaatctggcgacgttctgcactacgtggacagacaacgaaatggatgagctgatgaaactaggctcggtcaaaaacttgattgataaggagctgtatccggaatcagcgaaaattgagcagaactgtatcaggatgttggctgatttgtggcatgcgccggatgcgaacaaggccattggcacgtcaactgtagggtcaagtgaggctgcgatgctgggcgggctggcgctgaaacgccaatggcaggcgtcacgccgggcaaaagggctgaataccgataaaccgaatctggtgactggcccggttcagatttgctggaaaaagttttgcgcctactttgaggtggaacaccgcgaggtaccgatccgtgccggagagttgaaagctcatccggatgattttctcccgtatattgatgaaaacaccatcggtgtggtgcccacctttggtctgacatttaccctggtgtatgaggatgttcagggggtgtgcgcggttcttgatactctgcaatacaataccgggctggatattcccgttcatgtggatgcggcatcgggcggcttcattgcgccttttgtggatacccagaaagatattgtctgggactttcggcttccccgtgtgaaatcgatcaatgcctcggggcataaatatggactggctccgctggggctgggctgggtgttgtggcgtgaaaaaagcgatctgccggatgacctgattttttacgtggactatctggggggcgatatggcgacgtttgcgctcaatttcagccgtccggctggctctgtgattgcccagtactaccagttcctgcggctgggtaaactgggatatgccgaaatccaggaaacctgcatggggaccgggcaatttctggctggactgttaggtgagtttccggagctggatgtgttgtatgacagtgtggacgggcttcctggcgtggtatttaagctcaaagataacgtcgatggcttcacgctgtatgatgttcaggagcgggtgaagtcacgcggatggcagacggcggcgtatcctttaccacagcatcggcacgatacggtcattatgcgtattcttatccgcaatggtatcagtgccacgctgatgaaatcgctggctcaggatattcgcaatattatcaaccggctggccgctattcccgagcctgatgttgcgatggcctga

SEQ ID NO: 386438 - DNA, 1380 bp, Salmonella enterica
atgagtgcagaacttgcaattcagaataaaatgaaattcggaactattttactttttggtattaattgtcttctgggcgcagggatttttatcacgccgggaaaagcatatagcctgctcggcgtgaatttattctgggtgctggcagtatgtgccgttatggcaattattatggcgctggcgtttgcggaaatggcggggatttttactaaaaccggcggggtatatatttatgccagcgcggcatgggggccctttattggttttaatatcggatttatgcgttttctggctgcctgcgtggctctttcggttcaggtggcggcgctgccgtccatcgtgatcaccgcattccatatccacctctccatggtggagtcaatggcgatcagcattgtatttgcctgcctgttgtgcgggattaatctgatatccgtgcgtgtggtttccgtatttacccgactgagcagctggctggtgctggcgacgctggcaggttgcattattatctcgtatacccactttcagttggcgaatctctcatccgttactggtcttgtttccggaagtaccggtacgccggttccggggatggggcaactgagtgcgggtcagttttccgcaggatttctactgttgttttatgccatggtggggtttgagaatattggtgttgcggcacaggatatggaaaatccgacccgggatgtgccgagagcgattattgtggtgctgattacggtgtcgcttatctatttcctgctgttttcatctgtactgggagcgatgggcggcgcagggctttcgctttctgataactcagttgctgacagcgtgggtatggtgctggggaccggagggcggctggtgatttcgctggggtcgctggtggccctgtttggtatcgggctcgctatgtgttttgccggcccccgaaatctggtgccactggcggtggataaatttttaccagagtccgccggtgcgaataacgcacgtggggtgcccgcgcaatccattgttattatgctgtgtgtgaccattttctttattgtgctggcaaatgaaatgtccagtcaggcctttgtgttgctggttcaggtcgcgacggtctgccgtctgttgcagtacctgattgtgacggtggggatttttagtattagaaaacaaaagctggcgggaacgtataaaatgccggccatttatgtcctgataccgttatgtgtgctggcctgtatatatcttgggctgaaagtttctccggtggtgctgctgattacccttggattgatcgtcatttcactggttatctacctgacgtattccagtccccgggccaggcgaatgcagacacagacatccgaaaatgtcagcaactga

SEQ ID NO: 386439 - DNA, 612 bp, Salmonella enterica
atgacgggcttcggggcgttacgccagtttctttctcagatactttctcctccggtggcgtatgtacccggatcgcttcttctccacatcgacggtaacctgcgcccgctccggaatatatccgcctctgctgatgtcttgtgctacatgctgcataccggagtacaaattcatatcacagagaaagcattgccgctgcatgatgcgttgtttatccagagtcgttttaccgtcaccggcacagcagatccggaatgcgcgcccggtgagttgaaaatcacaaagcgccgtatcacagggagcaaaaatgacgcactgaaatggaaaagtacgacgccacgtgccattcctgcgctaagcgatacgctgaaaaagcacccggatatcctctccctgctttgccggcttcattttcacactcttaccctggatgtcgcccgggggagatgggagatgatcatcgagcccgtggaggcctcaatgaccatttccggtggaagtggccgtcagtaccactcctttaaccccactcaacgctataccctgcttgcgctggcagacgcggttcatgaacaactgacccatgtccgctcctcacacatcaatgaatag

SEQ ID NO: 386440 - DNA, 198 bp, Salmonella enterica
atgtatgacaccacaacctttgaggggtgccaggcacaattattgccacaaacactctcccctgatgacatgtctgtgctggatgtaccaactgaaatcatgccgcttaccgtccagatcgtgaaacacgtattactcgcccaacgggcatggcagttgctgttttcggcgaaaaaacagccggcagacccggcgtga

SEQ ID NO: 386441 - DNA, 516 bp, Salmonella enterica
atgacaacgcgttacgcactaaaaaaggccagacctgatatttctggacgggatgacagcgctgggcgtaccgaagtgaaagcgaatggttatgtattgggcggggcgactgcccggaaaaacaggcctgctaacattcgcaggagtggttgttatatcaaccaacttcccttatttttacaagggagcattggcgggcatcgcccagcgttgacaccagttcaatggacgccggccgggcacctgattggggctggagtgccgcgacagcagatagccagggtctccgggtcaataaataaatgtaaagatagccgtcaggatacggcgactatccagaaagtcacgccacaatcgttaatcaccagtatcgttcaagtgattccgcaggtagagctgatctcacttgagaaaaaggatatctctaaagggaaaaccgctgctgtcggggctgacgttggcgttaacgagtggttattgctgcgattgttgctgcaactctgtctgcaggcgtag

SEQ ID NO: 386442 - DNA, 1872 bp, Salmonella enterica
atgtgccccgccttcccattatcaccgctatatatgggcgtcacgacgccttccagcctcaacagaagcgcctctccatttaaaaaggacgtttttttaaagtttgtggcgaaaaaaaatcacatccttgttaagggttcgttaaacctgtcgtatgttcccactacatcattcagggatattataaacactatgcaaataccgagcttctatcactccgcttctttaaaagcccaggaggcttttaaaagcctacaaaaaaccatctacaacggaatgcagattctgtctggtcagggaaaagcgccagctaaagcgcccgacgtacgcccggaaatcattgttctgcacgaatccagcgcaacatgggaggatttactacaggagcagaaggcgtctaaccactcgctgcatcacatctatgatttacagcgtgatcttcttaccgctgcggcagccgttctgggtaaacaggccccggagctagtgtcaatggcaaaccaaatggaattagcaaaagttaaagcggatcggccagcaacgaaacaagaagaagctgccgcaaaagcgttgaaaaaaaatcttatcgaacttattgcaaagcagcagcatcatggcctgcctgcaaaggaggctcgccgtattgcggcagcagattttaagagtgccctggtcaagcagcttaataatcaaccgtggcagaccataaaaaatacactaacgcataatgggcatcaatataccagcacgcaggttcctgccgcagagatgaaaatcggcgcacaggatatttttcctaaagcctatcagggaaagggcgtatgcagttgggatacccaaaatattcatcacgctactaacctgtggatgtccacaataagtgtacatgaggacggtgaagataaaacgctttttagtgggatacgtcatggcgtgctttcaccctatcatgtggaagatccgcttctgcgccagaccggcgctgaaagcagagccaaagaagtattaactgcagcgctctttagtaaacctgagttgcttaccagggccttaaagggcgaagcggtaagcctgaaactggtatctgtctgtttactcaccgcgtcgaatgttctaggccaggagggaacaatggtcaaggagcaaatgagagcatggcaatcgttgacccagccgggaaaaatgattcatttaaaaatccgcaatgacgatggcgaactacagacggtaaaaataaagccggaagtcgccgcgttcaatgtgggtgtcaatgagttagcactcaagttcggctttggccttaaggcatctgatagttataatatcgaggcgctacagcagttattaggcaatgatttacgccctgaagccagaccaggcggttgggttggcgagtggctggcgcgatatccggataactatgaaagcgtaaatacattagcacgccagattaaagatatctggcaaaataagctgcatcacagagatggcggcgaaccctataaattagcacaacgccttgcaatgttagccaatgaaatcgatgtggtacccgcctggaattgtaaaagcggcaaagatcgcacaggaatgatggactcagaaaccaagcgagaagccatttctttccatcagacccatattttgagttctccaggcagccttccggatcgcagtggacagcaaatcttccaaaaagtattacttaatagcggaaacatggaaattcaaaaacaaaatacaagcggggcgggaaacaaagtaataaaaaacttgtcgccagaagtgcttaatctttcctatcataaacgaattggagatgaaaatacctggcaatcggtaaagggaatttcttcattaatcatttcttga

SEQ ID NO: 386443 - DNA, 297 bp, Salmonella enterica
atggtattgtccgcaaatggacgcattgtttacagtagttacaacaccctatacggatgttctccctccggcggtggtcttgacatcttaaaatctctcatcttttccgttactccccgtatctctgatgtcatagttggtgcgcgtagccgagtgtggcgtcgtttcaaaaagcaagctaaggcttacaaggaagccaaccctcagatgtgtgtgcgcataatcgcgttcaatagaacgcgggtgatgtatacctacaactcaaggtgctatccatgggaagacaaaaagcagtga

SEQ ID NO: 386444 - DNA, 423 bp, Salmonella enterica
atgtcactattagccgggctggaacagcgtgtacgcgaaaatggtgggctgattgtcttatgccagccggtacctggcattcctatggataaacctgaaattgtgaccgcaatggcgcaggcaggcgccgatattagtgaaggagtagattgccatcagaaaggagtcgaattcattggtacaacgctgtctggcgatactggccccaccacgcctgttgaaccagatttagcaatggtggcacaactgagccataccggctgtcgtgttattgccgaggggcgctacaacactcctgctttggcagccagtgctatagcgcatggtgcctggacagtgagtcggttccgctatcacccgtatcgagaatatctgtcagtggttcagccacgcagtaagacgctgatctggggaaataaatga

SEQ ID NO: 386445 - DNA, 399 bp, Salmonella enterica
atggacgagaagaaactcaaagcgctggctgctgaactggctaatggtcttaaaaccgaagctgaccttaaccagttttcccggatgctgacgaagcttaccgtcgaaacggcgctcaatgctggactgaccgaccacctcgggcatgagaaaaacgtgcccaaaaaaggttctaacacccgcaatggctactcatcaaaaacgctgctttgtgagtcagaaagaatcactggggatgtggctggccgaaaacgcaggcgcgaagttctggctgaacgtactgacagagctgaaaaatcgtggccttcaggacatcctgatagcctgcgtggacggtctgaagggtttcccggatgcgataaacagcgcctatctaatcaatacaacggtcaatgttga

SEQ ID NO: 386446 - DNA, 522 bp, Salmonella enterica
gtgcaaaaggtcaaacagggattccccatactcatagccgcactgatagtctcaatgagcggtcaggcaaagagtacggaaatcgacctcagtggcagagtggtggcatcaccctgcaccgtggatacgggtacgcagaatcaaacggtcactttcaggcaggcgcgagccattgattatcaggaggttggcgataccagcgaatggcaggatttcagcctgacgttatcccgctgcccggtatcaacgacgcgggttgtagcaacgtttatcggcgatgccgatctgatcgataccagcaaattcgccaatagccagggggatgcgcaaggcattgccctgcaactgatgacacgtgaccataatacagaaattgcgccgtctgatgagcaatcggttaatgttgataatgccactcgtaatgccatttttctgctctcagcgcgaatgtataccccgacaggacaggtcacggctggggagtttaatacggtggttcaggtcaacttcacctatcagtaa

SEQ ID NO: 386447 - DNA, 519 bp, Salmonella enterica
atgaaaaatggaaaaaaaattgccgtattgctgcttaccagcagcggtttgtttcccggcgtcagccaggcggcggatacgattattgaaatcactggtcgggtgatagcctctccttgcgttgttaacggtggccaggaaaagttgtcggtagatcttggctcggacatccaggccgatactctctcagcggctggggccgcctcaccatggaaaccgtttaccctttccctgaccaattgcccaaaatccactaccagttttagcgtcgccttttccggaaccgccgatgacaatgctgactactacaaaaacacagggagcgcagccaacctggcccttgaactgactacccaggatgaaacaaatcttaaaaatggcaccacactgcaaaatctcataattgataccgcgagtcacagctatgacctgaatctgcgcgcccatgccgtgtcaaaaggcgacgtcacgccgggtacgatccaggctcaggtacaggccaccttcacgtatcagtaa

SEQ ID NO: 386448 - DNA, 1008 bp, Salmonella enterica
atgaacgtaaaactatcggcggcttttttgcttaccctgggacttctggcgcttccggtaagcgtaaacgctggcgttgcgattaatactaatgattcccaacaggtttcatatgactacgatttttcccggttaactatccctcaaaatgcgggtcagatgtcctggtttgatgatcaggatcacgtctactggattgaaaatgtcatgctggatggttatcagggccatatcaccatgacggtaaatggaacacaagtatcaactgcgcctgatggttcaacggtttatgccacgaataatccgggcattggtatcgcctatgcattgaattattctaccgaggcgtataccacccccacagtcgacacgacggcaccatatgaaattgtctttaatgatgtggagaacttctctggatacgttcacgtcaaatacacattggtacgtcttgcagattttgttccttcaggcaagatcacctcagttcccgaggtcacgctgaattactttaatcaaccagataccccgaattatccccgtatcagctttttagcacgaagaaattcggtttccggtcaacccaaaataaccagttgcacgatcgatgcccctacagagatcaaacttccggacctttacggcaatgcccttgctaatggcgctcaggggattaccgacgcgccgaccattacattatccaactgcccaggggcaatcaacactatatcctataatttttcggcatactacggtacgcataatgctgccaatggcgtactcaagacgatgatcggcagtggttatgccaaaaacgtgtatattcaggtgcaaaatgacgatggaaccgcgcatcaactcaacaccaatattgctctggatgattataagggctccggcaactaccctctcccaaagtttaaagtcgcctattatatcgaagatgccagtaccgtggccgcaggaaaggtctcgtcagccattgaaatcaaacttacctacaactaa

SEQ ID NO: 386449 - DNA, 2556 bp, Salmonella enterica
atgattgcggttgccatcaaaacaagaataacactcacgccaatagcctgctttatggcccttcagtgcgccttacctgtgtgcaattctgcatttgcccgtgaatactttaacccggcgttattgggcattgatggaccgggaaaagagttgactgacctgtcggcgtttgaagaaggcgtcggtcaaatgcctggtacctatcacgttgaggttatcgttaaccaaacctccgttggtattcatgatattaacttcacgctacagaaagatagtcagggaaattcaacgttacagccctgccttagcatagatttgttagctgaattcggtatacgtaccgatgcgtttgcgaagcttcaggacgaggggaaatgtgctgatctatcagctatccctcaggcccacgccgaccttgcttttgagcgtcaacagctattgctctcatttccgcaggcggcagtcaacaacattgcccgtggctatatcgatccgaagcgacttgacgaagggatcaacgctctgcggctcaactataactttagcggcggcaacgtcacggcgcgcagccataagctggaggattccgatagctactatctcaacctgcaaccagggctgaatctcgggccgtggcgtatccgcaattatagtacctggaatcgcagcaacaatggcggttcatccgaggaaacatgggattcactgtatacctacgcccagcgcaatatcattgccctgaaaagccgatttacgctaggcgacagtaccgcgccgtcagatatgttcgatagcgtgccgtttcgcggcgcgcaactggactctgatgatgatatgctccctgatagccttcgcggctacgcccctgtcgtacgaggcatcgcccgcacgaacgcacaggtcattatcaaacagaacggttacactatctatcagcgctacgtttcaccaggcgcgtttgaaattacggatatgtaccccaccggtagcagcggcgaccttgaagtcacggtcaaagagtccgatggcagcgagcagcaccagacggtggcttttgcctcactgcccgttttacaacgagagggccggctgaagtacagcctgacgagcggccagtatcgcccgtatgacggcgatattaataaagaatggttttcccagggaacggtcatttatggtctgcctgcgggctttacgttttatggcggcggccagttcagtcagcactaccagtctctgcttggggggctaggtaaaaattttggcgtcctcggcgcgctgtcgctggacaccgctcaggcatggtcacaacagcaagacgaagccaaagaaagtgggcagtcctggcgtgtccggtacagcaaaaacatgctggaaaccggcacaaatatttcgatttccggctaccgttactccacctctggctactacagcctgtcggaagtactggacacctggcgtgatgatgactggaaaaatacgctggagcgtcggcgcaaccgcgcggaaattctggtaaaccagagtctgggcaaggatctggggacgctttccgtcaatgccgttagtgaagattactggagtagtgaccgtgaaatgcgctctctcggcgtcaactacagcaataccttctgggggattacctggaatctgaactacagctataaccgtaacacgaccgatcaaaacgatagcgacaaagtctatagcgaagaccaggttttttctctgaatttgaatattccgctcgaccgcttcctgagtaatagctgggccagttatagcatgaatagcagtaaacagggccataccagccattccgttggcctcaacggaatggcgcttgaagataataatctgagctggaacatttacgaaagccaaactaaccacggtgagggaaatggcggaaacgccggaataacgtatcagggcacctatgcccgaatgactgctggttatagctatgaccacgatcagcgtcgcctgaactacggcattgatggcagcgttgtcgcccatgctcatggcgtcacgcttagccagtcgttaggcgaaacggcggcgctggtagaggctccaggcgcaggcggtgttgaggttaccaatcaaaccggagtgaaaacggatttccgtggctacacgctggttccttacctttcaccctaccgggaatataccgttggactcaatacagaaacgttaccagacgacgccgatctcacgctgaccagccaggtcgttatacccacccgtggcgcgattgttagggcacgcttcgatacgcgcgtcggtaaacgtgtattgatggtgttgacccgcgccaatggtcagcctgttccttttggcgcgatggcttctgttgatagcgcggataaaagccaaagttttatcgtaggggatggcggtcaggtctacctgacagggatggcggagagcggatcgttacaggtgaaatggggtaacgatgcacaagatctgtgccgggtcacttatcacctgtcgacagcgaataataccagcgatgtagcacaagccaatgaagcatgtaattaa

SEQ ID NO: 386450 - DNA, 675 bp, Salmonella enterica
atgtttaaatacagtctacagactgccgccctcctgatatttacgatgacttcggcacaggctggagtcattattggcggcacccgaattatttatcagggtgataaaaaagaaacttcacttaacgtgaagaacccagataaactctcttatttaattcagtcctggagtgatgccggagagaagagcaatgccaaatcgccttttatggtaacgcccccgctttttcgccttggcggggggcaagaaaacgcgctgcgtattattcgtgctggtggtaacttaccagaagacagggagtcgctgtattggatgaatattaaatccattccgtccagcgaaaagcgggataacattaatactttgcaaattgcgataaagacccggattaagctaatttttcgcccggcatcgctcacaaaacaacctgaagatttcgctgatacgttaacctggcggcgcaatggcgacagcctgacggtaaccaatcctggcgcctattacatgaatttcagcacggtgaaggtgggtaacagtcttgttaaagatgctacctatgttgagccgatgggaagcgcgacgttcgcctttcctgctggcgccaatggagatgttgtctggacgcttattaatgatttcggctccgtcggaaatgaacatcgagcgcacttgtaa

SEQ ID NO: 386451 - DNA, 555 bp, Salmonella enterica
atgaaaaggaaaataactgctgcaatagctgtattttttaccaccataagtatcgcctcttcagtttttgcccatgacggcactgttaatttcaccggcaaaattatcgaagcaggttgtaaaattgacggtagcgtaacgacggataaggatgtcgagttgggggaaatctccaggacagcattcacaacatccggcgatactgcggccacgaccccattttcactggtattaaccgaatgccccgcctccctgttagggaagtccgttaatgtaaaatatgaaggcacgccagacaatatcaacaacgattatcttcagctaacaggctacggtgatagcggggtggcgaaaggtgtggcgattgagttgctgaacgccgatctttcttccttgccgttgggtacagaatccaatgcagtcaacatccagggcacagaggacgcgccagcagagacgaatctcaacttcttcgcccgctatgtttcgaccgaagctagcgtgacggccggtacggccaatgccaccgttaactttaccctgacgtataactaa

SEQ ID NO: 386452 - DNA, 810 bp, Salmonella enterica
atgtatttcattaatggtgaattatctgaatggatagccgtaaacgatcgagggctacagtttggtgatgggtgttttactaccgcacggatcgccgacggtaatattcttctcttctgccgccatcttgcacgtcttactgaggcttgtaaccgactggcgattccttttcgtgaatgggacagtctggccgcagaaatgcgcaaaatggcgttagcgcagcgcgagggggtacttaaagtcgtcattacgcgtggtagcggcgggcgcggctatagttttgcgaactgcgaacaaccgacgcgtattcttagcgtatcgtcttatcctgcgcactatgctcgctggaaaaacgcgggaatcaatcttgcccttagccccatatcacttgggcgcaatccctatcttgcaggattaaaacatctgaaccgcctggagcaggtgctgattcgttctcatcttgagcagacggacgccgatgaggcgctggttcttgacagcgagggatgggttacggaatgctgtgcggctaatttgttctggcgtaaaggtcttgtggtctacacgccgcgcttagatcaggcgggggtaaacggtattatgcgacaattctgtatgcagatgctggcacaatctcattttcaggttgtcgaagtgtatgcgaaagaggatgagcttatgcaggccgatgagatgatcgtctgcaatgcgttaatgcccgttattcccgtgcgtgcttgtggtgatactcttttttcttcacgcttattatttgattatttagccccactttgtgagcatccgaattag

SEQ ID NO: 386453 - DNA, 1011 bp, Salmonella enterica
atgccaatcactatagggaatggttttttaaaaagtgaaatacttatcaccccccccaaaaaaacggcagaatcatggtggagaattttatgggaaagatttaaagattatttcttttctactggcagagcaaaagcggatagctatatacatgaaatgttgtttaccgatccccctcctacacgagaacggcttgcagatatcttttttgagttgaaagcattagcctgcgcatcacatacagacagattccaggtctataatccccatggagatgattcaaccattattttccgcatcgtagatgaaaagggaggggatgatcttttacgcataacacaaagtaccgatatctttagctgtacaatcatgggggagatatattttttgatgaaaagtaaacctgggcttttaaaatcttatccacaaatgacgttcactataaataaacgatatagtgaggttttagaaagccttactccctcaacattatgtctcaatcttactggcgagccattgttatcagtccccttatacagcatagtgaagcatgtaaactctgaattatttaaaacaaatttcgaatggaaagcgcaagaaaagataaattacctggcaacgaagattcggtctggcattgaaagtgcaaagcatactttacataaggaaaatatatccgaaagtactcggcaaagagcatttttagaaacaatgtcgatgtgtggattaaaaccgactgaaacaccccctccgcccacacacgtacccattgcaaaaatggtagaaacgatattgctggagaataagacgtttcaagcattcctcgtaacgaatgctaacaccagccaaagctttctggatgagataatcgaagcagtctctgatcatgtttttcgcggcctttttagaacagatccccaggttatacaaaaaatggcggaagaacagttaaccaagttacacgttcgatggcaccgacaaggcggcaacggattaagttgttttttataa

SEQ ID NO: 386454 - DNA, 261 bp, Salmonella enterica
atgtcacgcccggaaaaggggtcgttacgactcttggtgttgttggctatcacgtttgtgatgatgctttcagggatattcgatccgctggccgaaagcctgaaatatactgtcatgaacctgatgaattacatcccgactgagaaactggagccttaccctgatcgcgtagaggataactattttactatgtacatcgtgtttaacgcgctggcggcggttgtggccattgggggaaaaggtcgtttggctggtgcgtaa

SEQ ID NO: 386455 - DNA, 1020 bp, Salmonella enterica
atgtccatagttactgaaataaattgtacaacagcaaaagattttttagataaaattactccctggagtagtccatatcaactatcaaattatgttttccgcggtcatgcagaatcgacgttcaatttacacccaaatatccttcgaaaaaaaaacaatcaagaacttttgaagattgcaaaagtctatttagctaaaggtagacactcagaggtgttgagtaagattggtttaactaatctacagttttatcattcatctatagaactaacaatcctaaggaaattttataaaactgctaatgaaaatggtttatttgtaccgaattcagaattaatgagtttgaggatggaaacaggaaaatatatttctcttggtgtaatattaaaactatgtggccatactacttggttaaataaagattcaattgagattgcagctttagcacaacactatggtcttccgacgaggttgattgactggtcctacaatcaatatatagcatcattctttgcttcaaatctcatcaacaaaccaaacaaagagaaaaaaatatctctttggatgctaaactataaacaattaaacaatgtattcacatctcctttaacggatgttagaattttcagtcctcattatcaatggaatgaaaatgcacgttcgcaacgaggactttttacttatatcgagtcaaaacatgacaaaaatacaagtgatttattaactgattttttggaatcctatcaaagcacaaagattataagtacagattctaaatttgatagcctttatactgactatagaacatttgatgtagcgttggaaaatgcaatcaacatatataattcaaaaaaatcagagcaaaaggaattagaggactgtttgattaagataactttacctcaaagtgaagcaattaaattaaacaagtatttacgtgaaataaggatcagtgagtcaactatctttcctggatatagcggtgtagtcgaggatttgaaatcagtattacggatgtaa

SEQ ID NO: 386456 - DNA, 276 bp, Salmonella enterica
atggcttctgaaatcgcaatcatcaaaatcccgtctcccgtggtcacgcttcagcagttcgcagaacttgagggtgtttctgagcggaccgcctatcgctggactacaggagatgccccgcgtgtaccaattgaaaaacgtgtgatccgcaagggctgtaagaaagccggtggccctatccgaatttattacgcgcgttggaaagaagagcagttgcgtaaagctctggggcacgctcgttttcagctcatcattgagaatccatattcactttaa

SEQ ID NO: 386457 - DNA, 201 bp, Salmonella enterica
atgctgaaaagtgaaccggcattcgcgtctctgctcgttaagcaaagccccagcatgcattacggccacggctggatcgcaggtaaggacggcaagcgttggcacccgagcctctcacaggctgatttacttgcaggcctctctactcaaaagcagggggaatcatggctattgaagctttgccgacaactgcgccgctaa

SEQ ID NO: 386458 - DNA, 339 bp, Salmonella enterica
atggctattgaagctttgccgacaactgcgccgctaaaggctggcgaacgtttggccggtttgaatcatgtggccgaacttcgcgccagattctggggcgatagctggaaagaggtggtgcgttttgtcgacgatatgcgggataaacgggatccacaatctgaagaaaataaccgcgctttggccgctattttctttctggcaaaaataccggcagctcgtcacgagctcgaattaagtgagctgactactgatgagaaaaaagcgcttattacagcgatgaatcattttcgcgcagtagtgagcttattttccaaacggctaaccatgccgaattaa

SEQ ID NO: 386459 - DNA, 594 bp, Salmonella enterica
atgactttattcactgaagaagatcccacccaacgccgctatgttgatttgattacagaggtgacagctttcgaagctacgaaagaaccaatgaagatcatttccgcatccgacatgctgggcatttgcgatgcttttctttctgagactcaatgccacatagcagaccggctacctctttcaatagctggtcggcatgagctaggtcggaaaattgagtggaattgtccacatagctggaaaccacgcgaagaatggtcaacacatgttcggcacgccttacaaattttaaatcgacgttatttggataccccagtatctcaactggatgactggcagacctgggaagaactatcgacagatattcatgtgtcggctcgctgtactcggcggactgttgagttttatcgctctggaaatccccagcatttaccgatgtcgactgagctttttgctgttcccgaagttttttcaaaatttgtagcttcgattctttcgggtgatattcaccctgtttggatgtggcatgctgacgcagccaaaacgccgcgatgcctcgatgggctttatcccaaatacacgccgctttcttaa

SEQ ID NO: 386460 - DNA, 732 bp, Salmonella enterica
atggataccgtaatagcatttttatctctggctctctttattgcttttatcgtggggttaatcaagccgtcgctggttcgaatgccgaaccgtaagcgctccagtgcggtttatctcggtggctgtctggcgctgggtgttattggctcaatcgtatggccgactgaaaaaagtcagcctgtggcaaaagctgaagtgccggaggttaaagcggaaccgactacgccaacgtttgagtacgcagataagaccctcaaagaatatcgcaatgagccaaaagaaacccggcacgatatcgttaaaggctatgttggcttcaaaggtgtaccggtaagctctgctgatgctttttatgcctgtatgagtgagtacacttttacgaaagatgatgcgttaaagctcggtgatgtgttggagtggtgtttcaacgacttcgagaaggatccacaatccctaaataataaaatcaaccttgacgcatttcagggtaattttagcggttgggatggctcttatcgcccgttagagaagctgataaaagccagcatgaatgatgattcctcttataagcatgtttcaacggtctaccatctgattttgaataaagatccgcatgccgttgtaaaaactacgtttcgcggcactaatgcttatggtggcgtggtaaaacagaccgtagcggcgcgcatcgatgttcgaacgggtgaggtcgattcaatactcgaaaattaa

SEQ ID NO: 386461 - DNA, 798 bp, Salmonella enterica
atgaaaaatacaaataaaattgtcgcaaaatatcttgagctgtttgaggaaaaacgaacaccagatgatggcataattagtttgctttacgagagtgccataaattacgatatgttttctgtttatattaaagatgagtgtggtgatgattatctttttgataaatatattgacggggaaataaaggcaagaaaatgggattttcaagataacagattttgcattgattcaacgctcaatcctgcgtttcttaaagataattctttttctggtatttattattatcatgcacatgagttgaagtttaactcattaaatgatcttactttccttaagaggttgaagtttagacgatttgctgattcagaaaacaagaaatttagccgtgagaaatatttatatcggcagactaagcaggaaattactgatgtgatgactgttttgacttctgttgtcagactttatagggagcagaaaggtgaagagtcgtttagcgaatttcttatattgagtgatattgctggtaagttgtggatttaccatgatgataagtcaaggctccaaaaagaacttcgtttatgccttgactcacttgtagacaatggagatctgacaagaagcaaagttggttataggcccactggaaaagcgattaataccttagctaattttaataaaatcgaacaacgttataaagaaaatgtgcgagatcaacgaattatggtatgggctactggctttgcagccttaggcgcattagggagtatgattgctgcttttatgacactgtttaaataa

SEQ ID NO: 386462 - DNA, 1638 bp, Salmonella enterica
atgagcacgaaatttaaaaccgttatcaccactgccggagccgctaagcttgctgcggccaccgtgccgggcggtaagaaaataaatcttaacgttatggctgttggtgacggcggcggaaaactgccggtgcctgatgccggtcagacgcagcttgttaatgaggtctggcgccacactctgaataaaatcagccaggacaaccggtacagtaattacattgtggccgagctggttattccgccggaagtaggtggcttctggatgcgtgagcttggcctttacgacgatgaggggactctgattgctgttgccaatatggccgaaagctacaagccagaactggccgagggctcagggcgtgcgcagacatgccgcatggtcatcattgtcagcagtgttgagtctgtggcgctgtccattgactctacgatggtgatggcgacgcaggattatgtcgacgacaggctcgccgaacatgaaaaatcccgtcgtcatccagatgccactcttaaagaaaaagggtttactcagctcagtaacgcgacagacagcgagtctgaaacgctcgcagcgacgccgaaagccgtcaaggcagcatatgaccttgctgacgcgaaatatacagctcaggatgccaccacaacgcgtaaagggattattcagctcagcaatgccactgacagcacgtctgacacgttcgcagcgacaccgaaagcggttaaaactgctatggataatgcgaatgaacggctggctaaagaccgaaacggcgcagacattcctaacgttgcattgtttctccaaaacgtcggtttaggcgaaacgataaatctggcaaaaaatgccgttccggcgacgcgcagggttaacaacaaaccgctgtccggcgacatcactctgtcggctgttgatgtgaatgcattcgcgctggggatgaccggagacacactggaaaatgacaaatcagtcggctggaactggaaaagcggggtttacaacgtttctactggaggtgcatccagtctgattttgcattttaatatgaatatcggcagttgtccggcagtgcagttttgtgtgaattacaagaacggcggtatttcctaccgttcggcacgcgacgattttggctttgaacttgactggactgaattttataccacaacacgaaaaccatccgcaggtgatgtcggtgcattacctgttagtggtggcgtaattaacggtaacctcggtatcggcacacctaatatattgggaggtagttctattgtattaggcgataacgacaccggcttaaaacaaaacggcgatggcctgctggatatttatgctaacggtgttcaggtattccgctttcagaacgacacactggagagtaaaaaatccatcaatattaccggacgattaacgccaacagactacggtaattttgacagccgctacgtacaggatatcagactgggaagcctgcaatatgcacaggtatggaatggtcccgggtttaatgacacttctggttacgtaataactggtatcactaatggcaatagtgatgaactggttgacggagcgcaaagacgcccaatacaaaaactaattggcaaccagtggtataacgtggtgagtatttaa

SEQ ID NO: 386463 - DNA, 528 bp, Salmonella enterica
atgatgcatctaaaaaatatcgtagctggtaatccaaaaactcctgaccagtatcaactaactaaaaaatttggtgtcgtgtggctgtttgatgaagatggaaaaaactggtatgaagaacagaagcagttttctgctgatacgttaaaaattgcctatgataaaaataatattattgtggatatcaacaaaaatatttctgcaataaaccctgaagggtgcagcgtggttgaattaccgaatatcacagctaatcgccgggcggatgtatcaggacgctggatgtttgacggcgagaagataattaagcgggtttatacaccggaagagctacgtcagcaggcagacgcgaaaaaactgaagttactcgatgaagccgaaacagttattacgccattagcgcgcgcagtaaagcgcggcatcgcaaccgaagaggagcaacagcgactggcggaatgggaactctacagcgttctggtcagccgggtggatacatctgcgcctggctggccggatataccacgctaa

SEQ ID NO: 386464 - DNA, 1338 bp, Salmonella enterica
gtgattgtgggattaattctggaaccggtacccggcgcggtggtggcaatgatagggatttcgatcatcgccatcctttcgccgtggctgctattcagcccggaacaactcgcgcagaacgggtttaaatttaccgctaaagcgctgtcatgggcggtatcaggcttttcaaactcggttatctggctgattttcgcggcttttatgtttggtacgggctatgagaaaaccggtctcggtcggcgtattgcgctaatcctggtaaaaaaaatggggcaccgcacgctgtttctcggctacgcggtaatgctatccgaacttattctcgccccggtgacgccatccaactccgcgcgcggcgcaggcattgtctacccaattattcgcaacctgccgccgctctatcagtcccagcctaacggcgccagctcccgttccatcggttcctatattatgtggatggggatcaccgccgactgcgtcaccagcgccattttcctgaccgccatggcgcctaacctactgctgatgggactgatgaaaagcgcatcgcatacggcattaggctggggcgactggttcttagggatgctgccgctcagtatcctgctggtacttctggtgccgtggctggcctatgtgttctacccgccggtgctgaaatcaggcgatcaggtgccacgctgggccgagacggaactgaaaacgatgggcccgctttgctcacgcgaaaaaagaatgctgacgctgatggtgggcgcgctggcgctgtggatttttggcggcgactatattgatgccgcgatggtgggttacagcgtagtagcgctgatgctggtgttacgcattatctcctgggacgatattgtcagcaataaagcggcgtggaacgtcttcttttggctggcgtcgcttattgccctcgccaccggacttaacaacactggctttatcgcctggtttggtaagctgctggcaaacggcctcagcggctactcgccgacaatggtgatggtcgcgctgatcgtagccttttatctactacgctacttttttgccagcgccaccgcctatacctcggcgctggcgccaatgatgattgccgctgcgctggcgatgccggagatcccgttaccggtattctgcctgatggtcggcgcagccattggtctgggcagtattcttaccccctatgcgaccggccccagcccgatttactacggcagcggctacttacctacagtggattactggcgattaggcgcgatttttggcctgatcttcctggtgctgctgatcgtcaccgggctgttgtggatgcccgtcgttttgctgtaa

SEQ ID NO: 386465 - DNA, 243 bp, Salmonella enterica
atgattgctaacagaacaatcagtataatgacctgtggcatcataaccctttcattattaaagcccctcctgaagaaggggctttcccatttcagctctttgctgacatcgggattgttgggccgcgtagccctaagccctacggatatttttatgtcatcatatttggtgaaaattgtgattttgcgcattaaatttgcgcacgttatgtataaaaccgccgtacatatagggaaatactga

SEQ ID NO: 386466 - DNA, 681 bp, Salmonella enterica
atgagcatgcacaggctacttacactcaccgtgctgctggcaatcaccgcctgtagcccgcagaaaccgcaccctttacagtcaaaacaggccgccagcggggactggacgctgccttatggcgagtggttttttttatttatcacgcccagagaattaccttcgatagtaaaccatgcaagagtcatcgacacggatggttatctgtatacatttaacacgcttgatactacttcctgggatcctggttctgttgatagatggccagagaatgcgcacggctttggcggtcagttcaacaaagtcaaaaagcccccgcagtatattgtcttctgctgggagtcctatattgatcagaaaacctacgaaaccagcgccgtcttcgggcctgacacctggctgcgcatgaaaactcccgctgaccatacatggaatgggcatgccgtctggtacgacaggatggtgtttggtttatccccaggcggtaaggtcaaggtctggttttctgatgtcgccggacgccccagtcttcccgtcaagcccctgaagatgaggacccgctccggcaacgacctgaacatctgtaaagactacgtcgtctcgggcggttccttcaacttcctacagtcaacacaggatttcattaaaggcaaaacctacccatacggcaactgggattaa

SEQ ID NO: 386467 - DNA, 684 bp, Salmonella enterica
atgaaaagacataacgtattgacacttgcgcttttgctggcaatcaccgcctgtagcccgcagaaaccgcaccctttacagtcaaaacaggccgccagcggggactggacgctgccttatggcgagtggttttttttatttatcacgcccagagaattaccttcgatagtaaaccatgcaagagtcatcgacacggatggttatctgtatacatttaacacgcttgatactacctcctgggatcctggttctgttgatagatggcctgagaatgcgcacggctttggcggtcagttcaacaaagtcaaaaagcccccgcagtatattgtcttctgctgggaatcctatattgatcagaaaacctacgaaaccagcgccgtcttcgggcctgaaacctggctgcgcatgaaaactcccgctgaccatacatggagtaatggggaagcaatctggtacgacaggatggtgtttggtttgtctccaggcggtaaagtcaagatctggttttctgatgtcgccggacgccccagccttcccgtcaagcccctgaagatgaggacccgctccggcaacgacctgaacatctgtaaagactacgtcgtctcgggcggttccttcaacttcctacagtcaacacaggatttcattaaaggcaaaacctacccttatggcaactgggattaa

SEQ ID NO: 386468 - DNA, 1986 bp, Salmonella enterica
atgggtaaccttatttatttaacgcttgagggtaatattcagggacagatttccgctggctgtagttcgcaggcatctgtaggcaaccgccatcagttgggacatgaaaatgcgatcttcgtattcagcctgacgcaggcggaaagcggctcaaagggtgatatccaccaccacggcctgcatttttgcaaacttctggataaaagctctccgttactcagcaatgccattaataataatgaacgcctgaaaatgacatttgatatttatcgtattaatcgatacgggcgcatggagaaatattacttaatcgaacttcgcggtgcgacgatacaggctatttctctacaatccaaaatgaatgatatggactatgaatatataacggtagattacgattatattctgtgtcgtcatttgatagccggaaccgaatttgattatctgctaacaccggataatgacgcccatcttttcccggcggtacagaaaaccatgctccctgctgatccgccggagcgtaaggtaacgctggtgctggggatattcttcgacggcaccggcaacaacgcggtgaacacccggaacatgcttgaagccctcaccgcgcagcactttgatatcaacgaccctgacgcagaaagcattctcacaagaaatgcctcggagaaaatgggggtcagcgggattggggccggcagctatctggggtattacacaaatattcactggttaaatgagtcgtatgaacaaacgtttccgccagacggcggctatacacaaggcgctgtctatattgaaggcattggcacccgcgcaggcgagcccgacaacccgataggtttggggctgggcaccgcagagaccgggattattgccaaaaccgacgaggcggtagcgcaactggctaaagcgattgatgccacgcttgctttactgcaagggaagtttgttgtagataaactgttgttcgatatcttcggctttagccgcggtgcggcagcggcccgccactttgccaaccgtattcagtctgaagaccgcgcgattatcaacgccatccaggttggaatgcgcaaatatacctaccgtggcgcgcccgcaggtaaaacccgctttctcggtatcatggataccgtagcggccgtcggcacgctggcgaatggtctcgatccgcacagcgccgatactggcaatgtcaacatccacctgcgtcccggcgtagcacagaaagtttttcatctcaccgccctgcacgagtgccgctataacttcgcccttaacagcgtcgcccccgcctggccggaactggcactccctggcgtgcattccgatatcggcggcggatatttaccgcagctacgcgaagatctctttctcacccgcccgcaggtagacactctgccgcagaatcagtctggggcgcaatctcacatttacccgcagacaatggcgcagctacaggtgttggaacattcgcccgcgatcatgcccattattcgtaccaatgcgatcaccccggaagtgtgggaagacgatttcgcccccgttgatcgttacagccagccgcagaaacgtgcctttgccgccctgacgctgcgccatcgtatcgtcagtttcgactggtcaaaggtggcgctacgggtaatggtcgatgcggcgacagaagcaggtgcggtgtttaccgacatagaaaaaaccaaaaggcacgacttacctgatgaacttaaaccgttcggtgaacacgcccgactgatgggcaaagcggctcgtcaacatatcgccgccaccggttttgcgcctgaagacgtagatatcattgccgggaaatatattcattgctcagcccactggaacgcggtggaacttaagcaaagcggggagttacagggcggcgcttcagcgtcggaaaccatcagctttgtgaacaggccggacaaaaactggatacgaacaatttataacatggacggaaagaaacgatga

SEQ ID NO: 386469 - DNA, 1413 bp, Salmonella enterica
atgtcattcagtcggcgtcagtttcttcaggcatcgggaatcgcactatgtgcaggcgcgattcccctcagggcgaatgctgccggtcagcaacagccgttgcctgttccgccgttgctggagtcccgtcgcgggcagccgttattcatgacgctacagcgagcgcactggtccttcacgcaaggcacgcgcgcgccggtctggggagtgaacggtcgctatctggggccgacaatccgcgtctggaaaggcgatgacgttaaactcatctatagcaaccgcctggcggaaaatgtctccatgacggttgccggtttactggcgccggggccgctgatgggcggcccggcgcgtatgatgtcgccgaacgcggactgggcgccggtgttgccgattcgccagagcgccgcgacgctgtggtatcacgccaacacgcctaaccgtaccgcgcagcaggtgtataacggcctggccggaatgtggttggtcgaagatgacatcagtaaaacgctgcccattccgaaccattacggtgtagatgattttcccgtcattattcaggataagcggctggataactttggcacgccggagtacagcgaaccgggaagcggcggttttgtcggcgatacgctgctggtgaacggcgcgcaaagcccctatgtcgaagtatcccgcggctgggtgcggttacggttgttgaacgcctcgaactcgcgtcgctatcagcttcagatgagcgatggccgggcgctgcatgtgatttcaggcgatcaaggctttttacctgcgccggtttccgtcaaacagttgtcactggcgcccggcgagcgacgtgaaatcctggttgatatgactaacggggatgaagtctcgatcacctgcggggaagcggctagcatagtcgatcggattcgcggtttctttgaaccttccagtattctggtttctaccctggtgctgacgttacggccaaccggattgctgccgctggtgaccgataatctaccgatgcgtctgttgccgacggagatcatgagcggcgcgcctatccgcagccgggacatcagccttggcgacgatccggggattaacggccaactgtgggatgtgaatcgcattgatattaccgcccagcaaggcacctgggagcgctggacggtacgcgccgatatgccgcagtcgttccatattgagggtgtctctttcctgattcgcaacgtcaacggcgctatgccgttcccggaagacagaggctggaaagataccgtctgggtggatgggcaagtcgaattgctggtctactacggtcagccgtcctggccgcacttcccgttctatttcaacagccagacgctggaaatggcggatcgcggctcgattgggcagatgctggtaaacccggcgccataa

SEQ ID NO: 386470 - DNA, 1857 bp, Salmonella enterica
atgagcaaaggaaccaccagtcaggatgctcccttcgggacattattgggctacgcccccggcggcgtagcgatctactcttcagattacagttccctcgatccgcgggacgacgacgacgcagcttttcgtagctacatcgacgatgaatacatggggcataaatggcagtgcgtggaatttgcccgccgttttctctttctgaattatggcgttgtttttactgacgtcggcatggcctgggaaatcttctcgctgcgttttctgcgcgaggttgtgaatgacaaaattttgcctttgcaggccttcccgaacggttcgccgcgcgcgccggaggccggggcgctgctcatctggcaaaagggcggcgagtttaacgaaaccgggcacgtcgcgattatcacccaactcctggataacaaaattcgtattgctgagcaaaacgttatccacacgccattgccgccagggcagcagtggactcgcgaactggaaatggtcgtagaaaacgggtgttacaccctgcgcgacacctttgacgacacgacgattttaggctggatgatccagaccgacgacacgcaatacagtttgtcacagcctgacatcgctaatcagtcgctggcgattcgcggcgcaagactgccagagaaaggtcagtttgacggtcagtggctggatgagcgcgatccgttacaaaaagcctatgtccaggcgaacggacacgttatcaatcaggacccgtaccagtattttacgatcaccgagagcgccgaacaggagcttatcaaagcgaccaatgagttgcatttgatgtacctgcacgccacggacaaagttttaaaagacgataatctgctggcgctattcgatatccccaaaattctttggccgcgcctgcgtctctcctggcagcgccgtcgtcaccatatgattaccggtcgtatggatttctgcatggatgaacgcgggctgaaagtctatgaatacaatgccgattccgcatcatgccataccgaagcgggattaattcttgaaaaatgggctgagcagggctataccggtaaagggcataacccggcggagggcttaattaacgagctggcaggcgcctggaaacacagtaaagcgcgtcctttcgtccatatcatgcaggatgatgatattgaggaggactatcacgcgcagtttatgcagcaggcgctgcatcaggccggtttcgcgagcaaaattctccgcggtttgggcgagttgcgctgggatgaagccgggcagttgatcgatggcgacggacggctggttaattgtgtctggaaaacctgggcgtgggaaacggcgatggagcagatacgcgaagtcagcgagacggagtacgccgcagtgcctattcgtaccgggcacccggaaaatgaagtccggttgattgatgtattactgcgcccggaagtgttggtgtttgaaccgctgtggacggtgatcccgggtaacaaagcgatcctgcccatcctgtggtcgctcttcccgcatcatcgctatctgctcgacacggattttaccgttaacgatgagctggtgcagaccggctatgcggtaaaaccgattgccggacgttgcggtagtaatattgatctggtgagccatcaggaagagctactggataaaaccagcggcaagttcgccacgcagaaaaatatctatcagcagttgtggtgcctgccgaaggtcgccgggaagtatattcaggtctgtacgtttaccgtgggcggtaactacggcggcacgtgtctgcgcggcgatgattcattagtcattaaaaaagagagtgatattgaaccgttaatcgtcatcgaagcgtaa

SEQ ID NO: 386471 - DNA, 1428 bp, Salmonella enterica
atgtctgacacatcaaggctttcaacggtagagaagttggggtttgggatgggggatgctgcctgcggtatcgtatattcatccgtaactatgtttctgacttatttttataccgatatttatggcctttctgctgcggcagtcggcacgatgtttttattaacccgaatactggatgcggtaagcgatccgctgacgggtattttagcggatcgtataaagacccgttggggtcatttcagaccgtggttgatatggttcgcaataccttatgcggtaatggcggtaatgacatttaccaccccggattttggtcataccggaaagttgatttacgcctacctgacgtataccggcctgatgctcacgtataccttaatcaatattccctattgcgccctgggcggcgttatcacaggcaatgaacaggatcgtctttctgcgcagtcatggcgtttttccatctcttcaatagcgggcctggcggtatccgtcgggacgttatatttagttgattggtttggtaaaaataatcagcaactcggctatcaaatgacgatgggggtgatgggggtaatcgctgtcgtgatgctggtgttatgtttcttcaatacgaaagagcgaattacgccaattgctgaatctaacgaatccatactttcggatctgaaaaatctgtgggcgaacgatcagtggcgcattgtggctatcattacctttttctccagcatggcgggtgtgctgaggggagcggctacgatgtattacgccacgtatttgatgaccggttcgacggcaacgatcgctgccagtaccgcgatgaaaagcgcatttattacgaccagtgtcgtcggagcgatactgggcgcaatgatcgccggttattttgcgaaacgcttccgggccgtatctctatttaaaaatatcaatttgctactggtgctggcgggcgtgattatgttttttgttccgccaacctggcttgccgtggtgtttccgctttattttattattggttttttgcatcagatgtatcagccgtttaagtggaacatgatggcaaatgccgcagactatggtgaatggaaaacggggcgtcgtatcacagggctttcgttttcgggaaacctttttatgttgaagttgggaatggcgtttgccggcgcgctggtcggtttctcacttggctggtttggttatcaggccggttccgcggtacaaacgccgctggcgaccaccgggattatcttaatgctgacgcttgcgccttctgcctcttatctggtgctctggcttttgtctctcttctataaactggatgataaatttatggcgaaaattcaggtggatttagagcagcgcaaaagcacggtcggcaaagatgaaaaagaggttgtaacctttattcctgaaaaagcggtgtcctga

SEQ ID NO: 386472 - DNA, 1551 bp, Salmonella enterica
atgatgaatattgcagaaaatcctgtatggctggcagataataatgacggcacttatcgtaatccggttatttatgcagactactcggatcctgatattgtgcatgtcgccgggacgtattatatggtggcgtccagttttaaccatatccccggtattccggtgctggaatctgtagatttggtgaactggaaattaattaatcatgtggtaccgagattgcccgcgcccttttttgattccgtacagccggggaagggaatctgggcgccgtctattcgctatcatggtggctattattgggtcttttacagtatgccagaccacgggatctttatgtcgaaagcgaaaagcccgcatgaagcgtggtcgacgccgcattgtttgaccacgcaaaaggggtggatcgatccttgcccattttgggatgacgatggcagcgcatggttggttcatgcgtttgcgtatagccgttcgaaaattaaacataagctgcaattatttcagatgtcgtgtgatggcaaacagttgcttgatgaaggccgtattatttttgacggcacctgttcacatcccaccattgaggggccgaaatgttataaacgcaatggcctgtattatattttcgcacctgccggaggcgtcgagcgaggatggcaaacggtactcagaagcgagtcgatgaccggcccctggatagcaaaaaatattttacatcaggggaatacgccggtcaacggcccgcatcagggcggctgggtcgaaacgtccgctggcgaatgttggtttatgcactttcaggataaaggcctgtttggccgtattgtgcatttgcagccgatgcaatggagcgatgatggctggccccgtttaggccagacaacggagaacggcgttggtgagcctgtcttacgtcatccaaaaatgcagggggttagcgatgtcgcgctcagcgttccgcaaatgtcggatagatttgcgcagggcaagcctgggctgcagtggcaatggctggctaacccgcagaaggagtggctgtcgccaacaactcaaggtcttactctacgctgtgcgcctggcggaaaacggtcattatacgatacgccgcaactactgctgcagaaattccccgctccgggctttaacgttgagaccaaattacaggcacagtttatccatgatggtgatgaagccgggctcgtcatttatggcgaacgctttttcgcattgagtgtcgtttgtgaaaagggggggcattatcttaaggcgacttgcggctggaatagcgatgataatgtggtcgcgcaccactcacgtaatattcaaattttgcccgatgcgcccgttgaacttaaaacggtcgttaacgaggatggaatatgccatttctactggcgtaccgtaacggagcaatggaaatgcatcagcgagacctttgccgccgcagcaggaaaatggactggggccaagttcggtatttatgctttatcggcaaaagaacaccagcaacggggcagcgctttatttgaatatgttttggtaaataaatag

SEQ ID NO: 386473 - DNA, 816 bp, Salmonella enterica
ttgaaaagcagaaaattaaattatttattgataagtagtgcttttattcttattccggggatatcagcgcaggcgaatactgtcatcacagaacctgcagccaatacggcaacttatcaatgtgccaacgtagtaaatacgaagcctttctcaaaaatttactttagtgaacgcacgcaataccgtactgcgaaacggtcgttccttgagcggctgatgttttctggtgtggtgctgcaagatggctggatgaaaaatatgtactggagcgtagaaaccgatgccgatcttggggaacattttgaccagtggaaaaatagctaccaagaaattgagataaacaagcctgtgcctctcggacagtccgatttttatctggaaccgggggcagtgttccattgggaacaggcgggatcgcgggtggatccctacatcggtcttggctaccattttgatgccacatggaacgcggtattacgctatcgatataatcatcagaatcatgatgatattgcgctggacggatcgtatgacgattcttcagaacatcgtgtcgatttgtatttaacaaaagtcgttacgccggatttccaggtacaatataacccaacatattacagtaaagttcattcgaacaagtttacttataccaatggcaaaaatcatacgttacaacacaattttgtttttacctggcacgcgacgccacgtatttacccttttgcggagttgggctatatggataaatataaaagaggtaacagtaccgaaaacgattatcaaatccgcttaggtatgaagtttgatataaattaa

SEQ ID NO: 386474 - DNA, 165 bp, Salmonella enterica
atgaaaataccagagaatgaattaaaaaacacatcgttgaagcaaaataaatatttgaaccattgcaaaaaaaataataataaaacagcctccatcttagataacaccatgcaatcaggtaataattcatatatccatatgcctggtgatatccatttcatgtaa

SEQ ID NO: 386475 - DNA, 273 bp, Salmonella enterica
atgccgatttacttacatcaacatactcacagctataacccaacacaaattgttgccccaccatccaacacttttgtttactgtgacagtgatgctaaggtactggcgtattactcgctggcgtccagctctgtagccacaaatactgcgccgggccgctttcgtcgcaatatgcctgattccatcccggttgtggcgctgggacgtctggcggtggatcaatcattgcggaggccgggccttgggcggcttgcgggtgattcaggtagttga

SEQ ID NO: 386476 - DNA, 174 bp, Salmonella enterica
ttgggcggcttgcgggtgattcaggtagttgacactatcggcattcgcggaatactgattcatgcactgtctgatgaggcgtgggagttttatcgaaaagtgggctttgggccgtcgctgatggactcaatgatgctgatggtgacgctgggggatctgaataattgtggctaa

SEQ ID NO: 386477 - DNA, 642 bp, Salmonella enterica
atgtgcgaaagtatattaaggaattcctctcctgataataatgaaaccattctgagaaatagtcagcatctgtccgtagaactaccgtcacaatcccaacctggtactgagctattcagatctctaactcccggagagataaagctggcgcaaacagtatttcagaatatcattaactatgacagagtaaaaatatattgtcatagcagccaatcccgaacacagcccagagtgatcacgaccaccaaaaacggagaggtgcttttaagtatgagcgagtatcgctctgatttttctggtgattatacgaattatcatgattctgtaaaatgccctcattcgtttatcttcgctatgtcttttgtctggcagtattttcgctatgattcttcttttcatgatccatatacatcatccgtctggtactcctataaattagatgagccagaatttaatttttatactatggaacagcaggcttcaattatcgctgattactggttgctcaataaacatgacatcgtggagtataaagatataagcaattatcaagaatatgataagtttggagtagacatcaaaagagatttattgaggagctatgagtttatgctaaggatgcatattcagtacatggagtag

SEQ ID NO: 386478 - DNA, 975 bp, Salmonella enterica
atgaaaaaaataattatatttagtttgtgtttttcaatgttggcgggaattctgttgctgggaatttatttttccgggagttggatgttgattgataaaagagatagcaatataattaatcaggatgtctatacaaatgaaaataaactgcgtagagccgctgagcagggtgatatggttgctcagaatgaactaggtgtgttgtatgaaaaagctaaaaatcatacaaaatctgcatactggtataataaatctacagaaaaaggatattcgctggctcaatataatattggcgttgcctatgaaaatggtagaggtgttagcaaaaactatcaaaaagcaaatgattggtatcgaaaagcagctattcaaggatattcaaaagcagcattcaatcttggtatgttatattttgaaggaaaaggtgttcctcaagattataggaaatctcgcgagtggtttatgcaagcagcagcagaaaataatactatggcaatgtatgcaatggggaggatatattactatggtttaggtgttccaaaagatgatagacaagctattgtatggtatcagaaaggtgtggatctaggatcaatgagggccaggaattcacttgctctgctttattcccaagggggggatggattttataaagacagagttaaggcgttatcattattaatagcatctgcttgtcaagggtatgtcgtagctcagaataatttgggggtactgtattctgatggcgctgaagacgtgattgcagatcataaaaaatcttatgcatggttttctgtagcagcatcaaatggtctggaagaggctataaaatcgcaaagaaatattgcagagaaaatgtctactcaagaacttgagcaagcaaaaaacatagccataaaatatattgaaaaatatccttcaccaataaatgaagacgatacttataaatcaaataccgagtgtaaatatccgtag

SEQ ID NO: 386479 - DNA, 246 bp, Salmonella enterica
atgaaaataattattaaatttattcttttgtacttttatatatgtttctcaatgttcgccatatgctttattggagaaatagttatcaggcttatatattatataaaatattcatcatggccagtatctgcaattgattttaaagggattttcgctcctgctttcatttatggtactagtgcatggcttctctgtgttatttatagaataaatggatgggatatgaaaggaaagaaaaataaatag

SEQ ID NO: 386480 - DNA, 963 bp, Salmonella enterica
atgtgcgggctgaccctggagcagatgaaaaatcaggtggaaccggaactcgcgccagtgaggaaaatccacctgtaccactgcgaccaccggggcctgccgctggcgctgattgatattaacgggcatattgcctggagtgcggagtctgatgaatgggggaatgtgctgcgggaggataaccagcataatctgcaacagcttatccgattgccggggcagcagtgggataaggagtcaggactgtattataaccgacaccggtactacgaccctgcacaaggacggtatattactcaggatccggttgggttgaaaggtgggctgaatccttatacgtacccactgaatccgatcactgatatagatccacttggtctggctacgctacaacagattatgggagccaatgcttatggtaccatgcagggtgccaatgttggattggatccaaatttgtcggacgaggaaagatcgaaagctgccgatgactttgcaaatatgcggggaatgtataatccgttggatcaatatgtaaaaagactggcttttggattaccctcaatgccgttgttagtgatgttttctccagcggcgtctctcgaagctgcatttactggtgcaggtttatcctgcggttcaaactctgcatatcagttatacaaaggggataaattcaattataaagatgctgctctggctgcattgactggttttttagctccgggacgtaatttgctggaaaatacgcttatttctatgggggttacatttttgaataaagatggaaaaactagcgcaactagcggtgccggagtaggaactgttgtcagtgatatcatgggtaagctggccccttcttatattcctgatgcagtagttgagttcggtggtggagtggcatctgaatatattggagataaatcagaggagatttttgatacagaggatgagaaaaaatga

SEQ ID NO: 386481 - DNA, 4176 bp, Salmonella enterica
atgagcggaaaaccggcggcgcgccagggcgacggcaccatgaagggcggcccgataattcaggggtcggcaggggtgatgattggcgcgcccaccggtgtcgcctgttcggtgtgccccggcggcatgacctccggcaacccggtcaacccgctgttgggcgccaaggtgcaacccggcgaaacggattttgccctgcccggcccgctgccgtttgtgctttcccgctcttacagcagttaccggacgaaaacgcccgcaccggtgggggtatttggccccggctggaaagcgcctttcgatatccgcttacagatacgcgaagatgaactgatactcaacgacaacagcgggcgcagcattcactttgacccgctgttccccggtgaaacggccttcagccgcagcgaatcgttctggctggcgcgcggcggcgctccggcactgcatgaaagcaatccgctgcatcttctctggcagcgattaccggaagcactgcgtaccagcccgcatatttacctcgccaccaacagcttacaggggccgtggtggatactcggctggtctgagcgcgttcctgcgcccgatgaggtactccccgccccgctgccgccgtaccgggtgctgactgcgctggtggataatttcgggcgcgtgatggcttttcatcgtgctgcatccggcgaatttgccggagacatcaccggcgtgacggatggcgcaggccgccggttccggctgctgctgaccacgcaggcgcaacgggctgagcagtaccgcagacaggccgccgccgcacaacagccaccggtgcctgatgcgctgcccgccacggagtacggcgcggataacggcatccgcctggcagaggtgtggctgacccgtgacccggaatacccggatgacctgcctgcacagccgctggcgcgttatgcatattcaccgcgcggcgaactggtggcggtgtatgaccgcagtgacacagtcgtacgcagcttcgcttatgacataaaatatccgggacggatggtggcgcaccatcatgcaggcagaccggaaatacgctatcgctacgatgctaccggacgagtcgtggagcagcacaacccggtgggattaagctacacctatatgtacgaaaagagtgctgtcaccatcaccgacagtctgaaccgccgcgaggtgctgcacaccgacggcgacggcggactgaaacgggtagtgaaacaggaacgtgcggacggcagcgccacgcacagcgaatatgacccggcaggcaggcttatcgcgcagacggatgcggccggccgccggacggaataccgcctgagtcccggttctggtctgctgaaagaggtcgccacaccggatggcaggcgcaccgagctttactacaacagccagcgccagttaaccagcacggtgtacccggacgggctgaaaacccgtcaggaatacgatgacctgggcagactgaccgccgaaacggcgcgcaatggcaacacgacccgttatttttatgctgacccgtgcagtgaacatcccagcgccatcgaagacgccaccggcagcaaaaaacagatggtgtggagccgttacgggcagttgctgaccttcaccgactgctccggttatgaaacccgttatgaatatgaccgtttcgggcaactgacggccacacatcaggaggaaggaataagcctgttccgggtttatgataaccgtggcaggctggtcagccagcggaataccacagaccaggaaacccgttacgaatacaatgcagcaggcgacctgacggcgacggtctccccggacggcagccgcagcgaaaccacctttgatgaccggggcaacgccatcagtaccatgcagggcgggctgatgcgtcggatggaatacgacgccgcaggccgcgtgacacaactgaccaacgagaacggcagccacacaacattcacttacgatgtgctggacaggctgacgcaggaaaccggctttgacggcaggacgaaacgttaccgttacagcaacatcgggcaggttgtgcgcagcgaggatgaaagcctcgtaaccctctggcattacgatgacgcaggccgcctgacgtacagaaccgtgaatgaggaagaggcggaacgctggctgtacaacgaacgcggctggctggaagacatcagccacctcagcgacggctggcgtgttgccgtgcattacgcccgcgacaaccggggccgtcttatcagcgaacgccagacggtgcatcacccggaaaccggcgagctgctgtggcagcacgaaacgaagcaggattacagcgataagggactgccgaccatcaccacccccgactgcctgtcaccagtggaatggctcacttacggctccggctatattgccggaatgaaacttgacgacgagccgctggttgatttcacccgcgaccgcctgcaccgtgaaacgttactcagctttggtcagtacgaaagaaccacagcatacactgccgccgggcggccggagagttaccattttaataaaccgcagcttaaccgtgaccacacctggaacgatgccgggcagcttatccgtatcaacgggccgcatgagcagcgcgattatcagtacagcgacgccggacggctggtcagcacacatatcaaatccccgcatcatgacctgacacagtggacgctcaccgacccggcaggaaaccggatagcggagcgggataaatacccgatgctgccggaggcctggcgtgataaccgcatcacccaggacgcggattatttttaccattacgatgagtacggcaggctgacggacaaagatgagcggcgcgtccgcaatggcggcagctatacgcatcattacagctatgaccatcagcaccggctcacgcattaccgcctgatgcagcagggaaacacgctgacagaaagccgttatgcctatgacccgctgggccgccgtactggcaaacgggtatggaaaagccagacggaacgggaaggtattaccgggaaggagtacctctggctgaaccctacgccggaggtaatatggtacggatgggacggcgaccgcctgaccaccacgcagacggacgccacccgcatccagacggtgtatcagccgggaagttttacgccactcattcgtattgaaacggcaacatcagagctgaccagaaccgcccgccgcacgctggcagagaaacttcagcaggatgcagggatggcgtttgcgccggaactggtggcgatgctgaatactctggaagctgaactgaaacgcggggcaatcagcgagcaaaatcagcaatggctgacgatgtgcgggctgaccctggagcagatgaaaaatcaggtggagccggaatatgcgccagtgaggaagctccacctgtaccactgcgaccaccgtggactgccgctggcgctgattgatattaacgggcatattgcctggagtgcggagtctgatgaatgggggaatgtgctgcgggaggataaccagcataatctgcaacagcttatccgattgccggggcagcagtgggataaggagtcaggactgtattataaccgacaccggtactacgaccctgcacaaggacggtatattactcaggatccgattgggctgcaggggggatggaacctgtatcagtatccattgaatcctgtaattactattgatccgctgggattaagtggattgggtgccttaaatttcttgctgggtcaacctggtatgaaagatgcgtataattgtgctgcaactcaatatgagaattcacttccaaagcctgtatctgagtggaaattttcacgatgggatgaaggtagaggaaagagatttgggaatagttatataaatgtaaatgcgatatgtgaagatcaatttggtaacacaaaatctgttaatgcccggacttttcaaaccggctggttccctattaatgaagttgaggctggtagaggaattccagaccctggagaagatccttcagacatagcatcagctacagacactattacagacaatgtaaaagatcttactgatgctcattcgcaggcaataacatgtggttcaaagagtagttatcagtgctttaaagattctgaagcggatcaaaaattaagtgaaaaattatgtggtcaaaggtaa

SEQ ID NO: 386482 - DNA, 2112 bp, Salmonella enterica
atgtcgacaggtttacgtttcacgctggacgtggatggtctggggtcgaaaaccttcgccgtggtgagctttctgctgaaacagcgttattcattcccgtttacgctggacattgaagtcgccagcgactcgttcagggaaacggcagaaaaactgctggagaagaacgcgaccctgactatctggcagggcgatacaccacagcgctatatcagcggcattgtcacccgattcggaatgaaagaatacaacggctggcagatgtgctacagcctgaccatcaaccctcccctgtggcgcgccgggctgcggcaaaattttcgcatcttccagcagcaggatattcagaccatttctgccacgctgctggatgaaaacggaataaccggctggaaaccgctgttttatgaggaccacccggcacgggaattctgcgtgcagtatggtgagaccgacctggcgtttctcacccgcctgtggtcggaggaagggattttcttttttgaccggcacgttgccgacacaccgtcgcagacgctgacgttgtgcgatgatgtggccgggctgtcccgtacggatgaaatgtcctttaatcccagtcccacaaccactcttttacccacgattatcagtacatttcgttatcaggcacagatacgcccctcttcggtggaaacccaggactatacctttaaagtgccgggatggccggcgtattacgggcgcgacggcgagcacctgaacggccagcgcacacagtatgaagttttcgattatccgggacgatttaaggatgagcaacatgggcaggatttcgcccgttatcagatggagggctggcgcaataatgcggaaaccgccgtctgcatcagcaactcgccgacattatggccgggcgtcatctttaccctgaccgggcatccggtcagggaactcaaccggcaatggcaggttatcagcagcgttctgacgggtaaacaaccgcaggcgctgaaaggcagtcaggggctgggtaccacgctggataaccagtttgaggttatccccgccgaccggacctggcgaccacagccgctgttgaagccgaaagtagatggtccgcagagtgcaattgtgatgggaccaaaaggcgaagagattttctgcgatgagcatggccgggtacgggtgcgctttcactgggatcgctattgtccagggaacgaggacagctcctgctgggtacgagtgtcacaggcatgggcaggcgccggatttggcaatcttgccattccgcgcgtgggtcaggaggttattgtggactttctcaacggcgaccccgaccagcccattatcatgggacgcacgtatcacgaagataaccgttcgccgggtgatttacccgctaccaaaacgcagatgaccattcgctcaaaaacctacaagggcagcgggtttaatgagctgcgctttgaggatgccaccgggcaggagcaggtttatatccatgcgcagaaggatatggataccgatgtactgaataaccgcaccactgatgtcacggccaaccaccgcgaaaccatcggcggcaaccaggtcatcaccgtgaagcaaaatcaggtgcagacggtggtgcagaatcagaaagaaaccgtgggccagaaccagagcattactgtcggccagaaccaggctgaaacggtgggcgtggcgcgggcattaacggtcggggtagcgtatcagaccaccgtgggcggcgtgatgaacacttcggtggcgctgacgcagtcttcacaggtggggatacagaaatcactgctggtcggtaagggctataacgtcagcgtcggggaaaatgtcaccttcacggtaggtaaaagcaaaaccgagagcaccggtaaggtggcggtctattccgccggggaacatctggaactgcgctgcgggcaggcgcggctggtcctgacgcagaacggcaaaatcttccttaacggtactgccattaatctccagggcgttcagacgctcagcggcgacgcgctgatgattaactggaactgcggtgcagcggaagacccgccgaaagcgccggaggaagacagcagccagccgccggatatgcggcagtactga

SEQ ID NO: 386483 - DNA, 294 bp, Salmonella enterica
atggctgttcttacccgacccctgagtgcctccgaagtccagaaggcaaaacccgccgaaaaagattacgaactgtttgatgatcaggggctgaccctgttcgtccgatccagcgacaaaaagatctggcgttttcgctataaacgccccgcttcggatgccagaaccaccatcaccctcggttactatccctctatatgccgcgacttaagctgctccacccggcggatctgcacattctgcgccagaatcagacactcacaaaaacgttgcgccagcgctatgcggtcgtga

SEQ ID NO: 386484 - DNA, 165 bp, Salmonella enterica
atgccgcctttaaaaaaatttatgctgcccctgattttggggatgatagtagccacagcgtcgacacccgcaatggcgctggtttgtcttgcaagtcacccagctaaagagtgcgctgaagcctgtggtgtcgatatgttgtttatattcccgttatgtttttaa

SEQ ID NO: 386485 - DNA, 723 bp, Salmonella enterica
gtgactaaaataagtctgtcctcacaatttcatagaatccataaaagtaacgtcgaacctgtaaacgaaaaaaaaacggagaaaaacatttttgcaaaaagtattactgccgttagaaatagcgttatcagcctgtctacgagtctgtcagatcgttttagtctgcacaagcaaacagaaccgtcggctacccgttttcatcgtgggaacgcttctgagggtagggcggtattaaccaataaaattgttaaagattttatgctacacaagctcaatagcctggatatccagggtaatgcgagtaaagatacagcctatgctcgccagacatgcgaagccatgttatccggggtgtacagcaataataaagataaatattgtaacttactcatcagtaaaggagtcagtataacgccttttctgaaagagattggtgaggctgcacaaaacgcggggctaccaggagaaacaaaaaacgacatatttactccaggcggggcaggggcgaatccttttgtcattcctcttatcgcttcagcgagtatgacgtatccgcatatgtttataaatcatagtcagcaggtgtcttttaaggcatatgctgagaagatcattatgaaagaagttacgccgttgtttaatgagaggtcgatgccgacgccacaagaatttcagttaacggtggaaaatattgcaagtaaatatcttcaggatgcctcctga

SEQ ID NO: 386486 - DNA, 477 bp, Salmonella enterica
atgagcaaggatgaaatcagttatcaaattctctaccggtactatctggaaaaactgcactgtacccttacccggagagtagataacgtactgtcatttgctctcatgcttttcggcgttggcgtcatcgtaaacgttgggaatcaccttatcctggggttatgcattgtaggtatctccgcactgaaaatactatgccgtttcgacacacggtcagcacaggcagacaggcaatcccgcgcctggttgagactttttaatacccggcaccactttccttcagataaatcgctgttccttaccatcacctctcttgagcaagacaagagcaatgtatggtctatgcttattgggcctgccatcgtcatgactaagacctcactcgggaaaacgcccagtgagaaactgacgactggtgaaaaactatgcgcatttttgagtggcgctacgaagccgcggccctccactcacaactaa

SEQ ID NO: 386487 - DNA, 606 bp, Salmonella enterica
atgcgtaataaaataatacttgccatggcggctgtaggcatgatgggcggtacttcggcttttgctgccaacactattgccaccactgacgctggcggggggacgatgaccttcagtggctcagtcattgatgcgccgtgcagcattgtgccggacagccagaacatcaaagtagacctgggtcaggtcagtatgaaatcactatcagcagcaaacaagtactccagtccggttccagttaccatcaatctgaccggatgttcatttgaggacctcggaaatactccagacacgggtgccaccaactattcaaaagtggccatcacattcccgggtgttctgcccccacagggaggtgatttaactaaaggagaaatagcaaatactgcaagcaatcctgctactaatgtggctattcaacttctgaaaagtgatggcgttactcctgtggacctgagcaaggcacctatagcaggtgatattacgctggatacctcttcggcaaccaataagctgaatttcttcgcacgtatgataaccgttgacggagcagcctctcagggatctgtcggtgccaccgtcacctataagttgaaatatttctga

SEQ ID NO: 386488 - DNA, 2490 bp, Salmonella enterica
atgaaactgacccggctggcactgctaattactctgaatatactgacgttgccaataggggcgacggaatttagcgccggttttcttaaaaacagtgaccacagcagcgtggatctatccgccttcagccgggatggctacgtcgcgccgggggattacctgcttgatatttacctgaacgacagactcattcgcaatcagtataaagtcagtgtggtggagaccgacgacgggcgatcacggttctgtatctcccctgcgctggtagccatgctcgggttgaaagaggagaaccgccaactgctcgcacccgtcaggggagccggcgggcagtgtctgaacctgaatactgcggacagtaaaataatatacagcccggataatcagtccttgtccgttaccctgccccaggcatggatggaatatcagaacccggactgggtgcccccaccccgctggagtgatggcgtcacggcagttctgctggactataacctgatggcgaaccggtatatgccgcatcagggagacacctctaccagttacagcctgtacggtactgccggatttaacctcggcgcctggcgtctacgcagcgattaccagtacaaccgttatgacagcggagacgacagcgtgcagtctgatttttatctgccgcaaacatatctgttccgcccgctaccgtcgctgcgttccaaactgacgctgggccagacctatctcagctccgccattttcgactctttccgttttgccggcatcaccctggccagcgatgagcgaatgcttccgccttccctgcagggatacgccccgcaaatcagcggcattgccaacagtaatgcgcaggtgaccgtcagccagaatggtcgcattctgtaccaaacccgggtgtcgccaggaccgttcgtgctgccggacttgagtcagaacatcagcggcaatcttgacgtaacggtgcgcgaaagcgacggcagcgtccggacctggcaagttaacacggccagtgtgccctttatggcccgtcagggacaggtgcgctataagatggccgctggacgtccgctgtatggcggaacgcataacaacagtacggccagtcccgactttctgctcggtgaggccacatggggagcatttaataacacatcgctgtacggcggcgtcattgcctctatcggcgattaccagtccgttgcgctgggcgcggcgcagaacatggggctcctcggcgcgatatcggtggatgtcacccgctcagatgcgcggctatcttcagtatccacgccgcaccaaaccggttacagctaccgcgttaactataccaaaacgtttgacagcactggcagcaccctggcgttcgtcggttaccgtttctctgatcgacactttatgtccctgcaagagtatctggcgcgctccgtgtatgacggggagtacctggaggatgaaaagcagagctactccgtaagctggaaccagtatctgtcagccctgaacatgaatgcctcgctttccatgagccgtctcagctactggaatgctgattcaaacaataactggacgttgtcgctcagtaagtcaatggatattgggtccatacgtagcgttaatctgtcgctctcgctgtcccgtaaccagacggcgtacaacctgacacaaaaccaggtttatttctcagtcagtctcccctggggggagagtcgccaggtgagttatagcctgcaaaaggataatcagggcagtatgcagcagaccgtgaactacagcgatttccatagtccggacacctcatggaacatcagcgctggctacaaccgatatgacagagacagcagtaacagcttcagcgggagtatccagagccgtctaccgtggggccaggccagcgcggatgccagcctgcagcccgaccagtatcgcagtctggggttgaactggtatggctcactgaccgccacggcacatggcgccgcgttcagccagtcgatggccggagatgagccacggatgatgattgataccggaagtgtgtccggggtgccggttaacggcaatagtggcgtgaccaaccacttcggggtcgcggtagtcagcgcaggaagcagttaccgcccgggcgacatctccgtggatgtgtccaggctgccgcagggcgtggatgtatctgacccggtcattagcctggtactgacagaaggggccgtcggttaccggcatatccggaccagccaggggaagcagattttcgggcatatccgactggctgatggcacaaccccgccatttggcgcgcaggtcgtatcggagaaaagtgggaaaacggcggggatggcgggtgataacggtctggtctacctgacgggcatagatgattcagaccggaataatctggtcgtgacgtggggcggcaggccgcagtgccgactgtctctgccggaaaacgcgaatctcagccggggcgcgctactcctgccctgccggtga

SEQ ID NO: 386489 - DNA, 747 bp, Salmonella enterica
gtgaacatcagacagacagcgggacttcttgccagcctggtactggcatggtcttccgccggccaggcggccattaatgtggacagaacccggataatcatgaacggcgatgcgaaagcagtctccgtcgggctgagtaatgagagccgtgatcagccctttttggcgcaatcctggatagaggatagcggggggaaagcaacgaatatactgatagcgctgccgccgctgcagcgcatcgatgcagggaaaaaatcccgggtcagaattatgcgggtggaaaactcaggctcccccccgctaccgacagaccgggaaagcctgttttattttaacgtcagagaaattccgcctgcaccgaaggacaaaaacaaaaatatcctgcagcttgccactcagagccaactgaagctgtttctgcgcccgcccgcgctggccgcggagggtaacgcttcgccggaaaagatgctggaggtagggtccggcggcaggtcactgacgctgaaaaatccaacgccatattacatcacgcttatctggctggggcaaagtccgaagcagaagctgtcaggctttaaggaagggacgatggtggcgccgttttcatctctgctggtgaatggcgtcctacctgccggtacggaccggatactggtgggtaatgtagatgattacggggcaatgagaatgaacctttttacctgtacggcggggaaatgcatgttccgggagcgtattcatgattaa

SEQ ID NO: 386490 - DNA, 1161 bp, Salmonella enterica
atgattaaggcaggaagcggaaccataaaaacacacgatatacgcgcatcgtttacgctaacccgcagactgaacctgttgtcgctgtggctgctgatggtgtgtgttctggcaggatcagggtatgcgtatgcagcaacagcgatatgtactgactggaacggtcagcagtctgctgtaagaatacatttacccccttcagtcagttttacacccgggataactcctgacttaagtcggcctttgtatacaagtcctgagtatcgtatcaattataaatgcacgaactccggaggcccgacacgggtaagtataacccggctgggtgattttgctcctttaaaaaacgcattgaagggcgcaggaatgcagttaaagttccgagtccgggattccagtaataataatgaagaatcgtggaaccccatcggggcagatgaatttgcgcctataggcaccagttataccggtacaactgaaaacaggaccgtatatatcattgtggagctgtatcttgcaagcgcgcctaaagcgggtttttatgctgtgccatcgttaaccacatttaaacttgtcccatatcatggttcatacagtggtttttttcttactactgatgcactccgaattcaatatgttccgacatgttttgtgaagacttcgctgaatacaaacaaagtagattttggaccactgctgacatcagatattgacgcttcgctttccaggcaccgttcttttaccgtcggggccagcgttaacagcaacagcggctgtaatacaggaaatctccaggagcagtatgaagtcgttaccacaaacggaaaccgttactcttttcatctcaatctccctctgaaggtgacattttcggttgccagtggtggagcgccgtcttctgacggtcacgccattatactgaaaaatataaacggtgaagataatggcctgcagctaaaaatatttgaccctgctggtcacgtcgttatgtttggagatgtattacagccagaaaaccatccagccaatcaattgggtgtatttgataatggtacgtttacagtaaataaacaatatattgccactctgtcttcaacagggaaacaggtaaaaaccggaaaatataatgcacaggtaacggtaaaagtgagctattactaa

SEQ ID NO: 386491 - DNA, 492 bp, Salmonella enterica
atgtgctctgacaatacgcaaaagaagaaactgtacgcagccggaggtaagaacattcattatccagcccagacaaatcatgatacctgttttattccagagagtgttcgccagtacgccggggctcccctgtatatcattgtggcgcactggtgcctgcaacagcagggctgggttcagcgtggacagatatccgaggcctttcacatcaccgcaaggcgggccagctatctgatctcctacctgagaaataaagcgtcgcgggtggtctgcgtgtgccgctaccagacactgttcaataaagctcggcgttatgagatctatatcattcgtattcttgaaaaccctgtaccgacccgacaggaacggggcgcggcaccaccgttaacgaaataccgggtggggaatggtgacaagacacaggcgaatgaactgtggaacaggctgtgcagtaacagacatgccgggaaaatcctgaaaaaggaggattag

SEQ ID NO: 386492 - DNA, 786 bp, Salmonella enterica
atgagttataacccgacaccagcccgccaggttattatttatggtgactgctggccgataactaccgccgtggcacatctggccaggtcagttctgtctgcgtgtgaatatgaaattacgtacgcactgccagctctgttgcagcaactgtaccgaaagccgcaagcaacgttagtattgtgtctgcgccctcgtgaacatctttttttattttacgccctgaagcaagcgctcctggatcacccggttctggtcatcagcgatgaactgttttttagtgaccatctggtactaaaggtatatggaggtatcccggcgattcaacagcgggaactaacagagatgcttatacagattaaacaaggaaatcaatggtacggcggaacgcgtcgccaaacgatgctaaagctggacaattttctgttatatccgaccccggtaacaggttttctggaagttccccaaatattcaataatccaaagcagctgatgcactacatgtcactgctgatgcatagggaaattctggcatgtggagtgagtccggcccagcagcgtctgcttgaggaggtttaccgtggccggggaagactgtcagcgctctgtggacgactgaatgcaagggagagacaaatctggcaagacaagtaccgcttgctggtgaaattaggcatgagaaatcgattacgtgaactgttgcacggcacccgattctgtatgaatatgcaaaaaacgatttttatggctccggcgaaaactgcatatcctaatctgtgtgattcatag

SEQ ID NO: 386493 - DNA, 492 bp, Salmonella enterica
atgaacagagaaactcagcagcggctacagtgggtaaaactctatgaaacgtccggtgatgcggggttcgtatgccgtcgctgtggcatttctcggcccacattgcgtaaatggtggcgcagatatctggctcagggcattgctggtctggaaaaccaaagccgtcgccctaaacactcaccatcaacgaaaaccagcgctggcgaagtcgatctgattctggagttacgtacccagagaaatctgggtgcaagacggattcaaagcgagttaaaacgtcttcattcaatctcactggcaatggcaacaatccacagagtcctttgccaaaatcaggttaaacctgttgttaaattccggcgtaaagctgatttcattcgctacgaacgccctgttcccggtgatcgggttcagatggatacctgcaaaattgggcctggcttatatcagtacacatctgttgatgacctgcaggagctgctggcagagtag

SEQ ID NO: 386494 - DNA, 2112 bp, Salmonella enterica
atgtttaatatccgcaatacacaaccttctgtaaatacgcaggctattgctggtgcagcggcaccggaggcatctccggaagaaattgtatgggaaaaaattcaggtttttttcccgcaggaaaattacgaagaagcgcaacggtgtctcgctgaactttgccatccgagccggggaacgttgccggatcatattagcagccggtttgagcatttaaaaacgcttaccctccccgtgtggcaggacaatatccagtgtaacagggagggtatacatcagttttgtatcctggatgcagacagccaggaaatattgtcagccacccttgatgatgccgggaactataccataagttgccaggagtacaatgaaacacattgcctcaccgtggacacagcacagggagaggaatgcacaggacacgcggaaggggcatccgggacactcctgacatccctgcgccctgcctcaccgacggcagcagagtatgatgctgtctggtcagaatgggaaatggccgcaacagaaaaagagtcacgcggccgcgcagcgacggtacaggaaatgcgtgactgcctgaagaacggcaaatcagtgcttaacgtgggaggagcaggacttactaccttaccagaccgtttaccaccgcatattacaaaactggttattccccgtaataattatctgacccgcctgccgccgctgccgccaggactacggaagctgattgtctctaataacaagctgacctgcctgccgaggctgccgtcaggactactgtcgctgtcggtccctggtaatcagctgacccgcctgccggagctgccgtcaggactacagtcgctgtgggcctctggtaaccagctgacccgcctgccgccgctgccgtcaggactggaggagctgattatctctagtaaccagctgatcagcctgccggagctgccatcagggctacagacgctgtcggtctctgttaaccagttgacccgcctgccgacgctgccgccaggactacaggagctggcggtctctgttaaccggctgacccgcctgccgggaagtctcattcatctgtcctcagcggcaaccgtaaatctggacgggaatccactgtctgaacgtactctgcgggatctgcgggacatcaccagagcgccaggctattcaggccccaggatacgattcgatatggcggggccctacgccccccgggaagccagggcactgcccctggcggtcgctgactggctgacgcctgcccgggagggtgaaccggcccctgcagacagatggcatgtgttcggacaggaagataacgccgccgccttcagcctcttcctggacagactgagtgagacggaaaacttcataaaggacgcgggctttaaggcacagatatcgtcctggctggtacacctggctgaagatgatgcgctgagagcaaacacctttaccctggcaacagaggcaacctcaaactgcgaggaccgggtcacattttttttgcaccagatgaggaatgcacaactggtacataatgcagaaaaaggggagtacgatgatgatctcgcggcgctggttgccacggggcgtgtgatgttccgtctggaaaaactggaacagattgcccgggaaaaggtcagaacgctggcttttgtcgatgaaattgaggtctgtctgggctatcagaataagctgaagaaatcactcgggctgaccagcgtgacggcagaaatgcgtttctttgacgtatccggcgtgacggttacagaccttcaggccgcggagcttcaggtgaaagccgccgaaaaaagcgagttcagggagtggatactgcagtgggggccgttacacagcgtgctggaacgcaaagcgccggaacactttaacgcgcttcgtgaaaagcgaagctcggattatgagcacacgtaccggatactgtctgacacagaactgaaaccgtccgggctggtcggtaatactgatgcagagcgcactatcggagcaagagcgatggagagcgcggaaaaggcatttctggatggtctgcgccctcttgtggaggagatgctggggagctatctgcaagttcagtggcgtcttacctga

SEQ ID NO: 386495 - DNA, 2307 bp, Salmonella enterica
atgtttaatatccgcaatacacaactttctgtaaatatgcaggctattgctggtactgcggcaccagaggcagctccggaagagcttgtatgggaaaagattcacttttttttcccgcaggaaaattacgaagaagcgcaacggtgtcttgctgaactttgccatccgacccagggagcgttgccggatcatatcagcagccgctttgaacatttaaaagcgcttgccttccccgtgtgggaggacaatattcagtgtaacagggatgatatacatcagttttgtatcctggatgcagacagccaggaaatattgtcagccacccttgatgatgccgggaactataccgtgaattgccagggggacaatgaaacacatcgcctcaccctggacacagcacagggagaggaatgcacaggacacgcggaaggggcatccgggatagtccggacatccttcctccttgacacaacggctccacagacggcagcagaatatgatgctgtctggtcagaatgggaaagggctgcgccagcagaagagtcacccggccgcgcagcaacggtacagaaaatgcgtgactgcctgaataatagcagtcgagtgctgaacgtgggaggagcaggtcttaccaccttaccagaccgtttaccaccgcatattacaacactggttattcctgataaccatctgaccagcctgccgccgctgccgccaggactacgggagctggaggtctctggtaaccaactgaccagcctgccgccgctgccgccaggactacgggagctggaggtctctggtaaccaactgaccagcctgccgccgctgccgccaggactacgggagctggaggtctctggtaaccaactgaccagcctgccgccgctgccgccaggactacgggagctggaggtctctggtaaccaattgaccagcctgccgccgctgccgccaggattacaggtgctgacggttgatggaaacccacagctgaccagcctgccggcgctgccgccagaactacaggatctgtcggtatctgataaccgactgaccagccttccggagctgccgccaggactacagacgctgtcggtcgatgggaacccacatctgaccagactgccggagctgccgccaggactacagacgctgtttgtctctaataacccacagctgaccagcctgccggagctgccgtcagaactacaatggctgtttgcccgtaattgccaactgacccgcctgccggaaagtatcagaggtctgccctcatccgcaagagtaagtctggaaaggaatccactgtctgaacgcactctgcagactctgcgggacatcaccagcgctcctgactattcaggccccacgatacaattcgatatggcgggtccttccgtcccccgggaagccagggcactgcacctggcggtcgctgactggctgacgcctgtaccggagggggaaccggcccctgcagacagatggcatatgttcggacaggaagataacgccaccgccttcagcctcctcctggacagactgagtgagacggaaaacttcaaaaaaaacgcaggctttaaggcacagatatcgtcctggctgacagaactggctgaagatgaggagctgagagcaagaacctttgccatggcaacagaggcaacctcaagctgcgaggaccgggccacattttttttgcaccagatgaagaacgtacagctggtacataatgcagaaaaaggggcatacgataacaatcttccggggctagttgccacggggcgtgtgatgttccgtctggaaaaactggagcagattgcccgggaaaaggtcagaacgctggcttttgtcgatgaaattgaggtctgtctgggctatcagaataagctgaaggaaccacttgagctgaccagcgtgacggcagaaatgcgtttctttgacgtatccggcgtgacggtttcagaccttcaggccgcggagcttcaggtaaaaaccgctgaaaacagcgagttcagggagtggatactgcagtgggggccgttacacagcgtgctggaacgcaaagcgccggaacgcgttaacacgcttcgtgaaaagcaaatatcggattatgagaaagcgtaccggatgctgtctgactcagagctgaaaccgtccgggctggtcggtaataccgatgcagagcgtattatcggcgcaagggcgatggagagtgcgaaaaaggaatttctggatggcctgcgccctcttgtggatgacatgctgggtagctatctaaatgctcggtggcgtcttaactga

SEQ ID NO: 386496 - DNA, 435 bp, Salmonella enterica
atgatgcatttgaaaaatatttctgtaggtaatccaaaaacgctggagcaatatcagttaactaaacgctccggcgtcatctggttatactcggaagacgggaaaaactggtacgaagaacagaaaaactttgcggctgacacactgaaaatagcctgtgaccagaacggtgttattgtgaacatcagcaaagatgtttcgacaataaatcccactggtttgagcgttgttgaattatatgacatcacagcaaaccgacgcgttgatatatatggtggctggatgtttgacggtaagcaggtaattaagcggatttatacaccggaagagttgcgccaacaggccgaagcgaaaaaaaggaaaacttctcgaagaggccgagaatgttattacgccactggcgcgggcggtaaaattgaacattgccacagatga

SEQ ID NO: 386497 - DNA, 279 bp, Salmonella enterica
atgattaaaagcttcagacataagggactgaacaagttctatcaaaaaggcgacagcagcggtttagaacaatcactggtcccgcgcctgaaaaacaggttatccatgctggatgcagcaaaaacaattgatttcctgaatcagcaagggtacgaccttcatgagcttaaaggcgatcgtgctgaaacgtggtccataaaagtttctggtaactggcgtctgacgtttatctttgaaaacggtgacgtctacgttctcaacctggaggattatcactaa

SEQ ID NO: 386498 - DNA, 285 bp, Salmonella enterica
atggctatgttcgatcctgcttaccctggcgaaatcattgccgaaattctggaagaccagggcgtaagtctgcgtcagtttgctgtagctatgaatattgcgccatcaaccgccagccgtattctgagcggtaaagtaagtatcacgccagaaatggcggttaagctggctatcgttcttggcggcgatgccgaaagctggcttaaccttcagaataactacagtctgtcgcaggcacgtaaaacagtggatataactcatgttcaccgtctgtcttttgcctga

SEQ ID NO: 386499 - DNA, 534 bp, Salmonella enterica
gtggtcccatctcttgcagaaggtgaaacttatagttatctttgggctcacaatgtggcaagatgtcgcaacgcagagagactggccctgcaattaaatagacaatggaatttgccagggccaataatagatagatttttaaacccttatgcataccaggctgccataaatgctttaggaattcaatctgacattatgagtaatcaatctgccataaatgatttagaaatgcaatctgaccaattacataaaaaaattgaagcatgtagctttccggttgatactggaagttttttatgtgcggaagaatatttaaaatgcccgataacgctggatattccaaaaaacggtgtttttgttaaggtatcatcacagtcagatgtttgttacttatttagcaaagaagaactccttaaattggtcgatcagaaattaggccaccctttgagtcgggagcctatccgtatggatatgatagttagaaagagagactgttattttaataccttgcgtgatacattcgcctcagtatag

SEQ ID NO: 386500 - DNA, 738 bp, Salmonella enterica
atgcctttaaatatcaagtcatgcctatgcacttcaagctcaagcattgattcctttgttgatacctcatccacctcaaaggattcaactcaaagtaaacatccctctggcggatatgtcacaaccaatacaaaagtgaaatcatcagaaatcaagccattagcttcatgcctgcatcccaaattaagaatgagtgctaaagaatatactcagtacaaacaactcatggattcaatggaaacctcgaataaacatgttcactttgatatggatgagagcgcctctcacaccaacgctttagatgacacggatactgatttcgttccatttgaagagtttgagcaatggcgactgaagcgattacaagctcaagtgagtataagctcgtccgattcgaatgctatcccagcagataagccattggaaggatcggcattatctgtagaacaggcaatctcagccaactatgatactccaggaaaacagacaatcccagccaactatgatattccaagaaaacaggtaatcccagccaattatgatattccaagaaaacagacaatcccagccaactatgatactccaagaaaacaggtaatcccagccaactatgatattccaagaaaacaggtaatcccagccaattatgatattccaagaaaacagacaatcccagccaactatgatactccaagaaaacagacaatcccagccaactatgatattccaagaaaatag

SEQ ID NO: 386501 - DNA, 549 bp, Salmonella enterica
atgacgtttaaaatgagcgaacaggcgcagacaattacgatttataatctgcgttccgatacaaacgaatttattggcacgggcgatgcgtatattccaccgcacaccggtttaccggcaaactgtactgatatcgtccctcctgaaattccggccagtcatattgctgtatttgacgctgaaaccgaaacgtggagtctgaaagaagaccatcgcggcgagacggctcccgatacaacaaccggtaatcaggtgtatacctccgaccccggcccgttgcctgaaaatgtcacatcagtttcaccagatggtgaataccagaaatgggatggtaaggcgtgggtaaaagacgaagcgcctgaaacagcagcgcagcttcatgatgcggaaggaaccaaaagccgtcttttgcaaatggcatctgaaaaaatcgcgccgttgcaggatgtagttgatcttggaattgcaacagatgatgagaaagcgcagctcgataaatggaaaaaaatacagggtgctggtaaaccgggtagacacctcaaatcctga

SEQ ID NO: 386502 - DNA, 132 bp, Salmonella enterica
atggccgtgagaatgaataccaggggaaacggcgtgaggatacgcatatgcacctgtatgaatggcatggttgtgcgtaccgatataaatatcatcaacctgatggcgggtactgatgcagccattacctga

SEQ ID NO: 386503 - DNA, 507 bp, Salmonella enterica
atgattaaattaattctttcggcacccgtgccggcaatggccgcggcttttgaactttattttcagaataccgaaaatgtggaaattatccgcggaccatttgaaactgtactggaatttgattgtatggtcagtgcggcgaactctttcggcctgatggatggcggcgtggatgccgctataacgacgtatttcgggacacaattacaggaacgggtacaacaacatatcctccgtgaatatctgggagaacagcccgttggcaccgcctttgttactggaacggggaacagtaaacatccgtggctggttcacgctccgacgatacgagttccgctgattattgacggcaccgacgcggtttataacgcaacaaggccgcgttactggcaatatttcagcacaataaaagcgccagggaagaccggaaaattaaatcagttgtattccctgccatgggggccgggtgtggtcaggtatccccggacagcatcgcccggcaaatga

SEQ ID NO: 386504 - DNA, 195 bp, Salmonella enterica
atggcgttaatagggatagccggatacgataataaagtatcgtctccggcctggttgacgggttcggacctgctaagcgcaacgccatcaggtcaaaaagagttaaaacccaagactatccagcagatcgtccacctgatcctggctggcgactacgccagctttcgaggcatccacctgcgggccgttgagtaa

SEQ ID NO: 386505 - DNA, 291 bp, Salmonella enterica
atgccagtgaaatataccaataatgcaaagttatttattaaatttattagtattgggattgtagggtgcgctttgctactcttttttattctatatgagcctgatatagcaatcgtaacgcactcttttccggaggagtcttcctctcctacttgtgatgcacgtaattttatcggttacgtcaatatagataattttgcagaatatataaaaatgacagaatcgacacgctatagtatgtattgtctgaaaaaaatgggctctggtcagtgggggatttatgcaaattaa

SEQ ID NO: 386506 - DNA, 954 bp, Salmonella enterica
atgatgacaaaaaaaacaccattaagaaaaaaatatattatgactgtacttttcttcataatatggtctttgttatctgcttgtagtcataaaactgaatacaatattccattagctcaatgtggtaggattattgcccatgaaatgggggccactgataaaggggtatttgatggacacgtattcaattttagggcatttgaagtttgtaaacccacgaatagcgcttttaatacctgtcctgcacaggtggctgcaatcagtaattacaattctattgttaaaaatgataaagaaaagacgataagatttttaaaaatgtcagtgcgaaccttatcggaccacacttgggttgtggctcataatgatagacaaagatcaaatgatacattctttttattgagtaaaataaattctaaaaaacttaatgaatatagaaaaaaagatccaactctggatgttttcagaatagaagactacgttgcaatggataaaaacaaagagttctgctttatgcttaacaccaagacaactccaaatgagaatttaatcgacaatattaataaattaaatattgctcagcgtacattgatagaatccgggagccaaaacgatgctaactggttaaatgctaagcaaaaatcagtatattttactaccagagttaattctcaatcatctcttgataatgcattgaaggacataaagagtaaaggatatagaaaactttattcaattgaagttgatcctaatcccaaaaatatagatgaaacaaaatccctggtacaacagattcataaacagggatttactgctgaagttgactccatgccctacgatccattacgagaatttattgtaactgcttgtcgtgttccattagaaacgatcggagcagatattaccatgacaagtcgaccagttgagtgtatagaaaaatttccgaataattaa

SEQ ID NO: 386507 - DNA, 375 bp, Salmonella enterica
atgcacagcagaagtcaaaaaatgataaaagttattctcatctccattattggcgtcttaagccttgctgccgcccgttactcccccgtcacagtagtcaatgcgcatccgaaagttattgcccgctgcctcgctgataatctgtacccgtatggatatatactggatcttcaggaaacagatattccaggcgttaataaggagtttaccgtgtattgtcgcaacggcgcacatattgcaggaacattctggattgccaactcaataacaacagcgccagaacgaacagtagggatgtatggcgttagtaaacaagcataccctatttttaataagtccctgcaacactgcgcaacccgcttatcggtgaaatga

SEQ ID NO: 386508 - DNA, 312 bp, Salmonella enterica
ttgagtacctgggaggagaagggcacccgtagcatgggcggtaaactagctctatgggttttttacaccttttgcggctacttcatctggacgatggcgcattgcgtctggctgatgtccgccatacaaactgagcctgttctcggcccaaacggtgagcctggtagtgcaaccgaaaagtggcttaacgcgctctcactgggcgtcgtctggcttattcttgggagtattgcctggtacactcggcctcgcaaaggcctgtcttcccccgctgacactacgcccgaaacgcgcagccaggcaaggatgtaa

SEQ ID NO: 386509 - DNA, 174 bp, Salmonella enterica
atgaatagagttaaacgtttatttatgatgatcattttagcaatctcagtctctattgtatcaatacctgcaatggcactggtttgtgaagataaagggggatcgcttggtgattgtgcactcgaatgtagtggtcttggcatattgatatttccttatatcttttgtatttaa

SEQ ID NO: 386510 - DNA, 393 bp, Salmonella enterica
atgagctgctttacaaccccggccattcttgaaatgcttggtcactacctttggcgtgtatatgaaccttttgaattttacctgagcgacgataacagcgacataatcagcgtgccggctggtttcgtcaccgaccttgccagcgtgccgcgcatcttctggacaattctcccgccagacggcaaatacgccaaagcggccattattcacgactggatgtacgacaacgcgctacgcacaaaaaaagaggcagacaaaatcttcctcgacgggatgacggtgctgggcgtgccgaagtggaaacgcataatcatgtactacgcggtaaggttattcggacgggggatgtacgggaaagagaaaaatactgtcattaatggtaatggaggatga

SEQ ID NO: 386511 - DNA, 729 bp, Salmonella enterica
atgacgtttaaaatgagtgataccccgcagacaattaagatttataacctgcgttcagatacaaacgaatttatcggtacgggcgaagcatatatcccgccgcacaccggattaccggcaaactgtaccgatattgcccctcctgatattccggccagtcatattgctgtatttgaccctgaaaccgaaacgtggagtctgaacgaagaccatcgcggcgaaacagtgtacgacacgcaaaccggcaaccctatttatatttcagaacccggcccgctaccggaaaacaccaccacacaggctcccacatcaccaatagataaatttgaaaacggtcagtgggtggctgaccttgcgaccgcactcggtcagaaatacgctgagattaatgcgtggcgtaatgcgcaggaaaacggtaactatccgttcacactgaatgatcaccactgggactgcggtaaagcgtcgcaggaccgactgtcgccagtaacggcggtggcaaaacagggagcgctaccgccaggattcttctggacggatacagataacatcgatgtgccaatgagcgcagacgaactgattaaactcgaagccgctatgcaacaaaacatggtactggtgggttttaaaatccacgaacgccagcggcagatgaaggacgaagtgaacagtctcaccaacgcacaggctgtactggattacgtggttggctggccggaaaaccgttaa

SEQ ID NO: 386512 - DNA, 417 bp, Salmonella enterica
atgaagaagcctgtctgtatgttctgcggcgcccctgccaccctgctttgtgacgggatcatcggctgggatgccgatgaggatgaacacggacacatgacaaaatgtcgtgccatgttcacctgcgatgcgcccgtgtgctggaactgcgctacatggcatggcaacatatttttcgatggaaaaatccggatgatggatacacgcgacctttgccccctgtgccagaagttacacgaagccggcgaacacatacgcgttgcagaccaccggaaaaactccgccctgccgcacccctgcctgactgaagagcaggctgacaggatacgcgccgcgcactgggctggatttacaggacggcgcgccggaaatgtaaaaattttaccgggtggcggtcagcagtccttcaaattttaa

SEQ ID NO: 386513 - DNA, 237 bp, Salmonella enterica
atgtatgagctgacattatcaccagacgaagttcgggagatcaccgggtataagcgttatacagaacagcagcaacagttgcgttgtcacggtatcccttttacaaccgggaaaagaaaccaaccgattgttcttcgcaaatacctgcggcagcctgtagaaccactgccaaaaatatcagaattcatctctcctgagccagatttcggagcactggacaatggcaagaccgcgtaa

SEQ ID NO: 386514 - DNA, 1023 bp, Salmonella enterica
atggcaagaccgcgtaaatatgtgaaagacaaccgattaccgcccaatgtttactacaataaatacagctatttctggaagcctaaaaataaccagacatgcatcacgctggccccaattaaaggtacaagcatggctgtattgtggcagaaatatgaggcgaaaaaagctgaacataataacgtaatgacggtatccagattatggcatctgtttcttgattcaccggcatttaccgaactggcgccacgaactcagaaagattatcaccagcaccagcgtaagctgctggctgtttttggaaaaatgcgcgcggatacagtgaaaactgaacacatcagaatttttatggacaaaagagggctggaaagtaagacacaggctaatcacgaactcgcgagccttagccgtgtttacggatggggatttgaacgtgggtatgtgaagggcaatccctgcaaaggggtacgtaaatttacttcgaagccacgtaccgtctacatcagcgatgagcaatatgcggcaatttatgacgaagccacgcctgcattacgcgttgcgatggaggtttcgtacctgtgcgctgcccggcctggagatgttcttgatctacgctggaatgaagtgatggacacggggatctatattgagcagaacaaaacgggcacaaaacaaattaaagaatggtctccccgtctgcgtgctgctattcaactggccagaaatgcctttggagagtcagggggttttgttattaaaggggctacgggaaacaaggcttcgccccggctggtaaatgaatggtggaacaaagccaaaaaatcagcggaatccagatgtgggactccgttcggatgcaccttccacgatatcaaagcaaaggccatttctgactatgaaggcagcagtcgtgataaacagcttttctccggccacaggaccgaaagccaagtgctgacttatgatcgaaaagtgaaaatcacaccatcactggatgtccctcttctggcagaaaaagcataa

SEQ ID NO: 386515 - DNA, 630 bp, Salmonella enterica
atgaaaattgatgtaaatgcggacttgggcgaaggttgcgacagcgacggcgaattattaacgctggtctcctccgccaatatcgcctgtggttttcacgccggtgatgcgcaaaccatgctgacctgtgtgcgcgaggccctgaaaaacggcgtggcgatcggtgcgcatcccagctttccggatcgggataattttgggcggacggcgatggttttgccgccggaaacggtatacgcccagacgctgtaccaaatcggcgcgctgggtgcgattgttcaggcgcaaggcggcgtgatgcgccatgtcaaaccgcacggtatgctctataaccaggcggcaaaagatccccgtctggcacaggcgattgcgaaagcggtacacgactatgatccgtcactgatattggtcgggctatcaggccgacggcagcctggtaccgcgcacggaacctggcgcgctgattcacgacgaaggacaagcgctggcgcaaacgctggatatggtgcagaccggaagagtgaaaagcgttactggcgtgtggacgactgtcacggcgcaaacggtgtgcattcatggcgacggcgagtatgcgcttgcgttcgcacgcaggttacgcggcgcgtttaa

SEQ ID NO: 386516 - DNA, 222 bp, Salmonella enterica
atgttgtttccacaatacgaagctgccgttgctggcgcagtgccgggccggcaatggcctgaggagaacaatctgatgacgcaagaatatgcgggaatgtccaccggacgggagcgcaccggtaagtgccggtacagtacgggcgcgaaaatatttttgctcctgctggcggtttccactgtcgcagcgttgtctggcctgtaccaggttctgacgtactga

SEQ ID NO: 386517 - DNA, 570 bp, Salmonella enterica
  misc_feature (528)..(537): n is a, c, g, or t
atgaaaaaaaaacttctttatgttactggctctcgagctgaatacggtattatgaaaagacttttaaaaagtctgaatgatgatccaaatattgatctatcaatcattgctacaggaatgcattgtgatccagaatatggttgtacatataaaactattgaacaagacggtttttcaattgaaaaactggttgatttaaaattagagaataagacaaatgctggtatcttgaagtctatgtcgatatgtcaggaggcattcggggagtattttcaggagcacaaatatgacgctgtcattatattaggagaccgctacgaaatattttcagtagcagtggcagcagctatgcataatctacctattattcatctccatggcggtgaaaaaacactcggcaattatgatgaatttattcggcattctatcacgaagatgagtcgcctacatttagtatcaacagatgaatatcgaagaagggttattcaacttggggaagaacctgaattcgtatttaatgttggtgcnnnnnnnnnnatagctttctgcttgatttgcctgataaagtag

SEQ ID NO: 386518 - DNA, 1266 bp, Salmonella enterica
atgtcattaaaaaaaattgctattattccagccagatctggctctaaaggattacctaataaaaatatattaatgttattggatcgtcccttaattgcttatactattgaagcggctattaattctgatgtgtttgacagagttgttgtttcaactgattcattagaatataaaagtattgcagaaaaatatggtgcagaagtaatcatgcgcccagaagcattatcatctgactcagcaacatcttttatggtaattgaggatgtattgaacaaatgtaaggggtatcattactttgttcttctacaaccaacgtctccgttccgcaattataagcatgttatgagtgcagttgaacaatttgagtacgctgataatgctaaatttttagtttctgttgttgaaagcaataaaagttcagccttaattaaaccaattgatgattcattatcattgagaaattttaattgcgattttagcaactatcgcaggcaaaatagaaaagagtattacccaaatggagcaatttttattggctatgttgctgattatttaagacgaaaacatttctttggggaaggaagtattgcctacattatgaataaagaggattctattgatatagatgatcaattagactttgaaatagccattctaattcaaaataaaaaaaataaaaaaacaatgctagataattctattattaaacgtatttctgataaaaaagatatttttaataatgctgcaccaataacactgattggacattcaatttttgattattgggatattgatagtttgtgtgggttgaaagttaacaatttaggtatcgcgggtattgatagcgaaaagtattatagatatatcttggagaaaaaattaattaccagtgttggtgattatgtagtattgatttcaggtacaaatgatattgtccttgaagggtggaaagctgaagatacaataatatggacaaaaaagctgatagatggtattaaatccataaatcctaatgtgactatttttctattagctgtaccgccagtacttggtagaattgagagaaataattgtattataaaagaattaaatttattaatgcagaactattttagcagtctagagtatgttgtttgggttcctttatctacatctttttatgatggattcggtaatttgaataaagaatatacttacgatggtttgcattttacaccgcaagcatacaaacagctagaaaatgatatttcgagtatcttaaaatga

SEQ ID NO: 386519 - DNA, 1041 bp, Salmonella enterica
atgtcgaaggtttatattgtagctgaaattggatgtaatcataatggggactttcaattagctcaagaaatggttaaagaagcaaaaaaagcaggtgttgatgctgtaaaatttcaaacatttaaagcagataaacttatttcaaaatatgcacccaaagctgaatatcagattaaagttacaggtaatgaagagtcgcaattagaaatgactcgcaaattagagttaccatacgatgaatttataaatctagaagaatatgcaaaacaacttggactagatgtgttctctacaccatttgattttgattcaatcgattttcttgcatcaagaaatcaaaaagtatggaagataccatcaggtgaattattaaatttgccttacttagaaaaaattgcgcaattacctattgcggataaaaagattgtattgtcaactggtatggcaacgattgaagagattaaattatcgttaaaggttttttctgataatggtatttctcctgaaaacataacaatattgcattgtaatacagaatatccaaccccttttgaagatgtaaatttaaatacaatttgtggatttaaaaaaatatttgaacagtataatattgggttttctgatcattcgcctggctattttgcaggtattgcatcagtgccctatgggatcacgtttatcgagaagcacttcactttagataaaaaccttgaaggtccagatcataaagcatcagttactccagatgaactaaaattattgtgcgaggggattcgtgcagtagaagtttcgcttggcagctatgttaaactagtaactgactcagaacggaaaaataaaatagtagctcgcaaatcaattgtcgctaaatgtgcaataaagaaaggtgaaatttttacaatagataatatcactacaaaacggcctggcaatggaattagcccaatgcattggtatggggtcctgggggagaaggctgagaaagattttgaagaggatcaactaattgtacactcatgctttagtgagcaagaggtttga

SEQ ID NO: 386520 - DNA, 627 bp, Salmonella enterica
atgaatatgaaacaaaaattaataattattggcgcaggtggttttgctaagactgtaatcgatagtttggatcataaaaaatatgaaattaagggatttatcgatacatttaagacaggtgagcatcagggttacccaattctgggtgaaaacttaaacataatatatgagccgaatcaatacgtctattttattgcaattggagatcctgagtgcagagctttatggatgaatttattagaagaaaagcaactttcaactattaatgtaattgacagaacatcaataatatcagagcgttctaagcttggcagttgtatttatgtcgggaaaatggccattattaattgtgattcagagctagaagatggtgtagttataaatacaagggcgctagtagagcatggtaattatatatcctattgtacaaatgtatctaccaatgttgttctaaatggtgatgtatctgtggggacaaaatcgtttattggcagttgtactgttgttaatgggcaacttaagataggtaattcatcaataattggttccggatctgtagtcattcgcgatattcctgacaatgttgtagtggcaggatctcccactaaatttatcagagcaaggtaa

SEQ ID NO: 386521 - DNA, 336 bp, Salmonella enterica
atgaatagtactccagctgtaagtgcgcaaacgccattactttctctttctggacggggtgatgaagaaaaaccaagagctgaaattgttgattttcacgtttacggcaatacacccaggtgcttaatgtgcctgggaagcactacattagttaccggtgttttaggtggggtatgctcagcagccgtctgcagtgtcagtagtggtagtacatatggtattgcattgacggttttaggcgcatcgattggtgtaggggggttgggtatgatgggattatgtgccggactataccttagcgtaaattccattagaacccgaccagcctatccatga

SEQ ID NO: 386522 - DNA, 2499 bp, Salmonella enterica
atggatagccaagagattaacgcgtcgcgtcgacgttttctgaccgctatgctggcggtgggcgccgccagcgcgcttgcgccgtccccgctgatcaaaaaagcgtgggctgccggcgaaaatcctgaacagtggattcagtccggctcgcattttggcgcttttgaagccaaagtgatgaatggcgagtgggttgcgacccggccattcaaacatgataaatatccctgcgatatgctcaacgccgttcgcgaggtggtgtataacccttcgcgcgttcgctatccgatggtccgacttgactggctgcgtcagcgtgaaaaatccgatcgtcgtcaacgaggtgataatcgttttgtgcgggtaagttgggatcgggcgttagatcttttctatgaggagctggagcgcgtacaaaaaacctacggctcttccggcgtgtttaccggccttgccgactggcaaatggtggggaaatatcataaggctggcggggcgatggatcgagggctggggctacatgggagctatgtgaccaccgttggcgactattctgcggccgcagcgcaggtgattctgccgcatgtcattggctcactggaagtttatgagcaacaaacctcgttgccgctggtgattgaacatagtcagactattgtgctgtggggctgtgatccgatcaaaaatttgcagatcgaatttctggtgcccgatcacgatgcgttcggctactgggcgcagataaaagaggcggtggcgcaaggaaaaatacgcgtgattagcgtcgatccggtgcgaagcaagacacaaaattatcttaattgcgagcagttaccgctgcgtccgcaaacggatgtcgccctgatgctgggggtagcgcataccctgtatgtcgagaaacgttacgatgtaaattttattaatgattacaccgtcggttttgagcagttcctgccttatttattgggaacgacggataagcaaccgaaagatgcgcagtgggcggcggaaatttgtggcctgagcgcggaaaacatccgggatttcgcccgcgtattgatcaatgggcgcacgcagtttatgggcggctggtgcgtgcagcggatgcatcacggcgaacagtatccgtggatgctggtagtgcttgccagtatggtcggacaaatcggtctgcccggcggcggcgttggatttggctggcactataacggcggcgggaccgtgacctccgcggggccagtactgtccgggcttggcagtattgctaatccgccagcggcaaaatataagccggattttcgcggcgcgtcagaacatattcccacctcgcgaattgtcgattgtctgctggcgccgggtaaaaaaatcgcctttaacggagagacattaatctacccggatatcaaaatggcgatttatagcgcggcgaatccgtttcatgcgcagcaggatcgcaaccgtatgatcaaggcctgggagaagctggaaacggtggtggtgctggaccatcagtggactgcctcctgccgtttcgccgacatcgtattgcctgtcactacgcgctttgaacgtaatgatattgaacagttcggcacgcattcgaataaaggtctgatggcgttgcatcaggtggtcaaaccgcaattcgaggcaaggcatgattttgatattttcgccgggttgtgcaaacgcttcgatcgcgaggcgacgtaccgcgaaaatcgcgatgaaatgcagtggatcaacgctatttatgatgaaggggtgaaaaccggggcggcgctgggcgttactctgccggatttcgacagcttctggcagggcgagggctacattgaatatccggcggggcagccatgggtgcgtcatagcgagtttcgcgagcagcctgacctgaacccgctcggaacgccttcgggattaatcgaaatcttcagtaagacgatagccggattcggctacgcggattgtcccgggcatcccgtctggatggaaccgttcgaacgcagccacagcaaagcgacaacaaaatatccgttacatctgcaatcctgccatccggataaacggctgcattcgcaactgtgctccagcgacgcgtttcgcaaaacgtacgccgtcgcagggcgagagccgctttatatgtgtgagcaagatgcccgggcgcgcgggctgaaagccggcgatatcgcgcgcgtctttaatgatcgcggccaggcgctggcaggcgtggtcattagcgccgattatgtccccggcgtcattcgtattcacgagggtgcctggtattctccgcagaaaggcggcaaggcgggaacgttgtgtacctacggcgatcccaatgttctgagcgcggacgtcgctacgtcgcaactggcgcaggggccatctgcccacacggttttggtggaggtggaacgttatcagccgcaggcgcctgacgtgacgggattcggcggtccggatacggtaaaagaggagggcgaaaatgcggcatag

SEQ ID NO: 386523 - DNA, 651 bp, Salmonella enterica
atgctggatctatttactgatgaagcgccctggcaagaacccctggcgcctggcgcgatggtgttgcgtcgctttgcttttcgcgcggcgcagtcgctgttagacgatatcgggtttgtcgccagtcagtctccgtttcgtcagatggtgacgccgggcggctacaccatgtcggtggcgatgaccaactgcggcgcgttggggtggaccaccgatcgtcacggttattgttatgccgtgcgcgatccgttgaccgataaaccctggcctgcgctgccgttatcgtttgccagcgtatgtcgtcaggcggcaatggcggcagggtatgagagcttccaaccggacgcctgcttgatcaatcgctacgcgaccggcgcaaagctgtcgctgcatcaggataaagacgagccggatctgcgcgcgcctatcgtctctgtttcattgggggtgccggcggtttttcagtttggcggcctgcgtcgcagcgatccgctccagcggatcttactggagcatggcgatatcgtagcctggggcggcgagtcccggctgttttatcatggtatccagccgcttaaagcgggctttcatcccatgaccggtgaatttcgttacaatctcacctttcgtcaggcgactgaaaaagaataa

SEQ ID NO: 386524 - DNA, 1059 bp, Salmonella enterica
atgaaaaaagcgttacttaccgatgatgaatgctggctgcgggtgcaggcgcgcgatgccagcgcggatgggcgcttcgtttttgcggtgcgaaccacgggcgttttttgccgtccttcttgtcgctcgaagcgggcgttacgtaaaaatgttcgcttttttgccaacgcgcagcaggcgctggacgccgggtttcgcccctgcaagcgctgtcagccggataatgcgcgcgcgcagcaacggcggttggataagattgcctgcgcctgccgtttacttgagcaggagacgccggtgacgctggagtccctggcgcaggcggtggcgatgagtccatttcatctacaccgtctgtttaaagcgagcaccggaatgacgccgaaagggtggcagcaggcgtggcgcgcccgtcggctgcgtgaggcgttggcgaaaggagagcagatcacggcggctatttaccgcgccggcttcccggatagcagtagctactaccgtcatgccgaccagacgctgggcatgacggcaaaacagtttcgcaaaggtggcgataatgtctccgttcgttatgcgctgacggattgggtttacgggcggtgcctggtggcggagagcgagcgggggatttgcgcgattctccccggtgatagcgatgatgcgctactggctgaattacacacccttttcccggcggcccgccacgaacctgccgacgcgccttttcagcaacgggtgcggcaggttgtcgcggctatcaacacacgcgatgcgctgctctcattgccgctggatatccagggaaccgcgtttcaacagcaggtctggcaagcgttacgcgcgattccctgcggtgaaacggtgagctatcaacagcttgccgcgactatcggcaaacccacggcagcacgcgcggtcgccagcgcgtgcggcgcgaataaactggcgatggtgatcccgtgtcatcgggtcgtgcgccgtgatggcgcgctctccggttaccgctggggtgtgcgtcgaaaagcgcagctattaaagcgagaagcgccaaaagaggagtag

SEQ ID NO: 386525 - DNA, 1029 bp, Salmonella enterica
atgactatgagtgtaaattcactttaccgattgagcataccgcaatttgaaagtgtatattcagaagaagtgagcgatgaagtacttgcattgttgattaacgaagtggaaaacggtaatcagcactgtattgatctgttatgcaatcttgcgctacgcaaggatgagttgggcagtaaagtcgagaaaactctttttgatctctttagcggaagaaaaccgggacaatctggtatagacaaaaaaatcaatcaggcttgtctgatattatatcagctcgccaataatgcgctaactaaaaataatactgactgggaaaaactacataccgcgtccagattactttatatggctggttccgcaacaaccgacctttctaaaaaattagaaatagcgcataaagttatcggcgatcagtatgctcagacagatcaagaacaggttggcgttgaaaacctatggtgtcaagcgcgtatgttgtcgtcggatgaactggcgacagcaacgcaaaatctggtgcaagaatcgtcctctctctcgatgaattacccctttgggcttattcatcccaccactggagaaaatgtattaaacgctcaactacttacaaaggttgctcactcaggattagctgacaacgaagctttcctgatacatacaaaagaccactggcttctatgttttttttataagtttgcagaaaaaataaaatgccttatatttaacagccatcatgctttggagcaaaatactaaacaagcattcatggaggcagcgaaaattgcaggtgtattagaagaagacgatgttgcctttattgaaaaggatttacagaataatgtacccaacggctgtggtgtattttgttaccatgccttgcaacacttatcgactaccggcccaagcgatccggttactgcgctgcaagcatattgcgaaaatttcttaacgcttccggttgaggagcaggtattatttaatatccatacccgtcgacaaatatatgagtacagtctcacatcatcgtga

SEQ ID NO: 386526 - DNA, 246 bp, Salmonella enterica
atgcccttactggcgccgctcggcgatctggtcggcgttaaccgtcaggtgactgttctggccttccagtttggcgatggcttcagccatattatctatccgacatcagcctcgctgatggccacgctgggcgtgtgccgggtcgatttccgcaactggcttaacgtgggggcgtcgctgctgggactgctgtttattatgtccagcgtagtcgtcattggcgcgcagatgatgggctatcattga

SEQ ID NO: 386527 - DNA, 1392 bp, Salmonella enterica
atgtttatccttgaaacgctgaattttgttgttgatattttaaaagtgccatcggtgcttgtagggttaattgctctgattggtctggtggcgcagaaaaaagcgttttccgatgtggtaaaaggcacgattaaaaccattttaggttttattgtgcttggcggcggtgcaaccgtactggtggggtcattaaacccgctagggggtatgtttgaacacgcttttaatattcagggcattattcctaataatgaagcgatagtctcaatcgcgctggagaaatatggcgcgtccacggcgttaattatggcatttggtatggtggccaatattgtcgtggcgcgctttacgcgtcttaaatatatctttttgaccgggcatcacaccttttacatggcctgtatgattggcgtaatcctgaccgtggcggggtttgagggcgtagggctggtattcaccggatcgttgatcctggggctggtgatggccttcttcccggcgttggcccaacgctatatgaggcggattaccggcaccgatgacattgcgtttggtcactttggcaccctgggatatgtgctttccggctggattggcagcctgtgtggtaaaggctcccgctccacggaagagatgaacctgccgaaaaacctcagttttttacgcgacagttctatctcgatttcgctgaccatgatgattatctatctgatcatggcagtcagcgcaggacgtgactatgtcgaagcgacgtttagcggcgggcaaaactatctggtgtacgccatcatcatggcaatcaccttcgccgccggcgtattcatcattctgcaaggcgtccgtctgattctggcggaaattgttccggcctttaccggcttttcagaaaaactggtgccaaacgcgcgtccggcgctggactgtccggtggtgtatccctatgcccctaatgcggtgctgattggctttctgttcagcttcctcggcgggttggtggggttgttcctgctcggacagatgaagcttgtgctgatcctgcctggcgttgtgccgcacttctttaccggcgcgaccgcaggcgtctttggcaatgctaccggcggtcgccgcggggcgatgatcggcgcatttgctaatggtctattaatcactttcctgccagtgctgttattgccggttctcggcgcgatcggtttcgccaataccacgttctcggatgctgactttggcgcaatcggtattttgctgggcaacctggcgcgttatctgtcgccgatggctatcacggggctggtggtggcgctattcgcgctactggtggcgtacaacgtgttggccaaaaacaaaacagcgaatgccgaagcgcaggaaaatagcggagcgaaagaatga

SEQ ID NO: 386528 - DNA, 510 bp, Salmonella enterica
atgactatgcgccgtatattagccatgactgccgcgctttctcttggcggctgcattactgtgtatggtccggttaaaacgggagggcagcaacagcaggacagccagtccgggcagcagccagggatgagcgaacagatatcaacctcattcatcggtaaccgcaaaccggctgagttgctgaatgccgtggagttgtatttcagggagaaggccatcacagccagtgttaacgaccctaccacagggattatcgccggtaccggagaggacccggaactgagctcgttgtatctggactgctcactgttaccacagacacaaaatatccaggagcattaccgtatcgtcgcgcaggtctggagtgccggtgaaggtagtaatgtttcgatcatggtgacaggcacagccggcctggatactgccgacggtaacgataaggtgaagccagtggagtgtaagagcaccggaatatttgagaaggatttgctggaaagattacgtaagtag

SEQ ID NO: 386529 - DNA, 939 bp, Salmonella enterica
atgaaaaaacatgttattgcaatgatgatgatcgccgtattttctgagtcggcttatgcggagtctacttcatttattccagacttctctcctgatagtgtcacgacatccctttccgccggggtattaaatggtaaatccagggagctggtttatgataccgacaccgggcggaagattagtcaactggactggaaaataaaaaatgtcgccattttacagggggatttatcgtgggaaccctattcgtttatgacgttgaatgcccgcggctggacttctttggcgccggggtcgggttatctggttgaccgcgactggatgaacagcgagcagtcaggttggaccgatcgctcaatccatcctgacaccagcgtcaatcatgccaatgaatatgatttgaacgtaaaaggctggttattgcagggcgataactacaaggccggcgtaacagcgggctatcagcaaacccgttttagctggacagcaagaggcgggtcttatatttatgataatggccggtatattggtaattttcctcgtggcgagcgtggcataggttatagccagcgtttcgaaatgccctatatagggctggcaggacattatcgtatcaatgattttgagtgtaatgtcctgtttaaatacagcgattgggtacatgcgcatgataatgacgaacactatatgcggaaacttactttccgtgaaaaaacggaaaactcgcgatattatggcgcctctattaacgccggatattatattaccagtaatgcaaaaatctttgcggaatttgcttacagtaaatatgaagaaggtaaggggggtacgcaaataatagataaaaccagcggtgatacggcgtattttggtggcgatgccgcaggtattgctaataataactatacagttactgcggggcttcagtaccgcttctag

SEQ ID NO: 386530 - DNA, 933 bp, Salmonella enterica
atgctgatgttacatcggggcgaccgtgtcagcgacgttgccagaacgctctgctgtgcccgttcctccgtcggacgctggattaactggttcacgctgtcgggtgttgcaggactgaaatcattacctgccggacgaacccgtcgctggtcttttgagcatatccgcacgttattacgtgagctggtaaaacatgctcccggcgattttagctaccagcgctcacgctggagtacagaacgtctggcaataaaaattaatgagataaccggctgccagttacatgccggaatcgttcgccgcgggttgccgtctgcggggtttgtgtggcgaagggccgcgccaactctgcgtatccgtgacccgaataaggacgaaaagatggcggcaatccacaaagcactggacgaatgcagggcagagcatccggtattttatgaagatgaggtggatatccatcttaatcccagaatcggtgcggactggcagctacgcggacagcaaaaacgcgtggcgacgccgggacagaacgaaaaatactatctggccggagcactgcactgcggaacgggcaaagtcagctacgtgggcggcaacagcaaaagtccggcgctgttcgtcagcctgctgaagcggcttaaagcgacgtaccggcgggcgaaaaccatcacgctgatcgtggacaactacattatccacaaaagccgggaaacagagcgctggctgaaggagaacccgaagttcagggtcatttatcagccggtttactcgccacggatgaatcatgtggaacggctatggcaggcacttcacgacacaataacgcgcaatcatcagtgccgctcaatgtggcaactgttgaaaaaagttcgccattttatggaaatcgtcagcccattccccggaggcaaacatgggctggcaaaagtgtag

SEQ ID NO: 386531 - DNA, 732 bp, Salmonella enterica
atgcccggactgatactttttattattctggaactgttgtctttttctgccagtgccagcattgttattatggggactagggtagtatatccggagcagaaaaaaagtattaatgttcagctccataatggtgaaaattcgccgtcattagttcaggtatggctcgatacaggagatgcgtcagcttctccggactctgtcagggttccttttgttatcacccctcccgtctccagagtagaaccgggaacagggcagactttaagaattatgtataccggagaacctcttcccagggacagggagtcgatattttatttgaatgtccttgatattcctcccaggcctgaattcggggaaaaaaaggcggatgtcggtaatggaaattatctccagcttgctgttcgcagtcgtattaaactttttttccggcctgatactttaaatcagtctgtcacggatgccgccaggcaggtcacatggtcactgataaacagaggggatcagttcttccttagagctgataatcagacaccttattttattacctataaaaaaatcgtacttaaatctgacaaggatattcagacattagctcagccggggatggtttcaccttattctgtaaaagagttcaccatgccggggaaaaagctttatggtgccagcgtcatctggactgtcattaatgattacggtggctatgaggaaggtaagtcatcaattaagtaa

SEQ ID NO: 386532 - DNA, 453 bp, Salmonella enterica
atgaagaaaacactcattgcactattcctgtcattctcaggcttagccacatccgcgtatgcgcaggatgaactaaccatcagtaaattggcggtggatcaggatacaaaggcggagtttcagaaaatggcggctaatcagcatttacccaaatgggtaactcagggggggactgactctcagggccagaaagtcaacatcgcaggtaaccaatacctggtgttgacatcatgcaaaccgcatgattgtagttcacaacggatcgccgtgctttacgctacggcaacaaaaaaaatagcgggtgttttctcctcggtagaggagaaaacaggtaatgaaaaactacagtggttaaatttacctgatgatttgtcgattgatgggaagacagtcctgtttgctgcactgacaggcagccttgacaatcaccctgatagtttcaattttaaatag

SEQ ID NO: 386533 - DNA, 744 bp, Salmonella enterica
atgggcgttccgctgcgctgtccggattacacctgtgtcagcaggcgggcaaagtcggtcaacgtcagttttaaaacggtcacccggggtgaaatcgcgcatctggtgattgattccaccgggctgaaggtctttggtgaaggcgaatggaaagtcaaaaaacatggcaaagaacgccgccgtatctggcggaagctgcatctggccgttgacagcaaaacacatgaaatcatctgcgctgacctgacgcttaacaacattacagactcagaggctttccccgggttaatccggcagacctaccggaaaatcaggtcagccgccgccgatggcgcttatgacacccggttatgtcacgatgaactgcgccgtaagaaaatcagcgtcctcattcctccccgaaagggcgcggattactggcctggtgagtatgcggaccgcaaccgtgccgttgctaatcagcggccgagcggaagcaatgcacggtggaaatggacaacggaatataaccgtcgctctatagcggaaacggccatgtatcgggtaaaacagctgttcggaggttcactgacacttcgagactacaatggtcaggttgcagaggctctggtcatggggcgtgcgctgaacaaaatgatgaaggcaggtatgccagaaagcgtgcgtccagctacagggacgttcgcacggaatcttatttattcaacaaagccgacgggaactcttatattggcgtttttttaa

SEQ ID NO: 386534 - DNA, 1176 bp, Salmonella enterica
atgtctgtaaaaaatctgattgaaacactaaacgcgggtgtaagtgagtttatcgatataagaagaagtatacatacacacccggagctgggatttgaagagcgttcaaccagtgcgttagtggctggaaaactgaaaggctggggttatgaggttcattgtggtctggccaaaactggcgtggtcggtacactacgttgtggaactgggaataaaacgatcgggctgcgtgcagaccttgatgctttgcccattgtggaacaaagcgggaaaccgtggagcagtcaggaacacgggactttccatggatgcggacatgacggtcatacggccatgttactttgtgccgcaaaatatttagccgatactcgctgttttaacggggttctgcatgtgattttccagcctgctgaagaaacattatatggcggccggcagatgattgatgatggcctctttaagatgttcccgtgtgataagatttttggtcttcataatatgcccggtatgaaggctgggcatttttattgccggcagggtcccatgatggcctcttctgacaccatccatattgagattgcgggcgtcggtgcgcatggcgcaatgccagaaaagggtatcgacgccacgctggttgcctgccatatcggggttgctctacagagcatcgtttcccgtaatgtttcgcccctggaacaggcggtggtgactattggctgtattcagtcgggagaggcgcctaatgtagtcaacgccgctgcactgatgaaactgagtgtccgcgcacttcataaagaaacgagagagcttgtagtgaggcgaatccaggaggttgcggttgcacaggcggcatcctttggcgccagagcggaggtgaagataataaacagtagtcccgttctggttaacggtgatgaagcgacggcgtttgccatgaaaaccgcatcagccctggcagggaacgataaagtacattcggtcgatccccaaatggggagtgaggattttgcctttatgctggaagctcatcctgacggctgttatatgctactgggtaatggtgatgaacctggttactgtaacctgcacaatccggtttatgattttaacgatgaaataatttctgtcggagcggcttactgggtttcactggtcaatgcctatttatatcagtaa

SEQ ID NO: 386535 - DNA, 624 bp, Salmonella enterica
atgtcagtcgtgcttcattttattgatattttggggacgtttatcttcgcgttaagtggcgctgtcgccggggttaaaaaaggttttgatgtattcggcgtctttgccattgccgtggtgaccgccatcggaggtggcgtaatcagggatatctgtctgtccgccacaccgccggccgggctggccagcggtgaatattttctggtgatagttctggcagtcctctgcgtgtccttcttccagaaagcgatattaacgttctcaaagcccggtacattttttgatgccattggacttggtttttttgcagccttcggggccagtaaaacatggcatatgacaggtagttttcagttgtcggttattctggggtgtatcagcgctgtggggggcggatgtatgagggatgtattgcttggaaaatccccgttaatatttacagccgaaatttatgccagtgcagcaatagtgggagcggtgatagaagtacttggtgtttccggaaagatatcgccggttttaagtttatggctcgctattatcacctgcacaaccataagaatgctggcaataaaatacaggataaggataccgcctataaaaaatagctattttcaagattaa

SEQ ID NO: 386536 - DNA, 522 bp, Salmonella enterica
gtggcaaagcagaagttcagaatcaccaactggcacacctataacaaagctctaatcaaccgtggcgccatgactttcttgctggatgacgaagccattaagtcgtggtacgacgcatccccgccttcagcacacggaagacctcagcgctattctgaccttgccatcactaccgttctggtgattaaacgcgtattcgggctgaccctgcgggctgcacagggcttcattgattccattttcaccctgatgggcgttccgctgcgctgtccggattacacctgtgtcagcaggcgggcaaagtcggtcaacgtcagttttaaaacagtcccccggggtgaaatcgcgcatctggtgattgattccaccgggctgaaggtctttggtgaaggcgaatggaaagtcaaaaaacatggcaaagaacgccgccgtatctggcggaagctgcatctggccgttgacagcaaaacacatgaaatcatctgcgctgacctgtcgcttaaggggtcagtttggatatag

SEQ ID NO: 386537 - DNA, 306 bp, Salmonella enterica
atgaccttttctgtgcaggaaacgcttttttctttactgcggctaaacggaatttcaggccatgaaagcagtattgcaaacgttatgcagcacgcgtttgaacagcaggccaaagatgtctggcgggatcgcctgggcaatgtcgtcgcccgttatggcagcgacaaatccgacgctcttcgcctgatgatttttgcgcatatgggggtcagtttggagatcggaaatttttgtacgttaagcgcattatttaaccaatcgtggtatgtaagggattggtttttcgtcagctattatcgcttttaa

SEQ ID NO: 386538 - DNA, 126 bp, Salmonella enterica
atgcggcgcgaaatctggaaacgtttactgtggatggtagtcctgtggggcggcagcgttctggcgctggccgccgtaggaatgttctttcgtctgctaatgacagccgcaggttttacgtcctga

SEQ ID NO: 386539 - DNA, 1011 bp, Salmonella enterica
atgggtatggatttatcagttatctggtttgttatcatcgtattcgcaacgctgatgtacatcgtgatggatggctttgatttagggatcggtattttgtttcccatggtccaaaacgctgacgatcgcgacgtaatggttaatagcgtagcgccggtgtgggacggtaatgaaacctggttagtattaggcggcgcggggttgttcggcgcttttccactggcttatgcggtgattatagatgctctgacgatcccgctaacactgatgcttattgggcttatttttcgcggcgtggcgtttgagttccgttttaaagcgacgccaacgcaccggccattctgggataaagcctttttattcggttcactcctcgctacatttacacaggggatcgttgttggcgcggtgattaatggttttaccgttaccgggcgggcctatagcggtggaccgtttgactggttcacacccttcactctgttttgcggcatgggtttagtagtggcttatgctttgctgggcgctacgtggctggtgatgaaaagcgaaaatccgttacaggacaaaatgcgtaacctcgcgaaaaaattactgatcgccctgctgctgacaatcaccatcatcagcctgtggacaccgcttacgcaccacgctattgctgaacgttggtttaccctgccgaacttatggtttctgctgccggttccgttgttcgtcgccctgttcagtttaggagcgtggcgctctttgaaccaacagcattaccatgcgctgccattcgtattaacgttaggtttgatttttttaggctttagtggattaggtatcagcatctggccgcatattattccgccgtccattacactgtggcaggccgcagcgcccacgcaaagccagggatttatgctggttggcgcactgctgattattcctattattctggtttataccttctggagttattacgttttccgcgggaaggttcaacatggcgagggttatcactga

SEQ ID NO: 386540 - DNA, 1404 bp, Salmonella enterica
atgtttgctctcgatgcgtttcatctggcgaggattcagtttgcgtttacggtttccttccatatcatctttcccgccattactatcggcctcgccagctatctggcggtacttgaagggctttggctcaaaacccaaaacccaacctggcgctcactgtaccatttctggtcgaaaatttttgccgttaactttggtatgggcgtcgtatccggactggttatggcctaccagtttggcacgaactggagcggtttctctgagtttgccggcagtattacgggccccctgcttacctatgaagtcctgaccgcttttttccttgaagccggtttcctcggcgtcatgctgtttggctggaaccgggtcggtcccggtttgcattttttctctacctgtatggttgcgctcggcacgctcatgtctacgttctggatattggcgtcaaatagctggatgcagacgccgcaaggctatgaaatcgtcaacggtcaggtcgtaccggtggattggtttgctgttatttttaacccgtcattcccctatcgcttgttacatatgacgattgccgcttttctcagtagcgccctgtttgtaggcgcctctgcagcctggcatcttttacgcggcgccaatacacctgccattcgcgcgatgttttcaatggcgctgtggatgacattacttgtcgcgcccctacaagcaatgattggcgatatgcatggtctcaatacactcaagcatcaaccagcgaaaatcgccgctattgaaggtcactgggaaaatcatcccggagaaccaacgccgctttttctttttggctggccagatatggaacaggagcaaacccgatatgggctggcgatccccgcgctgggaagccttatcctgacgcacagcctggataaacaggtacctgcgctaaaagaattcccgaaagaagatcgccctaactccacgatggtgttctggtcttttcgcattatggcggggctggggatgttaatgctacttcttggcattctggccgtatggttgcgttacaaacaacgtctgtatacttctcgccctttcctgcgctttgctttgtggatggggccctccggattaatcgcaattcttgctggttgggttacgactgaagtcgggcgtcaaccctgggtcgtctatggcctgcagcgcacggcagatgccgtatctgctcacggtgatctgcatatgagcatcagcttgctgacctttttcgtggtttacagcgccgtctttggcctcggatacagttacatgatccgtctaatccgaaaaggcccggaagaaaatgacggtgctattccgccaacgggtacgccagcgcgaccgctttctgctgcaattatcgatgcacaacatgaaggagatcgctaa

SEQ ID NO: 386541 - DNA, 978 bp, Salmonella enterica
atgccaattactatcgggagcgatcttttaaagagcgtgatgctttctcaaaacaccaccacacaacgatcattttttactttattatgggagaaaattaaagattttttctgcaatacgcaaagaacaactgcccatgaatatatagcagagttatgcgatcttacctctcctcctgacgcgcaacgtttattagatatattttgtgcattatatgaattatcctcaccattatgcaaagaaacatttcattttcagcactataaagacgctgagtatcaatatacgaatctatatataaaagatggctcagaaattccattgtgtattgtggtacgtcaggaccattattattataatatactgggtgaaacagtgatatgtattgatactccccctgaaactctgaagacataccctgatattagtataaagacaggcacttatgtgtgtgaaccactatgttgtttgtttcctgaacggctacagatctcactccccggcgatatcacattttcaattaatttaaatgagataaaagagacacttatcgacatgacaagaaatggaactttatatgactggaaggaacaggaaagaaaagccgctatatccgccagaattaatactggcattgcacgggcaggtgcgccatatatggataaagccaccaaagatacaatagtctcaaagactatttcagctaccaacctaaaaaatgtaatatttgatgaaacctatatacaaagctcaattacgcaaatggcctattcatgtctgtttaagaatgctatattaatgaatatgcttgcagagcaatcctgtcataacctactatgtttaaacgaacttactgaatatgtagcacaacaaattcataactgtcttttttctgaaaacttatcttcactcgttgaaatagcagaaatcgagactcaccatcagcttttactaaaccataaagatgatcattattga

SEQ ID NO: 386542 - DNA, 378 bp, Salmonella enterica
atgaagaaattcaatcgtgaagttcatgaaaagactacgtcctggagcattctacagtcagaacgcctaaaaaaatgtggacgactattattactgttactttatcgtttcattatcgggtgggcattttttcagctgctcgtcattattaccgcggggatattgttattgggggttttattgtttcaccctgtaatatttgtacagactatagctattacagagaagctaaatcatgcctcgattgacttatggaatatccttaagttatgcctactgcattacggtgtcattgcaggatttatttttatgctggggtgtgcgataagtaaaagtatacgacaagctcagcgcctgtccagaaaatttggggcgtaa

SEQ ID NO: 386543 - DNA, 744 bp, Salmonella enterica
atgtataaaagctatctgcgaagtataaaggggtatgatatgccatatacatcactctcaacctatgccagagctatatcaggaaatgcgctgcctcatattgcagcaggaaattatgaaaataaattatctacaaaaatcatgaaagggttcttgtgggtattcacagcaggaattgcgtacggatttacgagactaattgaacattattgcaatgttactcctaagattgcggagttctgtgccaatgccgggactcttcatgatcaccttgctgatgctgtacgtgatgggctatttactatagatattgagcttactgatggtaaaatattaatattcgaacaagtctcgctgattgctggaagaaagtcagtcgtcagaataacggatggggaaaacactgctgaggttgagggaagttttgaagatatctgtatgaggctggaagagggcttttttgaagcgccagcgtactatgactatgatattgataaagaacataaaaccgttagagaacgaatagctgaatataattcattaccacaagcattaggcgccattcctggcttaaataagtataccattcaggcaacgagcatggaggacgcgaaagggcgacgggcggccgacacgaaagctcgctaccataggtactggggtgattctttgcctaacgtttcgtcaagcacccgcataaaatgggctggggagcccagcgagcagcctactgagcggaagtaa

SEQ ID NO: 386544 - DNA, 132 bp, Salmonella enterica
atggccgtcgaatcctacggcgacgccattttatctgcagcgcgtgaaacgggtctggatgaagagaatttcccgccagaaatgccatggacgctcgctgatgcgctgcgtgaggatttcatgcctgaatga

SEQ ID NO: 386545 - DNA, 1263 bp, Salmonella enterica
gtgctcaatgccgacgatcatttcacatttgctgtcgtcctgaagtaccttgtgggtgtgggcaatatcgccatgctgattgatcagcgtattactggcgtagcaccacaaaaatttgatcggcacgtcgagcttgtcttttccccgcacgccgtcgcgtgtggcggtcatttccgcgccatgatcgatagcgtcggtccaggtaaagaccgaaatctgggtttttaccgggttctccagcatagaaaaccattcgacgcccagatcccaggtgccttcgcgcacgccggaattaccgccatttatgccgacgttaccggtgagtacagacaacatggcgattgcgcgtgcggtctgctccccgttagagtggcgttgcggtccccagccctggcaaatgtaagccggtttcgccgagccgatttcccgcgccagttgaatgattttttccgccggaatactggtaatctgcgcggcccattgcggcgttttcgcgataccgtcttcgccctgacccaaaatataggctttatagtgcgcgttacgcggggccgaggcgggcagagtggtttcgtcgtagccgatgcagtatttatccagaaacggtttatcaataagatcttcggtaatcagcacccagccgattgccgccgccagcgcgccatcggtacctgggcgaatcggcagccactcgtcttcgcggccggcggcagtatcgttataacgcgggtcaatgacgatcatccgggcgttggagcgttcgcgcgcctgttcgacatagtatgtcacgccgccgccgctcatacgtgtttccgcggggttattgccaaacatcaccaccagttttgtattggcgatatcatccggactgttgccgtcgttgccgccgaacatatagctcatggccgcgctgatttgggcggtgctgtagctaccgtaacggctgagatagccgccgcaggcgttcatcaggcggtacggcacgttagagtttgtaatattgccgccgtccacgccggtaccgtagagcacgtgtaccgcttcgttgccgtagtccttgaggatacgtttcaggttatcgccgatcgtatccaacgcttcatcccaactgatacgctcgaatttaccttctccacgtttaccaacgcgtttcatcggatatttcaggcgatcgggatgattcatccggcgacgaatagaacgaccgcgcaggcaggcgcgtacctgatggttgccatattcatcgttgcccgtggtatctga

SEQ ID NO: 386546 - DNA, 438 bp, Salmonella enterica
atggataatctcatcttttttcagctcccatgtgtcggcgagagtggccagacgctcggaatagatttcgattttaccggacggcgttttcaaaggattggcggcaggatcttcgcggaaggcgcggaaagcgacgtagtgctcctccgggcattttttcttgaaaatccctgtctgtttcatctcttcgtaatccggcatttccgggttacgcgctttggtttttgcgtgcaggtatttgacccactcatgctgcgtgcggccttctgtgaaggtctggtatacgtccggaccaagccgtttagccacttcactgagcgtccagtaaatgggctttctttcaaatttcggcgaggtggcgggctgaccaagaatgacatagcccatattgcctgcggattcgtgggagatcagatcttcctgctcggttggcattaa

SEQ ID NO: 386547 - DNA, 948 bp, Salmonella enterica
atggaaagtctgattgccagattaaaaaccgtaatggcgcggcggggatattcccagtctcatatcgccagagaagtgggtcgcagtgttgcggttatcaatcagtttttacaggggaaatataaaggcgatgtggcagggcttgcgctcaaaattactgattttattcagagtgacgatgaccgcattgctgcgagatttaaaaaccctgtatttgcggaaacctcaatcactcgcgaagctgttcgtgttatcgatttcgcgcgtaaatacggaactatttgtgccatcactggcgtggccggcattggcaaatcaatgatccttgaggaatacgcccgttctcatcctaatgtgcttctgctggaagtgggtgcaggtttcactccgcgcgcctttatgaaagccctgttaaagctgattaaaccgacagagaactaccaggggacaacggcggcactgactgagcggtgtaccagtgaactggcgtccgccagacgcctgatactcattgatgaggcggaattgctgccgtatcagacgctggaaacactacggcgtctgtacgacacaacaagcattggtgtcgttctcaccggaatgccgaaattgaccggtaacctgctgggtgaaaacggcacccatgcacagcttcacagtcgtgttgcccgttatcttgagctgcctgccgggctggggcttgacgattttcgcattattgcaaaacagatgatgccggaagcggaagacgaggcgatatgtaatttactgtttgaatattcaggcggtaacgggcgtcgcatgtcaaatattgtgcgcggtgtatatgaggaaagtgaacggcgggatatgcctgtcagtcttgggttaatgaaaatctgtacagaatccctgatggcttcacagcagaaaaagaataaccacaaggcgatagcgaatatcagataa

SEQ ID NO: 386548 - DNA, 2037 bp, Salmonella enterica
atgtatgtaaccgcgaatgatattgtgggccttcctggttttcccgggacaattcagggggcaagaaaggcccttagagtttgggctggcaagtctgagggggagaaacgctcccgcgccggttcaagaacaattgaataccacatcgactgcctgcccgctgaagcgcagaaggtgctgcgggatcgtctggctaagcagttgcttgatgatgcttctgtgcccgccgtggttgacggtaaggccagtaaaaatcttgccgtccgccagtcgctggaagtgatggttaaatgccctgagctggcgttacgtgaagttcagtccctgaccgataagcaaaaggcgatcgccgatgcccgcatcctgctggccgcagaagtccataagctgcgcaactttggaggtatggggcgaaccgccgctgtgaaatacatcgtcgaaggtgtgcggcagaaagcactttctgatcgggttatggctgcggctgctgtggctaatgcccgacgaggtaatcgtgtcggtatcagtaccggcgcattgcaggaatggtattcctcctttctgctgacgcagggggaccctcttaagctgcaggcgttactggctcccggtcatcataaggaggtgccgtgggaacaaatcccctggctgaatgacttttttatgttctaccggacgtggaagcgtccaaccatcgcggacgcttacgaacagttcgccgcatggtggcagtcggcttattcaggcaatacggccatgttgtcggcgttaccgtcggtttatgccgtgacgcgggcattgagaaaagtaccggttatcgtaaaagagcggttccgctccaccggctctgcgtggcgttcactcaatccgtttgtgcgtcgtgactggacttcgttaccggttaatgcagtctgggtcggtgatggtcattgcatgaagatggaggcctttaacccggaaacagggaatatcttccgtccggaaattacgctgattatggatgccggacagcgctttattgttggctggtcgctggccctgtcagaaagcactgttgcggtggctgatgccctgcgtcacggcatgatgcagcacggtatcccgctgatttattactccgataacggcggcggggaaaagaaccgaaatctggatgcggatatcaccggtatcctgccccgtctgggaattgagcaccacaccggcatcccgggtaatccgcagggacgcgggattatcgaacgtgtgaacaaggaaattccccgtgatgtggcccgcagttttcagacctattgtgcgaagaatgccgacgctgaaaccgttcgtatgcagcagcgtatcgccagggccgcgctggtcgccacccataagggcaaagacctgacgaagcggcaggcggagcttgttggcaaaattcccacatgggagcagttgctgactgccattgagcaggaggtggcccgctataacaaccgtccgcactccagcctgccacgcagggagaacggcgagcattacagcccggcggcataccgcagaatgctgattaaagaacagaatgcggagattgattatctgtcacctgacgaactgcacgaaatgttcaggccggaagttgtccgcaccacgtcactcggcgaagtgcggctgttcaacaatatctattttgctcatgaactggccgcagaaagcgggaatgaagtccgcgtcagctatgacattcatgatgccaacagcgtgattgtgcgccgtatggacgggtcatttatctgtgatgctgtctggaacggtaaccgggttgatgcgtttgcgaaaccggttattcagaaactccaggagcagcgtgttaagggccgcatcgccagagcgatggaaaccattaatgacgccagccgggagcttaaacccgcgattgagcacaaagaagatccgtatcttactgacctgttactcagagcagaaaaagaggctgaggctatccgtctgatggatgcgggtgaaacggatgttccaaaaaatggaacatatcacaagtaa

SEQ ID NO: 386549 - DNA, 237 bp, Salmonella enterica
atgttcagaaatgaagtcacaggtagtaaggactggcatcgcgagcacatcgtcgcagctgttcatgtgaagggttttacgttgcgtgagttatctttgcgtgctggtctgaaaaaagactctttaaagaatgcgctgtatcgctcctgccctaagtatgaacgcattattgctgatgcgatcggggtctcccctgacgaaatctggccgagtcggtacgctcgtaaggtcgcgtga

SEQ ID NO: 386550 - DNA, 654 bp, Salmonella enterica
atggaaactttgagagccaaaaatcatcgagtttcttttactgatgggcagaaagaaacttttataaatcgcctgcgagagctggttaacggtcgccccctacagcaagccgccgacgtatggaacgtacccaaatccaccctaaacaattatttttatagagggtctcatcccagaatggacgtaattcagcgtattgctcataaagaaggagtttcagttgaatggctgctcggcaaatgcgacataaaaccaacaggagagcagatggtaagcattgagaccataaatgagaaaaaaatgaatgatgaccttcaaattatttcattgcttcacatggtgtcatcagaagacaaaagagccttgctaaaggccatttttgaaataggtatcaaaggtatcctgagcagactacagcaggctgacggtcaacccgaacgcgagtacaccatgcaggaactggagactatgataatggctctcccggtcagggagtcactaaagacagcatttgccagggggattactgctggtgaagatgctgacaaagagattttgcgaatactcgaatcacaccaacaagggttatcaccggaaggtagtggcaataaaaccacgaccccggctccatcactaaaacagaaagcaggctaa

SEQ ID NO: 386551 - DNA, 285 bp, Salmonella enterica
atgggcgcaaaaggggcgctcatctacgacggtcacgagtttacgcatgttccggcgctaaaggcgctgtgcgtcgatacaacgggcgctggcgatgcgttcaacggcgcatataccgccgccatggcaaaaggtcagtcaattttacaggcggtaaaatttgcctgcgcatttgcctcgctggccgttgagaaagaaggcgcctcgaatatgccggaatacaaagacgtactgacccgtctggcgcaatatgaacacatcaccattatgactgaaaaaaactag

SEQ ID NO: 386552 - DNA, 978 bp, Salmonella enterica
atgaaagttttggcaacaacaaaatcaaccgagcggatactattaagcggtaattctccgcgaccatacatgatgtcccgctcagcagtattttggcaaaaactgcggcgatggtggccgttttatattatggccttacccggtgtaatctatttttttatctggcactatttacctatctgggaagcgaaaattgcctttgagcaatacagaattattccgcctaatatttgggtcgggatgcaatatttcgcgacactaatgtcatcacccgttttctggcaggtaatacaaaacaccatcattcttggtgtaatgaagctggtttttattttcccggtgccaattctggtcgcattgctgctcaatgaagttcgctcatccggttatcgtaaatttgtacagtctgttatttatttaccgcactatttgtcatgggtcgtcatcgccagcattgccatcgcgacactgtcacctgttgatggcgccgtgaatgacattattaaggcaatggggtatgaccccgtcccatttatgaccgacagcggttctattcgctgggtactggtgttcaccgaaatgtggcgtagcgccggttgggattcactgctctatatggcggcgatattcgctatcgatccccaactctatgaagcggcggaaatggatggcgcgggtcgctggcgcaaaatatggcacgttaccctgccgggtattgcaccaaccatcgccacactcttcattctcaacgtcgggttatttttaagtcagggatttgatcaggtctttaatatgacgaacgacgtggtaaacagtcagatagatattattgatacctacgtttatcgcatgggcctgcgcacaggcgaattctcgctggcgaccgccgcaggtttattcaaaggcgtgataggtatgattcttatcgtgctcgctcacaccgtctctaagcgtctgacaggcaaaggagtctggtaa

SEQ ID NO: 386553 - DNA, 900 bp, Salmonella enterica
atgcgtatatcttcacgaagcactccctttgaacgcgttgagtatgttctcattctctccgtgctgtttctgctggtcgtggtgacgttacagcctattctgaacctggtggcgatatccttctccagcccggagaaagtaccgggtatgagcggcctggaagtcattccccagggtttctcgctggacgtctggaagttattgctgaacaacgaagccgttctgcgtggtttcggtaatgccatgctgatcaccgtggtcggcacggtcattaatgtagtgttgactacgctactggcctgggcgctggcgcaaaaacgtctcccgggacgacgctggttgtttatgttcgtgcttttcacgatcgtttttgatcccggcatcattccggattttctggtaatgaaaaaactggggctgctgaacagctactggtccgttattctttaccgcgccgtgttcgcctggtatttgattatccttgtgcggctgttcgaggaaattccgcaagagctgttggaggccgccgagcttgacggcgcaaatcctttccagacgttgtggttcgtcattctgcccgtcgctaagtcctctatcgccatgattacgctgttttatctggtacttcactggaatgagtttttccgggcgatgatctacctcaatgatcctgacaaatggccgttgcaggtcgtgctgcgtcaatttgtggtggagggcgataagttatccatggtcggcgtcgaaagcatgtctacctataccgatgccagccaaatcagtattaaggcgctcaaggccggcatgatcaccctgaccatcgccccgctcatcgccatctaccctattattttgcgtttcttcaccaaaggcaccatgtccggcgcagtgaaaggttaa

SEQ ID NO: 386554 - DNA, 1413 bp, Salmonella enterica
atgaaactaatgaataccttcgccagtgtgctaactggcggcctgttattatgccagtccgttctggcggaaccagtcacgatccgggtagtacagaaagatttactgaccaccaaccgcgaagatatggcgcatattcagcgtatagaacaggcgctggcgcgtcagggacacgatattaagattgaaatcgtgaatctctcgtcctccggctattccgacgtgctgaacgtgatgctgctgtccggcaccattcccgatcttatctatttccacggcagcgaccagaaaatggtcgaacaggatattctggaagactggcgcccctggattgcgcaaacgcgttacctgaaggcggcgctatggccgcacaacactctgcgcctgcaaaatcacccgaccctgctttatgtctttccactgcgcgcgaggcagccagtaattcgtgaggactggctagcaaagagtggttttacggcatcgccaaaaaccgtcgatgattacgtaaagctttttaacgccgtccagcgcggtgactataacagcaacggaaaagcagacacctgggggatcacctccgaaaaagatttacgggatcttgacggcattttcaaccccgcgttcggcattcacgccacctggctaaaggatgaccagggccgttggaccaacgcgcagataagcccgcaggagcgagagaaactcacattttatcactcactgtatcagcagggtctgctgtcgtctcagtacatcactaccaattgggaactaaaagaggatgagttttataccggcaaagtcggcgtggtttccgtgacgtcgtcaggcaacgtcggcgtttatcaggaaaaaatgcgtcagcttcaccctgacgcttcgcttattttactcgacccgccagaaggccttgcggggcaagggctggctgcggtcgatgtctcaatggaaacgcgcggttttgcgatgtctgccctctcaaaacataaaaaggaagtcatgattttgctcgactttctggccagccccgaaggacaaatgatggatcgtatgggatttgaaggtacacattacgttcgcgaaggcgagacgctaaaggtgatgccgaaaattaacgcctggtatcctcgctttatggaagcggcaaactggacgccgcccgtggaatggcgcacaccggcaatgctgcgctatatcgctaactcacaacgatattttaccgcagacaatgcctttatctatccgtcgacgtttgctgccgcgattgattcaactagcaatatttataacgaatggacgtacaaatttgtctcaggcaaagcgtcatttgacatgtgggaacagtatgtcagtgcctggaaagccgctggcggtactgccatgactgaatatgcacaggaaaaactgaaatga

SEQ ID NO: 386555 - DNA, 1200 bp, Salmonella enterica
atgaattcaacaatatctcctaatttatctttcgcttcccgggttttgggtatgctgtacggcgtcgcgttcggcgatgcgctgggcggaccggttgaaaagctctcagcccgacaaatcgcagaacaatatggtcgggtaacctctctcgatcaacgctggcaccgcatggacgaaccgtccacacgacgcaataatcgcattcgcggtaacggcatcattaccgacgatacgctgatgaccctgtgcctgatggaggtctacgatgaactaggccgccatattgacgcctgggatatggcggaggcgtttgtgcgtaagattgcctgggaacctcgctgggtgccggagttagatcgagacgcgttgatcattgagcgtctattttatccggaaaaatggatcttccatcgcctacaactggcggcctgcgatcctcgtcagggcggcgttggcaatatggtcaactgtggggcggccatgtatgccgcacccatcggcatgattaatgcttgccaccctgaagccgcctaccaggaagccatcaactttacccaagggcaccagcagagctatgggctggaagccgccggcgtctttgccgcctgtgtttccgccgcatgtattccggggatcggtattgacggcatcattgatatcgcactgaagctggcaaaagacggtactcggcaggctatcatagccacccttgacgtcgcccgacgttaccgtggacaaacgtgggactatcaccatgtcgtcgacgctctgcatgaggcattgctgcccttctcgccaatgggcgatgacctgatgcatcgcccggaaaaagctggcgtaccgacaatggcctaccagccttcacgcctgatgtcgattgaagagttacccatggcattagctttttgtctgctgcgtgaaggcacgtttcgcgacgcggtggaggattcggttaactccggtcgcgacaccgactctatcggcgtgatgagcggcgccattctgggcgcgctgcacggcgagacaattattgagtccgatgttcttgccggtatcgatcgcgccaaccgtcttgacctacggcacgccgcgcaacagttcaccagggcggcgcaaaaaattatccgccaggatcttaacgcagcggaagaatatcgccaaaacgtgatgccattattactgtctgaccagaccgtctga

SEQ ID NO: 386556 - DNA, 1056 bp, Salmonella enterica
atgagccaaatcgtcctgaataacctgggaaaatcctacggtaacgtcaacattattaaaggcatctcgctggatattcacgagggtgaatttattgtactggtcggcccctccggatgcggcaagtcaacgctgttacgcatgatcgcggggctggaggatattacgtccggcgagttgctgatgcatggcgaaatcgtcaatacacttccggccaataagcgcgatatcgctatggtatttcagagctacgccctctatccgcatatgaaggtgcgggacaatatgagctttgcgctaaggctcgctaatgtgtctaaatccgaacgtatggaaaaagttgaacaggcagcggaaatcctggggttaacccatttactggatcggctgccgcgtgagctttccggcggtcagcgtcagcgagtggcaatgggtcgcgcgctggtacgcgatcccaaggcatttttattcgatgagccgctgtctaatctggacgctaaattacgccataaaatgcgcggggaaatccgcaagatccaccaaagaatggggcgcaccacgatctacgtcacccatgatcagacggaagccatgacgatggcggacagaatcgtggtattgaatgccgggcatatcgaacaggtcggtacgccggaatcgctataccgcaatccggataatctctttgtcgcaggctttatcggcacgccggaaattaataccattaaaggcatgatacaaaatggcgatattgtgttgcataacggctaccgtttctcctgccctttgtccttatcaatcgaaggaaaggaaattatctgcgctgtacgtccgcaccacatgcggttcagcgactcaggaatgccagcggaaatcgtgctggtagagacgaccggcgaggggcaggaaattcaggcacggagtgaaaatcaggaaataattgtggtatcgaatgaaaaacaggagattactgtcggcgaaaaagtgtggctgaatttcgacgccgcaaacgtttttttatttgacgcacaaagcggtgaacgtctgaggccataa

SEQ ID NO: 386557 - DNA, 879 bp, Salmonella enterica
atgcacgctgctttgttcgagctttgccgccggtatgccgatatgcatgcagaccgtagcggtattgccattacgccggttccggggttgacccttattcgcgttttgcaccccggcgaattacccgcagccatcaacagaccactgattgcgatgctgttgcaggggcgcaaacgggtcactaccgggattgaaagttttgaatatgggccgggcgaggcgatggtgattgccgccgatgtcccgacgaccagccaggtgacccaggccagcctgcgtcatccctattattctctggcgctggagttcgataccgccatcctgcgtgagcttcaggaggcgttgcccgtggcggtaggggagacgccctgcatcggcattgaaccgatgaatggcgaggtgacggacgccgcttaccgtctggcaagattgtttgagcaaccaggggtaatggctgtgctgggagaggggttgcggcgggaactgcattactggctgttacgcagcgtgcatggtcccgcgatccgcgcccttggcgccgtggacagccacgccgggcgcatcagccgcgcggtggcgattctgcgcaaagattttatgcagccgataagcgttgaggcgctggctggcgtggcaggcatgagcgtctccgtattccatcagcatttccgggcgatcaccaccacttcaccgctacagtttcaaaagcagttgcggctgatccacgcccgccgcctgatgctggcagaaggcgtggggattgcgcaggcggcgtatacggtgggttatgccagcgtgtcgcagttcacccgcgaatatgtccggatgtatggcgcgccaccgggacgcgatgtccgcagggtaaaagcgagcgcctga

SEQ ID NO: 386558 - DNA, 756 bp, Salmonella enterica
atgaataaaattgcacttgtcacaggcgctaaccggggtcttggacgcaacgccgcgctttccatcgcacgccagggaggcgatgtgattgtcgcttacagagaaaacgctgaccaggcgcaagccgtggtggcagagatccgcgcgcttggccgcaaggctgtcgcgctccggcttgatatggcgcagacggcgagctttccggcatttgccgccacgctacgcgaacagcttgtcgaagtctgggaacgcgacacgtttgatcacctgattaacaacgccggtcacggtgagtttgccaccgttgatactacgaccgaggcgcagtttgacgggctgttcaacgtgcatgttaaaggtgtctttttcctggtgcagacgcttttgccgttcttggctgacggcgggaggatcgttaacttttcgtccggcctgacccgtgtctcctaccccggattttccgcttacgcggcagccaaagcggccgttgaaatgctgagcgtttacatggcgcgtgagttgggctggcgcggcattaccgtcaatactattgcacccggcgctattgaaacggattttggcggcggactggttcgcgacaatgccgatgtcaatgcgcagtttgccgcgatgaccgcgctcgggcgcgtcggcgttcccgacgatatcggcccgatggtcgccagcctgctgcgtgatgacaaccgctgggtaaccgcacagcgtatcgaggtgtcgggcgggcagaccatttga

SEQ ID NO: 386559 - DNA, 321 bp, Salmonella enterica
atggctaagcgcagcgtcaaatcgccagatgctgcgcctttttctccggctggcgaggaatctgtcacgcctgcgccgccggttacgcgtaagtggaccgaggcgatttatcagcagtatccgcaggtccgggggctgtcgtggatttcacgccaggacgactcggcccgggcggtggtgctgtctggtgatcgcattgcgcaaagcgcgcttctttctcatgacctgtcgcgcggcttactggaagacggggacgcgtatgacgctgtgcacgatctggcggaacgcataggcgtcagcgttatcccgggaaaaagctga

SEQ ID NO: 386560 - DNA, 459 bp, Salmonella enterica
atgaacgataaatttgatggtaatggtattttcccaaaggggccgaaaaatgaggcctatgcacaatacttccaggggacaagctatctgaatatgctgtccacgacaggagtcactatcggcaatgtggtgtttgagccggggtgtcgtaataactggcatattcaccacaacggtggacaaattctgctggtaaccggtggccacggctggtatcaggagtggggtcagcccgcccgaccgctgattgccggtgatgtggtcaatattccccctgacaccaaacactggcatggcgcagccaaagacagctggtttgcccatattgcggtggaggttcctgctgagggagcgtcaaatgagtggctggaacccgtggatgaggcgcaatataacctgctgaaaaggaagggattgaatacagacgatgagaaacgcgctcagatttcgggagtataa

SEQ ID NO: 386561 - DNA, 1200 bp, Salmonella enterica
atgtctgaaaataccgctatgctttctcgtccccggattgcggtgggcgcagggtttattatcctgctcagcgcgctgatggcgctgacttcgctctccaccgacatttatctgcccgcgatgccgatcatggcacgggcactacacggtgatgccgaactgaccattaccggtttcttaatcggttttacccttgctcaactgatctggggtccggtgagcgatcatctgggtcggaaaattccgctgtttatcgggatggttctgtttgtcgcgggctctgttggttgcgccacgtccaccaccatgatgcagatggtgttctggcgggtctttcaggcgatgggggcctgcacggggccgatgctggcacgggccatgataagagatttattcagtcgttcgcgcgccgcacagatgctttccactctgatgattgtgatggcgatagccccgattggcggcccgctactgggtggcctgatcattaagttcagcacctggccgatgattttctggctactgtctgcgacaggcgtggtgatgctcctggcgttgctgacgttaccggaaacgctgcctgaagaacgtcgtgtacaagccacgctgaaaggcgctttcggtaactatgtctttttgttgaaaaaccgacgctttatgcgctatacgctgagcctgacgtcgtattacatggcggtttacgcctttatcgcagggtctccgttggtttacatcagctattacggcgtctcgccgcagcattacggctggttattcgccgtcaatatcgtcggcgtcatgttgctcagcacaatcaaccggaagctggtacaacggcactctctggatgcgttgctgagaacctcactgagccttgccgctatcgccgccatcctgctgacactggcggccgggctgaaaacagggggaattgcctttctggtggtcatgatgtttatcacgttttcgatgaatggggtgattgccgcggcctcaacagccgccgccctggatgaagtcccggaaattgccggatccgcttcagcgctcattggcgcgctacagtatggcagcggcattgtttctagcgggttactggcgctattcagcgataacaccccctggaccatgagctggattatcggtttgtttacgactgccggggcgttgctggcactgacggcaaaacgcgctcactga

SEQ ID NO: 386562 - DNA, 894 bp, Salmonella enterica
atgctgaaagagaattttaatgaactgcaattttttcttgtggtggcgaaagagcgcagttttaccaaagcggcggggaaacttggcgtgtcgcagtcggccctgagtcatgctgtcaaagctctggagacgcgactgaatgtgcggctgctgacccgcacaacccggagcgtggcaccgacggaagccggagagcgcattctcgcctgcctggagcctgggctggcaatactggagcaggagctggaaaatattgtccagatgaacggcattgcatcaggcaatatccggctttccgttggtgaacacgcgatgcgcagtctgctgtggccgaagctgaaaccgtttctgcgcgaatatccggaaattcacgttgaactggtggtggataatggttttgtcgatattgtccggggcggttttgatgcgggggtgcggctgggggaaagcgtggataaagacatgatcgccgtgaaaattggcccggatatgcggctggtgacggtggcatcaccgggctatttaagccaacacggcgcaccgcagacgcctcatgatttacaggatcactgctgtatcaatatgcgtctgcccacggcaggcggcgtttaccactgggagtttgagaaagagggaaaaccgctacgcgtaaaagtagagggacaattaaccctcaaccggctgatggaacgcattgatgcggcgcgggaaggttttggcattacctgtgtgccggaggattcggtcgcggagcatatccggaccggcgcactggttaaggtgctggacgagtggagcccgtcctttgccggttactatctctattaccccagccgcagacagcacccaccggcttttgcgctattgatcgaggcgctgcgttataacggatag

SEQ ID NO: 386563 - DNA, 990 bp, Salmonella enterica
atgcaaaagcgttatcttggtcaatccgggcttgaagtctccgcgctggggctgggatgtatggggctgagtcacggctatggcccggcgaccgatacccgtcaggcaatcgaactcatccgcgccgccgttgagcgtggcgtgaccttcttcgacactgccgaagtctatggcccctatctgaatgaagacgtggtcggtgaagcgctgaagccgtttcgcgaccgggtggtgattgccaccaaatttggttttaccttcggtgatgacaacaaacagcagattttaaacagtcgtccggagaatatccgcaaagcggtagagggatctctgaagcgcctcaaaaccgaggttattgatctgttgtatcagcaccgcgtcgatcccgacgtgccgattgaagacgtggctggcacggtgaaagaattgattgccgaaggcaaagtgaagcactttggcctctctgaggcgggagctcaaacgattcgccgtgcccatgcggtacagccagtagcagccttgcagagcgaatactccatgtggtggcgcgaacctgagcaggacattctgccgctgctggaagagctgggtattggttttgtgccgttcagtcctttaggtaaaggttttctgaccgggacgattaaggccggagccaccttcggcaaggacgatttccgaagcattgtgccgcggtttgcgacagcggcgcttgaggccaatgagaaactggttgccctgctgggagaacttgcgggtgaaaaaggagtgacctccgcgcaaatcgcgctggcctggctactggcgcaaaaaccgtggatcgtgccgattcccggaaccacgaaacaacaccggctggaagaaagcctggccgcggcagagctcacgctggcgactgaagatttgcgcaaaataacccaggcgcttgatgcagtagacatcgtgggcgagcgttatcctgcggcgcttcaggcccgggtaggccgttag

SEQ ID NO: 386564 - DNA, 213 bp, Salmonella enterica
gtgctgcgctggctatatcagcgcggtatggtgtcgctggcgaaaacggtacgtaaagcgcgaatggcagagaatatccatatcctcgacttcggactgagtactgatgacatgcagcgaattaccgcgctggatactgcaaccagcgccttcttctcgcatcgcgacccggccatcgtggagtggctggcagatcgaaaactcgacgtttaa

SEQ ID NO: 386565 - DNA, 234 bp, Salmonella enterica
atgctcgctgattttttcagtcagggcatggcgcagctcaaccttttcgatgataacgcgccgcgcgccggtagcgagaaactgatggaagtactggatcacctgaatgcaaaggaaggcaggggagcgctatactttaccgggcaggggataccgcaacagtgggctatgaggagagatatgctgtcaccccgacataccacccgctatgaagacctgcttcaggttaagtga

SEQ ID NO: 386566 - DNA, 360 bp, Salmonella enterica
atgaaagctgacagtgccgccccctgtccccggacaacggcggaatggcgacccggtgaggcgtgggactgccagcccggactaaggtccacagaaaaggaggccttaaaaaggctgtcagattatttcgccggaggcggtaagagcaactggccgctcatcgtcagagcgggccttgcccgcctgatactcccgctcagagaaacgctggactggatgaatgcggcaaaggctcccgccaactctgccgtgcatgacattctggtggaaatgcaccggctggggaagagctactggtactggacgcaagaagagtggcttgacgtgatgtgtaccagtgaaggcgcgtttcgcacatag

SEQ ID NO: 386567 - DNA, 1437 bp, Salmonella enterica
atgtgccgcttgcttatcatcgtgtgggtagggggatacgcacttttatggagcgtggcgactatctttttcgaccccgcggtcccctacgatgccgttgaagcactgaactgggcacaaaatgcagaatggggttcaccaaagaatccctggctggttggcatggtatggcgccctgcgctgtggttctcgggtacctcgctaagcgcttactggtacatcacccattttgtggccattgccgttgggatggtgggttgctggtcacttgcgaaatgcctgagcggtagcgaacgcctcgcctggcttgccctgttcacccttaatctttcagggatcattaacttcgatatcatcagttataacgataactacctgctggtcatgctatggccatggatgttgttgttcttttactatgcaattacccgtcacgccggttggtggctggcattcgcgataacagcagggttggcctcgatggcgaagtactcaacgctggcatttgtcggctcagccttcattgcgacgattgcggtgccaaaaattcgggtctgttaccatcaaccgctgttctatctggcgctcattgcgggtctcgccattattgcaccaaacctggcgtggttatgggagcacaattttgtagccttccactgggtggatacacagataaaacgtcagtttaacccggcgttgttcataaaactgctgagcatctactacccgctgctgttcttatggtggatcctacgccgcaaccacattcagctccgctggcctgccgataccaataaacgcgtcctgctgctggtcagcttaatgcccctgttccccatttgcctgtggttcttatttcatcacggcgggcgattgacggaatggttacagccgtttttcatcctggccccagcgctgctggtcggatgtgtcgccacgcctaacgtgcaaccaaccaggagtacctgtattacacttactatcggtaccgctgcactggtgttgctgggatacagcacggtcatggtctctaacgtggctaatgccggacaaaaaatgagtggaattatccccttcagccagaaagttgaccagttatggtaccaacgctacggcacacctctacgcttggttggcggagaacatatttccgactggcttcttttttacgcgccgtcgaggcctaaaaccattacgccctggagcaacagcacagaacctaatatctataacgctgagatccgttatgcagatattgcgcgttttggtgcactgctgattggtgattcagtcaaaaactgtactgacacctcgtttagcaaggcgttgacgcagtggccgcagataaagctggatgcgattagacagataacctttcaccaggataaacagcataaaggctatccgctgtgtatcgggtttgtaagaccggaataa

SEQ ID NO: 386568 - DNA, 708 bp, Salmonella enterica
atgcgctattttttcattgcagaaccgataaagggaatggaaggggatttactgggggttgacattattacccgtttttcatcggcgttcgctcgtccgctgcaccctgagtttgttatttcgtcatgggacaattcgcagaagcgccgttttctgcttgacctgctgcggataatcgctggcaaacgtcgctggtttctacgccatagcctcttctgtaccgtaaatatcgatagggatatggcgcagcttgccctccaggataaagacattcgcgctttactacacgctatgctatttgtgggattgcaggtcgctgaacatctttcatgtcatgataacgcgccagtcgatcctttaatttacgcgcttcataagcagcctaacccattatggctgggtgacctgggcgcagggaacgcgaccgcggcgccattagtttgcgggtgttttagcggcgtaaaacttgatcgtagctttttcgtctcacaaattgaaaaaataacgtttccgctgcttgtcaaacatatccggaattattgtgacaaagttgttgtggacggtctggaaaacgcacgctatttgccggcgttaaaagcggcaggcgttttggcaatccagagcgcgttgtttccttccgttgcgttagaagaggttgaaaccctggttttggacagtcgcatgaaccccctcagggaatcgatctga

SEQ ID NO: 386569 - DNA, 1416 bp, Salmonella enterica
atgccgtttacgttttatattggaaatcatagctgccgtatatcagaaagccatctaaaagatattatcgagaataaaagagaacacattttttcaacgtgtgagaaatttatagattttttcaggagtgtatttactggtcggagtttaatttccgattataaagagatatacactctgctatgccaaaaaaaagagcgcccagatattaaggggccttttccgttaaaaaaagatgagagttgtacacaatggcgtcccattattggatacgttaaacttattgatgcttccagacctgaagcgatgggtaaatacactgtagaagtacaggcatatcgagaaaatacgtcactattaaaaatgtattacgaaagcgtgttacttgccgaggcggaatgttctgagcattgcctcgattttttaaaagaaacgatgtttaactacaatacaggtgagattacgcttaccactttggagaatgagaatttgcccctggacgaagcaaatgggaatgggcgctatgccgcttttgagcaacgtttgatagagtacctgtcaccgacgcccgaatcggcaggtgatgatggtgctactgctcagacggcttcccaacaagaagcagtgatagatgtgtttgatagcaacgctactgctcagacagcttcccaacaaacggctgagatagatagatttattaactcgccagactttagggagaatatttgcatggctgacattgaaaaaaataaaataggtagcggaagttatgggacggtctatctgttaaataaagaatttgttgttaaggttccaattaataatcggggaataaaagttaattttacgtctcaagagcactgtaatgggcatcctgatcgtgtcagtaactatttgaatatggccaatgacgacaacaatttttctcgttcggccatcatgaatattaatggcgaaaacgtcacggttttagtttcaaaatatatcaagggggaggagttcgatattagcgatgacgaaaaatatcgaagggcggaggagcttcttaaatcccggggggtttatatgcatgatatgcatatcttaggtaatattctggttaaagaggatgttcttttcttcgtggatggagaccaaatcgtattgtcaaaagatgcccggcaacagcgaagagcttcttttgcaacagtgcaactggaagagcaaattaaggcgcattacctggtgaatttaaagcaggccgagaccaaaggaaaaactgaggatattgaatattatcagtcacttattgaggatcttgatgcattaatcggagtgaaagtacagacacctgggcctgaaagacgttttaatatagcgccacctgaggaggggtcccttgttgctaaagtattaaaagatgaattaaaaaaataa

SEQ ID NO: 386570 - DNA, 1482 bp, Salmonella enterica
atgaaacagattcaggaacaaacggcgctaagtcctcttcactctcactggcgtctggctgatgatcgcaacgtgctgcatctctccccgacaggtgaaacggatgcagaaaaaacggttgagctatcgccggagcaagccgggcgtatccgggaaatgacggcgattacttccagtctgctgataacgttgtcgatagaaaaacaggctaccgctgtgcacctggtaggccgtaagattaataaacgtgaatgggctggcagcctggcaacctggcctgatacacctgccgtcgcgccaacgctggcgcaggaactctattttgccgagcaaatcatatcagaagccagctcagtcattgcgatactggatagccagggcaaaatttgtcgatttaatcggttatgcgaagagtacacgggcttaaaagagcgagatgtaattggtcaaagcgtctttaaattatttatgagtcgccgggaggcagctgcctcccggcgctacattgaggggttttttcgcaatggcaatgcttatgaaatcgaacgctggataaagacccgtaaaggccaacgcctgttcttatttcgtaataaattcgtccatagcggtagcggaaaaaacgaaattttcctgatctgcgcaggcacagatatcaccgaagaaaggcgggctcaggagcgtttacgcatactggcgaatacagacaccgtcactggcctgcccaatcgcaatgctatccatgaatttattaataatgctattgccgcggctggcgagtcgcaggtgggtatcgtttatctcgatctggataacttcaagaaaattaatgacgcctatgggcatatgtttggcgatcagctcttacaggccgtttcgttggcgctgttgagttgtctgggggaagatcaattgctggccagactgggaggggatgaatttgttgtcctcgctgcccatacgtctcagggcacgctggaagcagtagcctcacgaatccttacccgtctgcggcaaccgtttcgtattggactcattgaagtttacacgggatgcgccattggcatttcgttggccccccagcacggacaggatagcgaaagtatcattcgtaatgccgacaccgcaatgtataacgccaaagaaggcggccgcggtcagttttgcgttttttcgccggaaatgaatcagcgcgtatttgactatcactggctggacacaaacctgcgaaaagcgctggaaaacgatcagttacttattcactatcaacccaaaattacctggcgcggcgaagtccgtagcctggaagcgctggtacgctggcaatcgccggaacgcggattaattccgccgctggagttcatctcatacgccgaagagtcaggactcatcgttccgctgggccgctgggtgattctggatgtggttcgccagattgcgaaatggcgcgacaaagggattaacttgcgcgtagccgtttaa

SEQ ID NO: 386571 - DNA, 552 bp, Salmonella enterica
atgagcatgaaaacgaatccgcggatcattctcaccggtggtccttgcgccggaaaaagcacattactgcacgcacttaaaaagcaaggattttactgtcaggaagagtccggacgcgccatcattcaagatcaaatacgcattagcggttcaggtttaccctcggtatcaccattattatttgccgaactgatgctggcactggatatacgcggctggcatcaggcgcagaatagcccgacaacggtgttctatgatcgtgggataccggatattgcgggttatctgacgcttgccggtgaaaccgccccggatcatctcatcaacgcgatttatcatttccgttacgccccaacggtcattttgcttcctccgtggcgggctatctaccatcaggatagcgaacgtaagcagtcatgggatgaggcggtcagaacctacgaagcgatgattaggacatatcagcactatggttaccagctatatgagcttcccttcgcttcggtgaacgcacgaatggaacaactcatcgataagatcaggttcgattaa

SEQ ID NO: 386572 - DNA, 690 bp, Salmonella enterica
gtgttaacgcgtgattttttagtgaatgccgattgtaaaacggcgtttggcgcgattgaggagtcgttgctttggtcagcggaacagcgagccgtttcgctggcggcaacgctggcatgtcgaccaaacgctggcgctgtctggatttttggttacggttcgctgatgtggaacccggcgttagcgtatgaagagtcttgtaccggcacattagagggctggcatcgggcattttgcctgcggctaaccgccgggcgtggtaccgcgtgtcagccggggcggatgctggcgctcaaagagggcgggcgtactaccggcgtggcgtaccgtttaccagagagtacgcttgaggaagagctcactctgttatggaagcgggagatgatcaccggctgctatttacctacgtggtgttcgttgacgcttgataacggacgtatggtcaatgctctggtttttattatggatccgcggcatccgttgtatgaatcggatacgcacgccctgactatcgctccgcttattgccactgccagtgggccgctgggcaccaacgcacagtatctttttttgctggatcaggaactgcgtaaactgggaatgcacgacacttgtcttgatgatctggtcgcgaacgttaaagcgttacttggcgtgaagggagagcaagggatagcgagtttatcctga

SEQ ID NO: 386573 - DNA, 1182 bp, Salmonella enterica
atgctcaccgatacgcaatgccgcactgctaagccgaaagaaaaactctatcgactcaatgacttcaatggcctctacctcgaagtgaaacccaacggcaaaaaggcatggcgctatcggtttaaactcaacggcaaatccagcatgttcgcgttgggtgagtacccgacggtcaaacttgccgaagctcgcgagaaatgtgagcaagcgcgtaaacaagtcgcgaatggagttagcccgacacaggctcgccagttagataagatccgcaaggtcaacgacgcatccaacacctttgagctgatcgccaaagagtggttgcagatgaaagactgggccgaaatcaccaaaactcgccgccttgatatgcttgagcgtgtagttttccccgccatcggcaaacttcctatcagggaaatcacctcgcaccacattcttaaaattcttcaggaaacggctaagcgcggcgctccgaccgttgccgctgaagcccgccgcaccatttcatccgtttttgagctggcggtggcgacgctcagagcagatagcgatcctgtctggccggtgcgtaaggcgattccggcaaacaaaacgcagcacaaacaggcattgaatccgcagcaaatcgggaagctattaaactgttttgacaacagtcgcggctcataccaggttaactattgcatgtggcttatgtggtggacgctggcgcgaccagccgaattaactgaggcagaatggacagaattcgatctcgataacgcactgtggactattccgtcaacgcgaatgaaagcccgcagagaacacgttattccccttcccttccaggctgtcaatatgctcagaacactacagggattaaccgggcatcgacagcaccttttcccgggcagggataatccgaaaggtccaatgacatcgcactcgctgcgccagctacttaaaagcctcggctggagtggcatttatagcccccatgcaaccagaactacaggaagtacgcttttaaacgaaatgggctatcgagctgatgctattgaggcccaacttgcacacgctgataccaacaatgttcgtcgcacatacaaccatgcaacttatcttgataagcgaaaggttatgatgcaggactgggcagataaacttgaagaatgggtaggaagcgcgcagcactattga

SEQ ID NO: 386574 - DNA, 618 bp, Salmonella enterica
atgagccgataccgtgtctctggcagtgaaggacagtatgagaaaaactccgatgagcaagttctggcaaataagctggggattactgattctggcgagatggacgaagcggagcttgtgctgctagagaagctctatcactgcatttttgaagagcagtttccaactggacagatcaccattgctttgttgaaaagctggcatcgccgctggctgggaaacatctatgagtgggccgggcaagaaaggactgtcaatatcagcaaagggggctttatgttcgcgccctctgcacagttgccaaaactattacacgaattcgacgctaaatatctcgcccgatatacaccatgcaccaacatgagcgaagaacagctcatagaggctattgctataacccatgtcgagctaatactcatccatccattcagagaaggaaacgggcgcctgtctcgactattagccgacgtgatggcggttcagggaggttacaggccgctggattatcaaagctgggagcaaaacaaagccgaatacatttcggccatccacgcaggtatgtcaatggactacggcccgatgtgctattgggttagtgcggcgttaagacgtgattaa

SEQ ID NO: 386575 - DNA, 1059 bp, Salmonella enterica
atgaacgaacaagatgtttatctgatcagcaatgaatatggtgaagataagtgtccggaaggcaagctggcgctatatactaatgtgcagttcaacattggtgaagtgggaaacattctgattatttcacctaatattcagcttaatgaagaacaattagcaagttatggttttattattggtgagaatagcaatatttcctctatcgttaataatatggaccaggatgccacgcttatctctggtttatatgtagatgggcaaacattaacggttaaaccaggaaccaccattcctactctttatgactatcctttaggcagtgaaaactggaatgacgcagttaactcagttatttcagccggtattgaaaccgttgatttaaccatgagtattgagagtgacattgttctggaggaagaggaagaatattcagcgttactgcaaattcacaacaataatagtgagtccgtagacaacgtaacgattactgccagctccggtaattcagccgttttttctgtcgaaacggctacccagaccaccagtatcgccggaaatgaaacagttaacgtgcgtattcctttgctgggcacaggccagggctcagcgaccttaacctgtcagcttacaatgccattcggcatcgtgaataatgggaataatatgacgcaaactgtcgtaaccgtaaacgaagctagtccgttgcatgtgacacaaagttttgccggtgactggcaagatacatggcccagcacaaaatatatttatagctataaattgattctcagctctgctgaaactgaagttgataagtgggaattatcatttgtacttcctgatggtgcagaggtttatcttaagtggctggaaagcgaaagtagctgggttgaacttaacacagagaaatcggttaatggtaacgtgtatctggatagcgaaccgggccatgttatctcaccagaaaagaatatcgaactggatattgaaatcctgtaccctaaccaatcaactgattaccagacgctaaaaaatctacgcctcatgcaactggcataa

SEQ ID NO: 386576 - DNA, 2004 bp, Salmonella enterica
atgagcaatattatttatttgaaaatagtcggcgagagacaaggcgtcatatccgaaggttgtgggagtgaatcatcagttggcaatcgttaccaggcgggtcatgaagatgagatttttgtttttagcctgcaggcgctggttagcagtgctgtagccggcgtcaaccatcaggggattcgcttttgtaagccgattgataaaagctcgccgctgtttactcaggatataaataacaatgagcgttgtaccctggattttaccttttatcgtattaaccgatgggggcgttgggagaagtactaccagattgaggtcaggggagcgagcgttacagcctggtggatgcaaatccggctcgacggaatcgcagaagagcttatcacgatcaattatgactatatttgctcaaagcacctgatagccaatactgaatataatgccttattaacccccgaaaacgacaatcagctctttccggctacgcttccagcggttaaaaagccagctcctcccatcaaaaaacgtgaaatcaccttaaccattggcgtcttctttgacggaacagggaataaccttcttaataccaatttacgtatgcagaagtgtaacccagagagctacgggcttgatgccagagcgctaactgaatttagccagcgctgtatgaagaaagaaggttttgatggaatcgaggtgggaagctatctgaattattatacaaatattcgttggttgtatgatttgtatcacgtggaacgtattccggaagcgattaacgacgatgtgcagaggaaattttatatcgaaggtattggaacggaaaataataaagcggattcattgttaggtttagggttaggaaataatgatactggcgttattgcaaaaaccgataaagcgatagcattgatttgccagttactaaataatttaataaatgaaattgatgttaaaaattccaccctcaaacatctgcagtttgatgtctttgggtttagccggggagcagcggcagcgcgccatttcactaaccgggtgtttgaacgggaccctgccttagtgaacggtatcaggcaggtgttcgctaatagtgcctatagcggaaaacccgcgggggaagttcgctttctcggcatttttgataccgtgaccgccgtgggaggcgtaatggatggctttgatcctcatgacagcaataatctacaggttaaacttgctctgccgccgggtgtggcgaaacacgtttttcacctgacggcaaagcatgaatgccgatataatttttgccttaatagcgtcaaagagcagtggcctgaaatgagcctgcctggcgctcatgccgatatcggcggcgggtacaatccgcttgaggaggagtatctttttctgacccggcctgcaatgcaaacggtctcttcagatattcctgtgcaatcgacagacgtttatcgccgtaccgtccgagaggccgaacgattacatacccatccagtcctggcccctgtacttccttccggcatactgaaaattgaaagcgatattgacgagtgtataccttctgaccaataccataaccgcaaaaaacgcgttgccgcagcggctacttttcggcgcaccgtcagtaatgactggtcaaaggttgctttacgagtgatgtatgaggtggcaaaagaagcagggataatttttgctgagattgacagtaaaaacaaagagctggcgtttaatcctgaacttaatacgctgagcgagcgcgtaattttatttgctaaaaaatcacttttatcgggtcatcaagaaaatatgttatttgatcgggatgaactaaaaatcattggtaaatatatccattgttctgcgaactggaatgcggttaattataatattaaaagtcctgttatatctgaagtggctatttttgattcgttcagttttgtcaaccgccctgatgataactggattcgtactatttataatatgtccggggaaaaattaaaatga

SEQ ID NO: 386577 - DNA, 663 bp, Salmonella enterica
atgaatataaagactctaactttaactttcttagcgatggccgcattgagtcatgatgttaaagggaaagaactgacgtcacttcttgcaccctatgatgagtggtattttaactttttctatcctaaggcgttgcctgctcaggtaacgtatgttgaattactggatacggacggtattttttaccgttttcgatctttagattccaccaattccgactgggagagtgttggtggctggtatactaaatcaggttttggcattccctcctttaataaagctaaaaatccgccacagtttattcatttctgctgggattcagtgattgataaaaaggtgtatgaaacccgaattaccttcagcggtacggtctggaaaatgatgctgacgccttatccctcggtaggtgatccgcatgaaaatgactatcaccgctttatgctgataggactggcaccggaaggaaaggtgcgggtctggctggaaaatgacaataaacctaatattccgcttaccggtgagaaagtaattttaattgaaacggtatcgggaaaggatttaaaaatgtgcaagaacataaccaaccatcctgatggatatatttattatggagacacaccggactttatcaaaggtaaaaagtacccctacggcgagtggtaa

SEQ ID NO: 386578 - DNA, 1164 bp, Salmonella enterica
atgtccatcttccgcagaggtgaaatatggtacgcgtcctactcgacaccgggcgggaagcgaattaaggaaagccttgggacttccgacaagcggctcgctactgagctacatgacaagcgcaaggctgaattgtggcgagtagacaggcttggcgattttcctgacgtaacgtttgatgatgcctgcatgcgctggctggaggaaaaggcagagaagaaatcactgaaagatgaccgcagccgtatggctttctggctggcgcattttgagggagtacggttaaaggatgtgaccgagcaaaaaatttactcagcagtaaacaagatgagcaaccgcaagcaacttgagatatggaaaatcaaagctgccgtggcgcagaagaatggagaacctgctccagtctattcagctaagccagtcacaacctcccccaaggccaaacacctggcattaatgaaggcaattctgcgagcggcagaacgtgactggaaatggctggagaaagcacctgttataaaaataccatcggtaagaaacaagcgcgtcagatggctggagaaagaagaggcaaaacgcctgattgatgaatgccctgaaccactgaagtctgtcgtcaagtttgcgctggcaactggcctgaggaaatcgaacatcatgaatcttgaatggcaacaaatcgatatgcagagacgtgtcgcctgggtaaatccagaagacagcaaatcaaaccgcgctatcggtgtagcgctgaatgataccgcctgcaaagtgttgcgtgatcaaataggaaaacatcacaaatgggtgttcgtacataccacggcggctaagcgagcagatggaacatcaacgccagcagtcaggaagatgcgtattgacagcaagacatcatggttatcagcttgtcgtcgtgcaggcattgaggatttccgattccatgacctgaggcatacatgggcaagctggttaattcagtccggagttccactgtcagtgcttcaggaaatggggggctgggagtctattgaaatggttcgcagatatgctcaccttgcacctaatcatttaacagaacacgcgaggaaaatagacgacatttttggtgatgatgtcccaaatatgtcccactctataattatggaggaaataaagaaggcgtaa

SEQ ID NO: 386579 - DNA, 489 bp, Salmonella enterica
atgcataatgatgtgagattattgccagagggcgtaaacatcttatccggtttgcgagcgccatggggaagccggatattcggcaaaaccctgtggcttctggcgtttctgagctgcctgtcattcgccgttcacgcccaggtagtggacacctggcgcttcgggaacacggaacagcaggaaaaagccctgcgcattgccagccagctacgctgcccgcagtgtcagaatcaaaacttactggaatccaatgcgccggtcgcggtcagtatgcgccatcagatctataccatggtggcggaaggtaaagatgacgcggaaattactgcctggatgactcagcgttacggcgattttgttcgctacgatccgccgctgaccgcgcaaacgcttctgctatgggcgctgccgtgtctattgttgttgctggtggggatgattctctggcaagccggcatttgtcagcgcacagagaaggaggaaacatga

SEQ ID NO: 386580 - DNA, 1458 bp, Salmonella enterica
atgattcgaacttcttcacgcctattcctttgctgcctgcttggcagcgccacggcgctttctggctgcgcgctaattcgcagcgattctgcgccgcatcagcagcttcagccggcgcagatcacactggccaatgatattcatctggccagttccggctggccgcaggcgcagtggtggcggcaattcaacgatccgcagttggatgcgattatccaacaaacgttggcgggctcccatacgcttgctgaagcaaagctgcgcgaaaagagagcgcagtcgcaggcggaactgctggaggcgggttcacagctacaggtcgccgcgctggggatgcttaatcgccaacgggcatcggcaaatggctttctcggaccctatgcgctggacgcgccgaggctgggtatggatggcccttattatacggaggcgactattggtctgttcgccggaattgatcttgatttttggggcgtacatcgttccgccgtcgcggcggctctcggcgcgcaaaacgccgcgcttgccgaaaccgccgccgtggagttgtcgcttaccaccggcgttgcgcagctttactacagtatgcaggccagctatcagatgctcgatctgttacagcaaactcatgatgtcgttgactatgcgatacaagcgcatcagagcaaagtgacgcacggactggaagcgaaagtgccctaccacggcgcaagagcgcagatgttggcggtcgataaacagatcgccgcagtcaaagggcaaatcaaagaaacgcgcgagtcgctgtgcgcgctgatgggcacggaggcgatgccggacatcaaacccgtctcgctgccgcaagtcagcaccggtataccttccacgctctcttatgagctgctcgccagacgcccggacctgcaagcgatgcgctggtatgttcaggcgtcgctgaaccaggtggacgccgcccgcgccctgttctatcccagctttgatatcaaagccttctttggcctcgattctatccatctggataatttgtttaaaaacaccagtaaacagatcaactttattccgggcttacgcctgccgcttttcgacggcggacgtcttaatgccaacctggcaagcaccagggccgccagcaatatcttgattgaacggtataaccagtccgtactcaacgccgtgcgtgatgtggcgatcaacggcacccgtctgcaaacgcttaatgatgagcgcgcgatgcaggcacagcgggtagacgccacgcgttatacccagtcctccgccgaggcggcgttaaaacaggggctgggaagtcgattacaggccaccgaagccagacttcccgtgttgagtgaacaagtttcgctgctgatgttggatacccagcgcattattcagagtatccagcttatcaaatcactgggcggcggctatcaggccgcaaaaaccgagcaggacggataa

SEQ ID NO: 386581 - DNA, 1035 bp, Salmonella enterica
atggaaagctcgccgaagaaaattcctcgtaacaaaattcccgccctggctctggttctgctcgcgctggtcgtcatggtgtttgtcatctggcgggtagacagcgcgccctcgacgagcgatgcctatgcatccgccgataccattgatgtggttccggaggtaagcggtcgtatcgtcgaactggcggtggtggataaccagcaggtgaaaaaaggcgatctcttgttccgtatcgacccccgcccctacgaagccagtctcgctaaggcggaagccttgctcgccgcgctggataaacagattatgctgacccaacgtagcgttgacgcgcaaaaatatgccgccagttccgttgaagcgacggtcgccaaagcgcgtgcggcggcgaaacaggccaacgatacgctgcgccgtaccgagccgctactgtcggaagggtttgtttcggcggaagatgtcgatcgcgcaagaaccgcgcagcgtgctgccgaagccgatctcaatgcggttttattacaggcgcaacaggccgccagcgccgtgagcggcgtcgatgcgctggtcgcgcagcgcgtcgcggtacaggcggatatcgctctgactaaactgcatctcgacatggcgacggtacgtgcgccctttgatggccgcgtggtgtccttaaaaacctcggtcggtcagtttgcttccgcgatgaaacccattttcacgcttattgatactgaccactggtacattattgccaacttccgcgaaaccgagttgaaaaccattcatgccggaacgcccgccactatccgcctgatgagcgacagcggtaaaacgttccagggcaaagtagactccatcggctttggcgtactgccggacgatggcggtatggtgattggcggcctaccgcgcgtatcgcgctccatcaactgggtacgcgtagcccagcgctttccggtgaaaatcatggtcgaaaaacccgatgcggcgctatttcgcattggggcttcggcggtcgccacccttgagccgcaaaaatga

SEQ ID NO: 386582 - DNA, 393 bp, Salmonella enterica
atgacgaccgttgtttcatcgaggttgaccgacagcgccatagctggcgcgacggcgaagccgtcatcttcgacgaaacctacgtacaactgggcggaaaacaaaacggaacaaacgcgtattattctcttttgcgatattgaacggccaatgaaatggcgctgggcacagactgtaaaccactgggtcggcgcgtcattgatatctgccgccagttcgccaaacgatgagaatgaccgtaccggtgctattaatcgcatcttcaagtacattcacgcggcgcgcgatgccgggcagagactgaaaaagaaaaaccgcactctttatgatgtgttgaaatatcttgttattgcatcgatttttgccgtgattattctctccagcgtcttctga

SEQ ID NO: 386583 - DNA, 267 bp, Salmonella enterica
atggacaatacgtatattggtgagcagatacgcgtctccacacgctatactaataatttaaaaaaatggcgtgacaatgatcacataagtcacactctgttcgatttaccccgtgatttatatgatggcgagacacaaaaattaaataataagcgcctgtttttcaaacagataaatcataatccactgctcccatttactccacctgcccatcgtcagagggcgacaccctctgaacatcgctatcgcaagaaaataatgacttaa

SEQ ID NO: 386584 - DNA, 780 bp, Salmonella enterica
atggctgaacagcttattgccgagcatatccgctacgccgtcgctggcaaaccccttattcacgacgtttctcttaccctttcgccgggggagcttgtcacgctgatcggccctaacggcgcgggtaaatcgacgctactgcgattactgactggctatctcccgcctgctgacgggcgttgcattctggcgggaaaagcgctgacgcagtggccggcgcaaacgctttcacgccgtcgggccgtaatgctgcaacacacgcagatgggtttcgactggccgatagaggccgtgatcggcatggggagaatgccctggacgccgtatcctgaatcgtcagttattcagcaagttatgcagctcaccggctgtctaccgctggcgggaagatattatgccgccctttccggcggcgaacgacaacgcatacaatgcgcccgcgctctggcgcaactatgggatcaggacgcgccgcgcggctggctttttctggatgaaccgacctcagctctggatctcttccaccaacagcacctgctgcgactgctgaaatcgctgactcgtcagggacatcttcacgtctgtattgtgctacacgatcttaacctggcggcgctctgggcggatcgcattattttgctgcatggcggcgcgattgccgcacaaggatcgccaaaaacggttttacagactcgtacgttatcgcgttggtacggcgccgatgtgcaggtcggcgttcacccgcagaccgacacgccgcaggtcttcctcgcgccctaa

SEQ ID NO: 386585 - DNA, 987 bp, Salmonella enterica
atgacgcggcggatcacgttttcgttatacgcgcttgccctgttgttgacgctaggaacagtggcggcaagcgggtttggcgcgctgcgtctacccatcagtctgatttggcacgatgacgctttgcgccagatctggtttaccattcgcctgcctcgcgtactgcttgctctggcggtcggcggttcgctggcgctggcggggtgcgtgatgcagggattatttcgcaaccctctcgccgacccgggtctgcttgggatcagtagcggggcggcgttggccgttgcgctgtgggtggttttaccgctaactctgccaccgctactgatgctctacgccccgatgctggctgccttcctcggtgcactggcggccacggcggtgattttcctgctaagtcgacagcaagacggtacgctatcaaggctattactgattggtatcgcgataaatgcgctatgcggcgcggcggttggcgtattgtcctgggtgagcaatgacactcagttgcgccagttttccctgtgggggatgggcagtcttgggcaagcccagtggtcaacgctgttggcagtcgcgtcatttatgctgccgacggtattaattatctggcgacttgccgccacgcttaatctactgcaactgggggaagaagaggcgcactatctgggcgttgatgtacgaacgatacaacgtgtcttgctgacaggcagcgctctgctggtcgctgctgcggtcgccgtcagtggaattatcggttttattggtctggtggtaccgcatctgattcgtatgtggctgggcgccgatcatcgcgcgacgatccccggttgcgtgctggcgggcgcttttttactgttaatggccgataccctcgcccgtactctggtggcgccggcggaaatgccggttgggctattaaccagtttgctgggagcgccgtggtttctgtggcttatttttcgtcggggagcatcgcatggctga

SEQ ID NO: 386586 - DNA, 822 bp, Salmonella enterica
atgaaagcattgctcgccctggttatcgccttgccccttgccgcgttggccgccgcccaggaaagaatgatcgcgctcggtggcgatgtgacggaaattatttacgctctcggcgcgcagtcgtcacttgtcgcccgtgatagcaccagccagtggccgccagaagccgtcacttttccggatgtcggttatctgcgccagttgaatgcggaaggcattctcgccatgcggcccaatctggtgctggccagcagccaggcacagccatcgctaacgctcaaacagatagcgcaaagcggcgtcaacgttatcactataccgggcgataacgacctcagggcgatcgacgaaaaagtgcgtatcatcgcccaggcgacaggccgcccggcagaaggcgaatctctgcgcgcgacgctgcgcaaaacgattgctgccctgccgactacgacgctcaataaacgcgtgctgtttattcttaaccacagcggtatgagcgcgatggccgccggacaacacacagcggcggatgccgctattcgcgccgccgggctgcaaaacgctatgcaaggcttctcgcgctatcaaccgcttacccaggaaggcgttattgccagccgccccgatgtggtcgtggtgccgagagaaggactcgcggccatcggcggcgaggaggctctctgggcattgccaggactggcgcaaacgccggcagggcgacataaacaagtactggcagtggatgatatggcgctgctcggttttagcgtgcgcacgccacaggctatccagcaattacgagccaaagcggagtcgttgccctga

SEQ ID NO: 386587 - DNA, 1029 bp, Salmonella enterica
atgaatcattacatccgctggcttgaactaaaaaaacaacatccggaaatgtatgcgcgtgatatcgcaaaactgatgcgcatcagcgaagcggaactcgccttcaccagagccggtcatgatgcccggcggctacgcgacgagatacatgagatcctcgctgcgctggagtctgtgggcgaaaccaaatgcatttgccgcaacgaatacgcggtccatgaacagattggcgcctttactcatcaacatctgggtgaccataccggactggtgctgaacccgcgtgcgctcgacctgcgcctgtttcttaaccagtgggccagcgtatttcatctccgggaaaccaccgcccgcggcgagcgccaaagtattcagttttttgaccaccacggagacgcgctactgaaagtgtacatgacggagaatacgcatcagccggcctggaaagcgctgctcaaacgctttaacgcgccagggaatacgccactaacgttgaaagacgccgatatgcccacaacgcctttaactgtcgatgctgccgccgttgagcgtgaatggcgcgcaatgaccgacgtacaccagttttttaccctgctaagacggcacaacctgactcgccagcaggctttcgggctggttgccgacgatctggcctgtaaggtgccgaataacgcgctggcgcagatccttgacgcagcccttcatgcgggtaatgagattatggtgttcgtcggtaacagcggctgcgtgcaaatctttaccggcgcgattcaaaatgtcacgccactgaaaggctggctgaatatcttcaatcccacctttacgctccatgtgcgggaagagaacattgctgaaacttgggtcacgcgtaaaccaaccgccgatgggcacgtcaccagtctggaattgtttgctcacgacggcacacaaatcgcccagctttatgggcaacgtactgaaggggaaccggaacaagcccagtggcgacaacaaatcgacgctctgatgctaaaagggctggcggcatga

SEQ ID NO: 386588 - DNA, 1986 bp, Salmonella enterica
atgttacgcctgcaatctggctttatgcgtccatcgctactggcgctggctatcaccagcgccttctccggcgcggctttcgcgactactgacacgcttaccgttaccgcgacaggaaatccccgcagcgcctttgaagcgccaatgatggtcagcgtgatagataccgccgatccggaaaatcagaccgccgcctccgccgccgatcttctgcattccgttcctggcatcacgttaagcgggacgggaagaaccaacggtcaggatgtcaatctacgcggctacgatcgtcgcggcgtgctggttctggtagatggcgttcgtcagggcactgataccgggcatctcaacagtacattcctcgacccggcgcttatcaaacgtgttgaaattgtgcgcggcccttcagcgttgctttatggcagcggcgcgttgggcggcgtgattgcttacaacaccgtcaatgccagcgacctgctgatggaaggccggcagtacggcttccgcgtgtttggtacgggcggcaccggcgaccacagtttgggcatgggcgccagcgcttttggtcgtactgataacctggacggactgatcgcatggtcaagccgcgatcgcggcgacctacgtcagggcgacgggtccacggcaccaaacgatgagtccatcaacaatatgttggcaaaaggcacctggaaaattgacggagcgcaagcgctaagcggttcactacgctattacaacaatgccgcacaggagccgaaaaatccgcaggaagttgcggcgaccagcgccagtaatccaatgacagatcgctcaactattcagcgcgatatgcagctctcttataagctcgcgccgcaaggcaatgactggctgagcgcggagagcacagtgtactggtccgaagcgcgcatcaatgcgcagaatctcgacaatacgaatgaatatcgcgagcagaccaccaaaggcggaaaagtggaaaaccgcagccgcctgtttacggattcgtttgcctcacatctgctgacctatggcggggaatattatcgtcaggaacagaagccaggcggcgcaaccaccggttttccggaggcgaaaatcgacttcagttccggctggctacaggatgagatcaccctacgcgacctgccggtcaccttgttgggcggcactcgctatgataactatcgcggcagcagcgacggatatgccgacgtagatgccgataaatggtcatcccgcgcaggcatgaccattagccctatcgactggctgatgctgtttggttcttatgctcaggccttccgcgcgccgacaatgggagagatgtacaacgattcaaagcacttttcgattggccgcttctacacgaattattgggtgccaaaccctaacctgcgtccggaaaccaacgcaacgcaggaatatggcttcggtctgcgctttgacaatctgatgctgtctgatgacgcgctggagtttaaagccagctattttgataccaacgccaaagattacatctccactaccgtcgattttgctgcaagaacgaccatgtcttataacgtgccaaacgccaaaatctggggctgggacgtgatgacgaaatataccgccgatctatttagcctggacctggcctataaccgcacccgcgggaaaaatacggataccggcgagtatatctccagcattaaccccgataccgtcaccagtaaacttaatattcctctcgctcatagcggtttctccgttggctggatcggtacttttgctaaccgctccacgcatgtcagcagccaatacacgaagcagccgggctatgcggtaaacgatttctacgttagctatcagggacagcaggcgctgaaaggtatgaccaccacgctagtgctgggcaacgcctttgacaaagcgtactggtcgccgcaaggcattccgcaagacggacgtaacggtaagattttcgtaagctatcaatggtaa

SEQ ID NO: 386589 - DNA, 180 bp, Salmonella enterica
atgcataacacactggcaaccaccaaaaaggctaatgcgccgctctcccctacccgtactaaacgtcagattgatagcagaacgttgcttggcgaagagggatgggcgctgattgaacataacggtcagcattacctgctgcgccagacgcaatccggaaaactgatcctgactaaataa

SEQ ID NO: 386590 - DNA, 231 bp, Salmonella enterica
atggacttctcccgccccggaaaaccgacagataacccgtttactgaatcgtttaacggaagcctgcgggatgaatgcctgagtattcactggttcctgtcgctggaagctgcgcaggataaactcgataaatggcgcagggaatataatcatgagaggacgcattcatcattaaatgacatgactccggcaaaattcatccgaagtctccagaaaaacaaagctctctga

SEQ ID NO: 386591 - DNA, 378 bp, Salmonella enterica
atgaactataaggaaacacaccggatttattgtctggaaggcctgaatttgcgcaggaaacgtccccgcaggcatatcagtgcggcacaccgtcagcagcgtccggccccgacgtacatcgatcagtgctggagtatggatttcgtgtcggatagtctgtttaatgggcggcgcttccgggcgctgactgtagtggataactttagtcgggaatgcctggcgatccatgccggaaaatcattgaagggtgaggatgtggcccgcgtaatggaagcgctgcgggtgctggataagcgtttgccggtacgtattcagacagataacggcagcgagttatcccgaaaagcctggataaatgggcgtatgagcacggtgtga

SEQ ID NO: 386592 - DNA, 537 bp, Salmonella enterica
atgaataaattcctattagccggaagcgtcggtatcgctctgttgtccgcttctgtcagcccagtatgggcagatgataataccgggacgttttcacttggatatgcgcagtctcatacgaatcatgccggaacgctacgtgggatacggctggccaataattatgaaatgtcgccggactggggtctgacgacctccttttcatggcttaatggaagccaaagatattctgatgataataataacgggcgggtaacaacccgctattactcgctgctcgcgggaccatcatggaaaataaataatcagtttagtctatatagtcaggtggggcccgtattattacatcaacgcgaccatggcgctgaagattctgccaccaaagtcgggtatggttattcagcaggggtagcttatacgcctgtcagtgatgtctccgtgacgctgggatatgaaggcgcggattttgatgccacccataatagcggtagcctcaacagtaacgggtttaacattggcgtgggatatcgcttctaa

SEQ ID NO: 386593 - DNA, 669 bp, Salmonella enterica
atgagtgagacagcgttaatatattgccgcctctggccagtaacggcggcgctttctggcctgctgtctccggcatatcgcggaaatattctaccactttatagccaggctcagttggcaggcgcgcttcgtgccaatcccgacagtccagtagtgttgggatttaacccgcatgagcatgtggcagaactgtatcatttacgattattgttgtctggtcggagggtaatgttcgtcgcgccgcgtttttactggacggaccgccgtctgccgataatctgcggtatagcctcatgtcagttcagtacatgggatagcctgtgcgacccgttgtaccgacgtagtgagttacgacattttatgcgactgccaatggtggacaaaccgatggaggttgatgtcgatgacaaggcgcgttatgtgacaggtgcagcgcttatccggttggtgaatatgtggctgtacagacaaatggcggaggccgaactgaacaaatatgagattatgacgctgctactcctgtcagaaagccgaagaggaaagctgacatcacgagcgcttagttattacaaaaaccgggggatgtacaaactgggcatgacgggtagcctcatcagcctgtaccggggcgtaaaagtgcgcacagaattacaggcggaacttccctga

SEQ ID NO: 386594 - DNA, 528 bp, Salmonella enterica
atgaaatctgataaaaaaaacacgaccaatacaggggcaagccctgtcgccaacaagggagatttatccggttttctgatgaaaggtagccagaagaatcatggagaataccgcttacctgcagatatgcaaccttgggctaatgaacctctgtatttgattattgccagatggtgcctacaacagaaccgttggataaatcgtaacgatgtcgccgccgccttttacctgacagagcgcagggcttcactgcagttggcgtatataaaccagaaaaaaaatcgaattgcttgcagaacccgtatccatgtttccgaccatcaaggacactaccacaatgagatatgggtcgatcacatactgtcttcccccatagaaaattacgtcagatcatcgtcatctcgtcgacggagcgaaccgtcaaagagcagtccccaaaccaggcgcgtaggcagtggaatgaccggtcacggatgcctgtgggaaaccatactcagacgagtacgggtggagcagggtgatgagtga

SEQ ID NO: 386595 - DNA, 684 bp, Salmonella enterica
atgggaagctatatcaacgcagataccgacagcgaaggtaaccgcggggcagacggtagccagttcagcgcgtcggggaatgttgatggctataatctggggctttacgctacgtggtttgctaatgcgaaggatcatagcggcctttacgttgacagttggtatcaatacggaatctataataacaccgtggacaacggcgatgtgggatcaactgaatatgactccagcgcgcatgcggtctcactggaaaccggctggcgctatgacatggcgttatcatcgcagaatactttcagcttaaccccgcaggcgcaggtcgtctggcaacaatataatgccgatagcgtaaaagatggcaacggaacgcgtattgatggccaggatagccatagctggaccacgcgtctgggtctgcgcgcggacggtaaactccataaagataacggcgtgattcaacctttcgtcgaaatgaactggctatataccagcgacgatacggcggtctcattcgacgacacggcagtcacgatgaatgtgcctgaaaaccgggccgaacttaaggcaggtatccaggcaaatatcagccagcagtggaatgttacgttgcaggctgcgggtcagaaaggcagccatgactatagcgatctgaacggcagccttaatctgcactatcgctggtga

SEQ ID NO: 386596 - DNA, 2670 bp, Salmonella enterica
atgaaaaaaagaaaatttgatctaaaccacattactcgccagcttgtctgtgcctgcccgctacttttcctgcaggcggcaagcgctactgatacacatattaccggttcaacccaaacgcccgttacccttggcgctggagatgcgttatatgttgatgtcgggggtagcctgatatcatccggcagtacggaagtaaccgcgaccggtgacgcctctatttatattgatggccgggtgggatacagttctaacgacaaggatacgtcagattacggaaattctgtatatcttgaagggaacaattacgtcaacattagcaatacgggtatcgtaatggctaatgaaaatcgcggcaatgccatctatattgaatcgggtgataacactatcgataatatgggtgacattggcgtcatcaatgatacacagatagcggcaaaaggcattaaaataagtccaaccgcaggaaaaacgacaataaataacggtaaagatggcgtaatcacgggcgcatcaggtgcgatttacgttgatagcggcacgcaggaagacagtggcatgctggaagtcaataatgatggcataattatttccagtagtaacggtgcaggtattgcaattaatagttcctctaatatcgaaatcgataatagccagtcaggtcagatagtcggaacattttatggtatctatatgaacgcttccggcggacatatggatattaataatgaaggtgtcattgagggaaccaatgacacgggttatggctacggcattgacgtaaacagagggtctgcggatattgttaatgacggccttatttcaggtggcgaaaaagaagatggctccggccggttttcgtcaatatatctggcaactggcggcaacaccgtgacgctaggtactggctcacaggttgaagggagtatcaattcggcgcactcgcttaatacgattaccctcaccgggacaagccaggaagatgatgacatcactggtttcgattcactgaccatgaaaggtgaagattgggcactgtctggcgatatcaatatcacgggcacgtcggccgatgcgctgcatgttcaggaagggacattaacccttagcggtaatatgaccaatgcgggcggcacgacgatcgacccggacgggtcgctgattgcagccaatacgcaggctttaggcagtggcgatattgataacagcggcgagttaattctggatgctggtgcatttgctctctctcagcaaagtatcgttacgcatagtggcggtgttttggtcgtggactcaggcagtacgctggacgtgggtaccctgacccaacagcaggatagcgaactggatattttccttgatatgcctgtcgggcagcccatcattaccggcgatcagattaacctcgatggcacattaaatattgtcggcattagcgggacgccggcagcccagagcgtcacccttatcgatgccgatcaagctatcaacggccaatttgatgccctgaagattgctggacaggatcaagtggatttcctgaatatcagcggagacatcgaccctacagacaattcaaaatatacgctcagcgccatgttaagttggtattccggagacgaggtctcggcacagcccgccacgggctcatttactcttgttaacccggaagactcttttaccgtcggagtggcgcttgatgataccgatcccggcgagaatagcgactgggatggacgctcgttagcgaaatatggcgcaggcacgttgatccttgatgctcaaaatagctacagcggagagacaaccgttaatgccgggacgttgtggctgaccgataatggcgtcatcggcgccgccggtagccagcaagaggttgacgtttatacgagcgcagtcttcggcggtagtggcgtagtcaatggaaatgtgaataaccagggggctatcagtttcggcgataccacaaatccctcctcgctgactatttatggcgacgttaccaatagtggaagcatcgtgagtagcggaaccacaccgggtaacacgttatacatcaacggtaactatattggcgataacggctcattgaccttgaatacacagcttggagatgacgcttctccgaccgataagctcgtggtgacgggagatacttccggcaatactacgctctatatccagaatgtggatgggaccggagcgctgaccaataacggtatcgaagttgttgacgtaggcggcgcttcaaacggggcctttactcaaggcaaccaggttcagattggattatacgaataccgcctgtatcaggatggtggcgactggtatttacgctcacaggacactgacgatggcggcgacgatggtggcgatagcggtaatggcggcgatgataacggcgggaaacaataccgggcagatatcggcgcttacctgggtaaccaatggatggcgcgcagtctacagatgcaaacgttgtttgaccgcgaaggcagccaatatcgttcagcgaacggcagcctgtgggcgcgtttcaaagcgggtcgcgccgattccgaagccgctggcggaaaggtcgataataaccataactactcgcagtttcagcttggcagcgatctcatggcctggaatgacggtagccagagcgtaacgctggggtga

SEQ ID NO: 386597 - DNA, 156 bp, Salmonella enterica
atgtttttgtgtataggcaaagcgcacgaaatgtacaaatcttacgaaaggggagactgcgggacaattggcaggcgtaacacgcccggctttgggctggctgtcatcaaataccggggcggcattagggaaacagggaatagaggggaggtttag

SEQ ID NO: 386598 - DNA, 1086 bp, Salmonella enterica
atgacgaccaagacaatacctgcgaatgatattaaaaatacatattggatgatgggcctgggattactggcagtcagaattatccagggttttatttactggggtggggggagtcgacgatttatttatgcgccggataaactgaatccggaggcgcctcactggatggcttataaatttcagaccgccatgcccggcgctttgttgggactggagcacgtgatttcgtttatgctgcagcatttctggttgctgtatgctggcgtcattctcttcagcgcggctgagttgtttgccggtctgtttctgatgctgggtctgttcacccgtatttcggcgatcctgtcgatgttattctccgtattgctcatgctgatgtttggctggcagggggcgacctgtattgatgaatggacgatggcggcctgtaacctggcaatgggaacgacgctctttctgtgtggctcaaatgagtatgcgttggataacgttcttctgaagaaaaaaccgcatctggcggacagtaagatgttccgctggtgctgtggctcacttcccataccgctcccgcagggaagttataaaaaactggcattatggttgttggcattcgtggtgatattcgatgtgggcacgtacagttattaccggggctcggtagtaacgccttaccatcatgggcctgttagcccaaccacgcaccatatcagtttaacgcaaggaaaactgatggcggatgggcgtgttgaattccatgcttatttggacgcgggaacgcctgaggcgccggaacatattatggaggcctggttgaaagatgaaaaaggcgaaaaccttattcactgggataccgcgatgttgtccgcgttgccgaaagatcatttccataatgattacgcttataaccagttcaaaaccagtcgctatgggatacaggccattgtcggttcggcggcgacgataaccttgcctgcaggccggataagagaaggggccgatatattgccggatggacctattaccctggtgctaatggatatggcagggcatacgttcagcgtaccgctgacgcgggagagcgagtga

SEQ ID NO: 386599 - DNA, 918 bp, Salmonella enterica
atgctggataagaccgtattttttatgcatgttgtacgttatggctccatatcagaagcggcaaaagcgttccatattacagttgccacaggatgccgttggctaaaagaacttgaaacaaaattaaacgttccgttacttatttccagcacgcgtaaaagccagccgacagaagccggtatgttgttatatgagcgttttaataaagtttatctggatatacaggatatttataaagaaatagaaatgtttaataatacggatagcggtataatcactatcgcatcaacgccacttttttccagatattttctttcaaagatcgttggtgaatatcttttcatctctccgcaggtgagttttcatatcgaagaaacggcctgggtggatgagaagaaaaaagatgtcgacttctatatacgagcgggagcaacctatcgtggtcacatggagcctgacagtcagcttataaaaaagattctttttcattaccctttagtggtgtgctgttcgccaggctatattgcatcttatggtgaaccagtatcaccagaagagcttaaatatcataactgtatttatacctcgactttagttggagggaatcgctggcagtttgaaatggatggcgatattacggctattgagatagcaaaaacggtggaaatagagaatagcgagttccttaaagaggttgctttagctggcggtggtatcgcctgtctgccattgcctttagtcaaaaaagagctggaaaacggggaattgatctccatcttaaacgcttatatgaaaagtaaatttgaaataagtctctggttccgttcgctgaaagtcatgccttcgcgctgtcttaaatttaaagactttctggtaaaaagaacactggagattaaagatatgattaatttttcttaa

SEQ ID NO: 386600 - DNA, 726 bp, Salmonella enterica
atgaaaaataaaatctgtatcgttaccggcgcggcgcaaggcattggcagaaaaattgttgaatatttctcacaagccggcgcagcaaaaatttacgcctgtgatattaagcatggcgaaagcgaaactgtagaaataaagaatatcgtccacgtaacattaaatgtttgcgatcggctggcgatccagcaaatgattaaccagattaaacagaaagatggacgaatcgacgttctggtgaataacgcaggtattactcgtgataatctgattaataatatgacagagcaggagtgggatcaggttatagatattaacctgaaaggcgtctttaatataactcaggccgtcgcaccattaatgatggaaaataaatctggctccattattaccatgtcatcaattgtcggtaccgacggcaatatagggcaaagtaactacgctgcaactaaaggcggtgtgattgccatgacgaaaggatgggctaaagaatttgcgcgtaaaggtgctaatgttcgtgtgaactgcgtggcgccaggctttgtcgttacgcctatgaccaaagatctgccagaaaaagttgttaaccatatgattgaaaaaacacctctgggccgtatggcgacagcggatgatattgctaatggcgttttatttctggccagtgagaaagcgagttttatcactggccagacgttaaaaatagacggtggattggttatataa

SEQ ID NO: 386601 - DNA, 1209 bp, Salmonella enterica
atgaaaagagtatttattgttggcgctaaacgcactgcgcttggcgctttcggcggtagcctgaaaaatttacctgccagtagtctggcggcgatcaccataacagcagcgattgcgcaaagccagttacatccggaaaatatcgatgaagttatagtaggaaatgttctgtctgccggacaagggatgggccctggcagacaagctgcgctaaaagccgggattccttttaccataccggcctatacattaaatatgatctgcggtagtggaatgaaagcggtaattgacgccgtctcaaaaatcaaaagtggcgaccttaatgtggtcgttgcggcgggaatggaaaatatgtcgcaggctccttaccttattgatggcacaacccgttttggcattaaaatgggtcatcaacaaatgacggattctcttattgctgatgggctgacagacgcattttacctctaccacatgggggtcacggccgagaatattgccaaaaagtacgcgatcagccgggaggcgcaggatcgttttgccttaaaaagccagcaacgcgcggttcaggctgttgaacacggacgatttgacgatgaaattgttccagtaacgatcgccagtcgtaaaggtaacacgcaattcaagcgcgatgaatatccgcgaaaagacactactctggaacaactcgctaaattaaaacccgcctttgataaacagggtacggtgactgcaggtaacgcttccggtattaacgatggcggagttgcgctggtactggcttctgaggaggcggtaaataaatggcgccttacgcctttggcggaaattatcgccaccgggcaaggtggcgtcgatccttctgttatggggcttggtcctgtacccgcgatcggccaggctcttaaacacgcgcagttgtccctacgcgagatcgatttactggaaattaatgaagcttttgctgctcaagccataggcgtcttacatgaactgtgcgttgaacactctgtcgatgcgcgctggtttgaagatcgaacgaacgtcaacggcggagctattgcccttggccatccattaggcgcatccggtgggcgtattatcgtttcattgttatatgaaatgattaagcagaataaaaaaataggccttgcctcattatgcattggcggtggaatgggaacagcaattattattcagctaacaaagtaa

SEQ ID NO: 386602 - DNA, 1557 bp, Salmonella enterica
atgctttcaacaaaacagtttactgcgcagcaggccgtcgagttaattcaggatggcgataaggttattttaggcggatttattggcgctgtcgtacctgaagctatcgaaaaagcgattgaagataaatttcttgcagaaggacatccctgtaacctggggcttattttcgctgccggacaaggtgatgcaaaagagaaagcgattaaccgtctggcgcatgaaggattggtttccagcgccattggcggtcattggggattaatccccggcttacaaagactcgccagcgaaggaaaaatcacgggttataatttgcctcagggcgttatttgccacttattacgcgatagcgcggctggtaaagcgggaacgttaacgcatgtcggtttgggtacttttgtcgatcctcgtatagaaggcggaaaaatcaatgcaaaaactaccgaagatattgtaacttacatcaatattaatgatgtcgaaaatttactttataaaaaacttgacgcgaacattgcgatcctgcgcggtactacagccgatacgcacggcaatatcacgatggaggatgaatgtcttattctggaaaatctggcggcggcgcaattagtacataaccaaggtggaaaagtgattgttcaggtaaaacgtattgttcccaagggttcgttagatccgttacaggtaaaaattcccggtatttttgtcgatgctcttgtggtagcggatggcgaagcacatatgcagaccttcgcagaagcaatgaatgaaaattatgttggccgtggtgaaaaagggataagagagaggaaaatacgaccacttgatgtgaaaaaagtcatcgccaggcgagcggcgatggagctcaaaaagaatgcgattgttaactatggaattggcattcccgaaattattgcgcaagttgccgatgaagaaaacgtcacgcaggaacttatcgcaactgtcgaacccggtgcaattggaggatcgccggcgggggggctttcttttggcgcctcagcgttcccggaagccatcataacccaggatcagatgtttgatttttatgatggcggcggtctcgatcaggcttttctgggcctggcggaaaccgatgccaaaggcgatctcaatgtatcaaagtttggcgtgaaaattgctggctgcggcggcttcatcaatattacccagaacgctaagcatgtctttttttgtggttcgttcaccgcaggcgacagcgacattattgttgaagaaggtaaacttattatccgacgcgatggtcagattaaaaagtttattaagcacgttcagcaaattaccttttcatcagatacggcccgtaaaaatcacaagcctgtactgtatattaccgagcgagctgtgttcaggctggcggccgaaacgattgaactgattgagatcgcgcccggtatcgatttacaacacgatatccttgataaaatggaattcagacccacaattagccctgcgctgaaagaaatggataagagaatatttagcgaggcgttaatgagtttatcgttaaaatag

SEQ ID NO: 386603 - DNA, 813 bp, Salmonella enterica
atgcgcgggttaatgctccggtcatttagcgccggctattccactcagccggttattgcagatctcaacgttcccttactgccgcgcgggaaaattaccgttttgctggggccgaacggctgtggtaaatcgacgttactacgttcattggccgggctgaataaagccgacggcgaggcgctactggatggcgaggatcttatgtcgttatcgcttgccgagcgggcgcagaaggtcgtgtttttgccgcagtcattaccgcagggggtacatctgcatgtactggagtcgattattgtggcacagcgggcgtcaggcggcagagatgatgcgcagggcagggcgcaggcactggctatccttgagcagttaggtataacgcatctggcgttgcattatcttgatcaactttccggtggtcagcgacagttagttgggctggcgcaatcgctgattcgtcgcccggcgcttctgttgctggatgagccgcttagcgcgctggatttaaactatcagtttcacgtaatggatctcgtgcgccgggatacccaggcgcaaaatagggtgacggtcgtcgtggtgcatgacattaatgttgcactgcgtcacggtgaacatgtgttgatgctaaaagacggcaggctggttgccagcggcgcgccggagacggtgattactgctgaacgtctggctgaagtgtaccgggtgcgaggacgcgtggagcgttgttcacagggcaaattgcaggtagtgcttgacggcgtgataggcgtaaaaaagcttttaagcgatattgcaggcccggcaggctaa

SEQ ID NO: 386604 - DNA, 978 bp, Salmonella enterica
atgaaacgtgcacctattattccaaaacacattgtgaaaaatacaccttcagaaataatacaaccagctgcagccccagctgcaccgatggtagattctttaattgcccgcgtaggtgctatggcccggggaaattcgattttacttccggtttgtggccgggaggtcaaattcacccttgaagctattcctggagatgctgctgaaacggcaactcaggtctggtccggtaatgaacgcgaccaggaattgttgactgaagacgcgcttgatgatctgattccctcctttttattgagtggccagcagacccccgctttcggacgtcgtgtatcggggatcattgaagttgcagatggaagccgccgccgcaaagccgccattctcacttcttcagattacagaatcctggttggcgatctcgatgatgagcagatgatggcattatctcgattaggtaatgactatcggcctaccagtgcttatgagcgtggtaaacgttacgcataccggcttgagaatgaatttggcggaaatgtttctgctcttgctgatgcagaaaacatttcccgcaagattatctctcgctgcataaacactgcgcgattacctaaatccgttattgcactgtttacccaccctggcgagctttctgcccgggccggtgaatctctgtacaaggcctttactggaaaagatgaattattaaaacagcaaactgatcatcttcatgaacagaagaaagttggtgttatctttgaagcggatgaactcattgacttactgactggaatattaaaagactcttccagagaaaaagctaacctcagcacacggcatcagtttgtacctggggcatctgctctttacaaaggtgataaagttattttgagccttgataagacgcgcttaccaccagaatgcattgtgaagatagaaaatattcttcgggaattacaacaaagtcatacttcgtaa

SEQ ID NO: 386605 - DNA, 492 bp, Salmonella enterica
gtgttaatttttcttgttcccgaccctgagccgacgagatctaccgcaccactattcaccgaacgctgtccggcgggttttccgtcgccagctgcggactacaccgaagatgaactggacctgaacacttactgtatccggcgtccggcctcgaccttttttgtccgtgctatcggggattcaatgaaagagctgggcctgcattccggggatcttatgattgtcgacaaatctgaaaagccactgcagggtgacattgtcatcgcggaaactgatggagagaacggttcgggaactcaatggagaaagcccccccccaaacagcagatagtctgcagccggagctttggagaacgagtcacgacttatgaaacgatgcgacaggcagtctgtcagcacgctgaacatgccgccgaaaagctgcgtggggaacggaagttctgcaggcatactgccgtgtttgtgaaaacatcgccgttcgccgtaaaatga

SEQ ID NO: 386606 - DNA, 954 bp, Salmonella enterica
atgaaaatttatatcgatgacggatcaactaatatcaaactccagtggaaggatgatgaggtcaggcagtcaatcagccctaacagctttaagcgtgaatgggccgttgcgtttggtggacaacaggcgtttaactatatgttgaatggtgagcaatactcttttgatcctatcagccctgatgctgtggttaccacgaacgtcgcctggcaatacagcgatgtgaatgttgttgctgttcaccatgcgttgcttaacagcgggatcgaaccttgtgaagtcgatgtggtagtgagcctgcctttatctgagtattacgataaaaataaccagcccaataagaccaacatcgaacgtaaaaaagcgaatctgttgcggccgatcgaactaaatggtggtaagactttcaccattaagcatgttgaggttatgcccgagtccatccctgcaggttttgaggtggtaaaaaatctcaacgaactggattcactcctgattgttgatttggggggaaccacgcttgatatttctcaggttatgggaaaaatgcgcgggatttcgcgtatttatggtgattcatctctcggggtatcgttgatcactggtgcggttaaagaggcactgtccgtggccagaaccaaagggagtagctacctggcggacgatattattattcatcgtaatgacacttcttatctctcatcgcgtatcaatgacacatcgcgaattgaactggttcgtgaagcgatagagaacgctcaccaccgccttgttaacagggttattgaagccataagccgctttgagggatactctcatgtgatggtcatcggcggaggtgctgaattgatcgccgatcatgtgaagaaatactgtggtgtcagggaagaacgcttctataaaacccgttcatctcagtttgatctcgttaatggcatgtaccttattggataa

SEQ ID NO: 386607 - DNA, 375 bp, Salmonella enterica
atggatacgcgacgcaaaatcacgttttacctgaatcctgaaaccaacgaagcggaccgttttgtctgccagaaaacagatgaaacaccccagggagaaaggggacgtttatggcgcgccgcgctgcttacagggtttgcttttggaaagcaggatgagcgtctgccattcctgttcagtgagttactgaacaggaatacatcgttcgacgatctgatgcagttgcttaaagcggtttatccacgtgaagttgaagcccttttacagggcaagataaaggaaaacgtgccagctgaacgcgctgatactaattcctcctctcaaacccccagtgctgatgatgaaactcgcagtaatgcaaaagggttattctaa

SEQ ID NO: 386608 - DNA, 330 bp, Salmonella enterica
atgccggtacttgatgccagagaacatggaaagcttatccgccagttcctgaaggctgcccgggagatacaggagattggtcttattggggatattgagcatcagacgctgtctgaaattcagtccaggctcataaagatatcttcgcccggtgctggttataagcaggcctatccaagacatggtagtccctgggaagaagctgaaatacagcgccttattgaactggctggttctgatagtttcgatgtcgggaagtttgccagtgaataccagcggcggccggagtctgtcattaaatacatgaaaaagcttgggctgacagaatag

SEQ ID NO: 386609 - DNA, 540 bp, Salmonella enterica
atgccgaactggtgtgccaaccgactgatgttcagcggtattaaaaacagtgatgccctcaaaatgtggattgccggaggtgaaccgtctctgcatcgccgcgccagaaaagaaggtatccagcttttccttgcaggctgcgcggggatactgcgccccctgacagaactgtgttacccgccatacccgcagttggttgctcacgggatggccgcagacaaccggccttcagtacaggcgtacagcgactggctggcgatgtttatggccggagctgtgctggatgtggaaacctgccacaaactgcaccggtgctggcaggacagccatatctgtcatgcccgctgggcgaccctcagtgagccggaacagcaggtcatccgtcagctgtaccagcaaaaatctttcgactgggggggacagtttccggcctgcgccggtggaggcatggtgggacagcctgtgcgacggggagagcatcacacctgttgccgaaccgatggatttccgcgacgtgctgccgacgcgtctggatattga

SEQ ID NO: 386610 - DNA, 141 bp, Salmonella enterica
atggaaacatatctgaatacctggcttatgggattaaatgtcgacgtcggtggcactgaaatgatggtgtattacctggtttccgcgactgacctggaacaggccgaatcgggcgttctggaaatgggacgcatcgggtga

SEQ ID NO: 386611 - DNA, 684 bp, Salmonella enterica
atgtcccgttttatcctgggtaactgtgttgatattatggcctcctttccggagcgcgccgttgatttcatcctcaccgatcccccgtatctggtcggtttccgtgaccgttccgggcgcagtattgccggtgacaaaaccgacgaatggctgcaacccgcctgcaatgagatgtaccgcgtcctcaaaaaagacgcgctgatggtcagtttctacggctggaaccgcgtcgatcgctttatggccgcgtggaaaagtgccgggttcagcgttgttggtcatctggttttccctaaaacctacacatcgaaggccgtttatgtgggctaccgccacgaatgtgcctacatcctggcaaaaggccgtccgcccctgccgcaaaacccgttgaatgacgtgattgcgtggaaatattccggcaaccgccatcacccgaccgaaaaacctgttaccagcctgcaaccgctgattgagtctttcactcatcccggcgcgattgtgctggaccccttctgtggctccgcctccacctgcgttgccgcgttacaggcgggacgccggtatatcggtatcgagctgcttgagcagtatcaccgtgccggacagcaacgtctggccgccgtgcagcgggccatgcagcagggggccgcgaatgataactggtttgaaccggaggctgcgtaa

SEQ ID NO: 386612 - DNA, 780 bp, Salmonella enterica
atgaacaaaaatacaacgctgaatgcactgatttgccgccacgcccgcaacctgctactggctcagggctggccggaagagacggatgtcgaccaacgggacccacagaactatccgggctggatcagcatttatgtccggctggatgcgacccggctggtgacgttactcgttaacctccatgatggcgtgctgccgccgttcctggctgccgccgcacagaagctgaccggaaccggcgcggaactcattctgtccggcaatcgctggcaggaactgccggtacttccggcggacggaacgcaggtgttttttccgtatgccggtgaatggctgacggaggaagaaatcagggctgttcttacagcggtgcgcgatgcggtacgaagcgtcagtcaccgggtggcagaagatgcgcggtgtatccgggcggcgctgaccacgaccggtcagacgttgctgacccgccagacacgccgctttcgtctggttgtgaaggaaagcgaccacccctgctggctcgatgaagacgatgaaaatctgcccgctgtgctcgatgccattatgaagcggggcgcacgtttttcgtcggtggaaatgtatctggtcagtggttgtgtggagcatatcctgtccagtggcctggcctgcgatgtactgcgtttaccggatgaaccgtcccgccgctggcttgaccgtggtgttctgcgggaggttatccgggaagcccgggcagaaatccggagtatggctgatgcactggcgagaatcagggcctga

SEQ ID NO: 386613 - DNA, 195 bp, Salmonella enterica
atgacgatggcggggaatctccccgccttttttctgccggtctccgtacaaggtaaaaggatgtcgccgcaggctccgcttttacccggccatgcggggcatggccctgtggttttttatatatgtaaccgtcgtgccgtatgcgggctgtgccgtgcctccatcttagccgggctggcggggatgcaagggtaa

SEQ ID NO: 386614 - DNA, 216 bp, Salmonella enterica
atgtctgatccacttcagtatggcctcttaccgtgcaaattgcaaggaggagtaaaccatgaaactaccgggaaacgcccttatctggtgcgtattaatcgtgtgctgcacgttgttgatattcacactcctgacccggaatcgcctgtgcgaagtccggctgaaggacggatacagggaagttacggcaacaatggcttacgaatccggcggtaa

SEQ ID NO: 386615 - DNA, 585 bp, Salmonella enterica
atggcaaataatatgtcgtcccgtcaggcgtgccatgccgcccggtatgttgttgcccgggttctgcgtggactgttctggtgtctggagtacaccgtcattctgccgctggccacaatggccctgatggctctgtttgttttatggaaggataacaccacgccaggaaaattgctggttcaggagattaacttcataagacaaacagcccctgccgggcacttccctgtaagagaatgtctgccttctctgcatgctcttccaggaggagaagagaaaatctgccgttaccgtgctgctgatgctgcagattatgccagggagactgaccggtcactgtcgcaactggtcaccgcattatgggcaacgctggcactgatgtatatgtcgtttgccgtgggcaccaggaaaaaaacggtgcggtccggaaaaatgaaatgtatacggggggcaaccacagatgaacgtctgaaggaagtgcttacgaaagaggcttccctgccggaaaaaatcaggaaatgccatgtttatttccctgatgacagaacaaacagaaacaacggagataaaaatgaacatgcgtaa

SEQ ID NO: 386616 - DNA, 369 bp, Salmonella enterica
atgtttatttccctgatgacagaacaaacagaaacaacggagataaaaatgaacatgcgtaatattcatgttattactgcccgcgctgtgccggataaaactgtatcagatgattttatgcgtgctgttctcagtaactgcaccacaagaatggttcttcctgcaccgaaggaattcagtcctgaatcattgccgcgcaaatttaatatggctgctgtcggtgtgatgaagaagggaatgtcgatgagtttattttcttctccgggatatattgtggttgccggacaatctggtggcggaaaatctgttccggtgaaagaactaatcgacagacttattcagaaatataaggaacccttcgatgaataa

SEQ ID NO: 386617 - DNA, 543 bp, Salmonella enterica
atgcacaaaagtacagcgcaacttgtatcaatcctcagacaggtcagtctttcactgaacacagagccactacaacagtgtatctctctgagggagatcacagaagagacggataaagtcgttgctcgtttgtccggaagaaaacgggtaacacctgcacaaatttatagattgtgtgcactgttatggatggccagaatgaaggcggttgaggtttatgggcgacattctgacgtggtgatgtctctggaaaggcagactgatttacttgaggctgcaggcaacgtattaaaacaacgctggttttaccgtccgtggggatcatcaaaagcatctgtgatcctgacaggtatactggtgacccccgtatttctggttttgtccggattgttgaatgcaggatatcccgggttattatgtattatcgtgtccggatgttatttttccgggattgcagcctgttctttgcgggctaaagatccagtcgggctttgctggtctgtgttcagctttattctgttatatctgctcctgaaaaaatga

SEQ ID NO: 386618 - DNA, 675 bp, Salmonella enterica
atggtcataatactgatatccttatcgctgttgttaacggtcctgcttcgttttcgtttcataaataacagcgtctttttcagaattctgagaagaccattcccggctggttttattttgtttttgctatcatccattatacatcttataatacaagaagattattcgtttttcagcggaaatatatactctgtaattatcaagtcagtgatatctgtaattacactatggtttttcttgttctttttttcatcatccatgctcagaacacctgttacaggtctttatcttacaccttttatatcaagcctgagaatcgatatacatccacaatatatcaccatgccatctctcaaggtatcctcaagaataaacgcagacaaacttgtcgaaaatattaaacatattatttcctgctatccttataaaacaattaccttacagtctcatcttctgacccgcaggatccggaacagaatagctaataatatgaggagaaacggcatactatataaagaagtggcaagggtgacgccactctgtgaaactattgttctgaatctgaggtatgggggaaaaacccgctacagactgttctcctgcaggaaacaccccaacggattcagggtacatcgcaatggtggagcattctttattcagacacagaaagattaa

SEQ ID NO: 386619 - DNA, 447 bp, Salmonella enterica
atgagtgaagggacaacagtaaatgattttacttatgttaaacaggccctttgtgcagtttttcatcggatgaatgccagaccattcacccgactctgtgaaaaaattgacatgcagcgtggaattacggatattcagtggatgttacatcatcagtattatccatcacctggacagattggctttataatatttttattgcgtgatgagaaattcagagtggtgcgggaagaggggcgtcagtcattccttgcggttgaaatccagtcattaattgatgttctgaaagatatacggaaatacctgcagtttgtgacacagtatgactgtgatggttgtattatcacgctacatgccagagctgaacgtaaatacttctggatttttctgtggtgtgtaattgtgtttattttgtgtgttatgctgttttttctgattgtttattaa

SEQ ID NO: 386620 - DNA, 177 bp, Salmonella enterica
atggaaaaagaacagaaacaatgtggcctgcagctccccttgtatcaggatgtatctctccctgtaccccgtggcactttcagtatggagaaaaaggtaataacagcagagcaatacagagactggcaattaattgctgccagtctcaggaaaaagataaatggagaaagaagctaa

SEQ ID NO: 386621 - DNA, 312 bp, Salmonella enterica
atgaaggtgtgggtaataagaaataggcacgcagaggacttcagaaaaatatgtcttctgtttatccggttaatgagcaatgtattaaaactgtttccttttgctatggtgatgtgctctgtggtgtggttttatttttgccctgaatatattctctcagacattgttaatgactggcatgatgcagataccctggaaaaaatcgagcttgtcagactgtatctgaagacggtttttattctgacagtggtgagcgttgttttctcgtatctttcgtcagataagtttatgtctgttaagcgcaggaaatga

SEQ ID NO: 386622 - DNA, 525 bp, Salmonella enterica
atgtgttatgagtttttatcatttttacgaaagataagtaataaagaaaaagaaatttttatcagtgaggagcgatttttctccttgctggaaaaggtgagtgcttttgatgtggtcagacaatggactgaaaatggtggggcatattatcctctgctggagtgccgtcggcttacagatattgaagatgtcaggaaatcagaggatatactgaaccgactggagtttattgacagaagatttcgggaattcatcagcattatgtctgaatataattgtaatgataaatctaaagacaggtgggagaaatggttgtctgaatatccaccggaaaaaatataccaggtccggagagagggagaccatctgtcattaaaaaattacggtgatgatattactctggacagagataccgccgtggctacggtgcagattactgtcagcagaaaatgcattactcaggaagaaatggatgaattatatgcattgtctgagagactgaaagaaaagtgcgccggtaattaa

SEQ ID NO: 386623 - DNA, 258 bp, Salmonella enterica
atgaaaataaaattcacgtcgaatcgccttatggattttttaatcagattgtttatcacggtaattgccgtctcatcggtaattatctggtcatgggatacgataaaaaaagactctgccagagagatgctcactgccggtttcgtaatccttttctccggtgcgctcatgcttcttcagtactgtcttttcccttcactggctgacctgctgaaacctgatgaaagaaaaagagatgaaaggaatgaagatgaataa

SEQ ID NO: 386624 - DNA, 504 bp, Salmonella enterica
atgattacacaacaaattatcaatagtgagttggaagttttaaagaaatatattgactcaggagatattagaatcccgtctctatggcagggattaaaacctggtcttatcatcatgggatggatgattttttgtcccttactaatgtcatttctaataacacaaaagacaagtgaaacactcactgctgtgttagtcggaggatggcttgggttcattgttatgattattatggcaaatattagaatgttatacttatccttgccagaaaaattcataaaaacatcatcagtcatgagtgttatatcatcaaaacttaaagcatattacatcgtgtatatgggggttgtatttctattatcttttttagggtttattatatacggttttggtgtgatattagtaacagttattatggcattcttgattcaattagatatcggtagatatcaatttgttggtgttattgatgcaataaatagttacgtcaaaagcaagaaataa

SEQ ID NO: 386625 - DNA, 747 bp, Salmonella enterica
atgacaacggataacacgaacacgacacgtaacgattcactggttgcccggaccgatacctggttgctgtcgttgctggtctggtcccccggacagcgggatatcattaagacggtggcactggtgctgatggtactggaccatgcaaaccgtattctgcatctggaccagacgtggatgtttctggccggacgcggtgcctttccgctgtttgccctggtctggggactgaatctgtctcgctatgcacatatcaggcagtcggctattaaccggttatggggctgggcagtgattgcccagtttgcgtattacctggccggttttccctggtatgaggggaatatcctgtttgcctttgcggtggccgcgcaggcgctgacgtggtgtgaaacgcgcagcctgtggcgttctgtgggggccatgttgctgctggtcgtgtggttgccctggtccggcaccagttacggcattgccgggctgctgatgctggctgtctgttaccggttgtaccgggccggggatactgaagagtatctggcgctggttgtctgcctgctggctgttattccggcacttaaccttgcctccagtgatgcggcggctgtagctggtcttgtgatgacggtgctgaccgttggtctggtgtcgtgtgcaggaaaatcattaccccgtttctggcccggggattttttcccgaccttctacgtctgtcatctggtcgtgctgggcgttctggcactgtga

SEQ ID NO: 386626 - DNA, 309 bp, Salmonella enterica
atgcagacctcacgagttaatggattaacgagtggggtcttcgcatttctggaacctgcgtcttgcctgaaccagaaaggctcagacacccgccgcgataatatcacattcccggttgctgactattacctgcatttcccggtttttattgcagaaacgccgggagcggggaaaaacttgctttttcccgtttccggggttgggcaactgagcaacgcgaaggcgtcagtcctcccgcgacaccttttctttcatcgcccggtatttctgtttatcccaccatacctgaaaacagtccatcaggaataa

SEQ ID NO: 386627 - DNA, 291 bp, Salmonella enterica
atgtctacggctgcaagcgtccgtaaaacaccgcgagaaaatcagattaatatccgggcaactgatgaggaaagagctgttattgattatgctgcgagcctggtcaataagaatcgtaccgatttcatcattgaactggcttaccaggaagctaaaaacatcattctggatcaacgtttatttgtgctggataacgaacgctatgattcgtttattgcgcaactggaagctcctgtgcagaatgcagaagggcgtgaacgtctgatggcggtaaagcctgaatggaaataa

SEQ ID NO: 386628 - DNA, 483 bp, Salmonella enterica
atggaaataaatgttagcgcgccggcattgctgacggatgagcatatacttcagccatttgactgcggaaatgaggtgctaagtaactggttacgtggtcgggctatgaaaaaccagatgctcaatgcttctcgcacgtttgttatttgtctggaggggactttacgtgttgtggggtactactcattagctacgggttctgtcactcatgccgaacttgggcgcagtttgcggcataatatgcccaatcctgtacctgttgttcttttaggacgtctggctgtcgatgtttgtacccagggacatggtttcggtaaatggttgctgagtgatgccattcatcgggttgccaatctggctaaacaggttggcattaaggctgttatggtacatgcaattgatgatgacgccagggttttttatgagcgttttggttttgttcagtcagttgtggcgcctgataccttgttttataaaatttga

SEQ ID NO: 386629 - DNA, 279 bp, Salmonella enterica
atgtcgcagcccggaaatgcagtaacttcctcatcgaaagaaaagcgtcagtatcgtaaaggcagtccaatgtcagcaacagaaaggcagctggcggcgattgcacgtaaacgtgaaacgcacaaagaattgaaagtttttgttaagaatcctttaaaagatcaagtgattgctatttgtgaagaggaaggattaacgcaggcagagtttatagaatctttgcttgagcgggaacttgctgagcgtggtaaacgcgatgtgaagacttcacattcttga

SEQ ID NO: 386630 - DNA, 777 bp, Salmonella enterica
atgggcgtgaacgataactccacgcctggaaaaggggagtctgataaatacagacaatacctcatgaaaagtataaatctatatagcgttataaatgacctgagtattaaatatatgcctgctgataaaattgtatatataatggtggattgtaattattttattaatggtctgaaacacctgtttatggataatagtataacttttaagtttattaacaatattcaggatgtgaatttttcaaatgaacaaacatcatatttattactggtattaaatactgtaaacgtagaatcactgaaaaaatttaaaaacgcaattgacttcatcattggtattaatacacaactgaaaacaggcatacttgtcagtgaattcaactcttatttaacaagttatttttttaaaaagctcagagggaaagtgactttttttaactctcataatttaaccaacggagtgttcaaaaaaaactttctctcctggcttaaaggaagaacttttcgtcctatgcgagttgtttaccgctaccgggatgaaagctatggttattccctgaaggaatggatctcattagtggtgcctctcagtggtgaaactgttaaggaaatttctgattgcctcaatttaaatgagcgttcgatatatcagataagaacaaaggcgttaaaaaaaatgaaattaaaaacatacagacaattttgtctgatgtttatcgatggaaaaataagaattgaaaatcacaaaataaaacatgaaagcatatgttactattga

SEQ ID NO: 386631 - DNA, 564 bp, Salmonella enterica
atgaggaaatatattaccagtaatgaatggaactctttttttaatgccattacggatagcattaatgaatgccgtgataagactatgttttgtttaatgtatatacatggtttaagagtcagcgaggtcagcggactgatgatgagtgatatagatattcatgagaaaattattcatataagacgcctgaaaaatggtttttcaaccgtacatcctttacatcagaaggaagtggctttactgaaggcatgggttaagttaagacatggctatatttgtgacccttccagaaactggttgtttttatccatgtatggagaaaaaatatccagacaatggatttataaaatatgtaaaaaatatggtcgtaaatctggtattcccgttaatattcatcctcatatgttaagacatgcatgtggttatgctctggcgaaccagggtatggataccagattaatacaggattaccttggacatcgtaatattcgtcatactgtattatacactgccagtaatgtggaacgtttcagaaaagtatggcaaaatcagtctgttctgtaa

SEQ ID NO: 386632 - DNA, 225 bp, Salmonella enterica
atgtactgcgatgaccctgaactcaactatgcaaatctgaaagcccagccaaaacagccggatgaaatgtatacctacatccgtaataatcagatgatgctcccaggctacgaagaaatgcgccggtatggtgagccggtttcaacgttgcttgtagtgtcaacaatcaacgaagtcatcgccagacgaatggccaaaaagcagcagatgcagtggagcagataa

SEQ ID NO: 386633 - DNA, 696 bp, Salmonella enterica
atgttcagaaaattagctgctgaatgtctgggaacattctggcttgtttttggcggatgtggcagtgccgttctggctgcttcatttccgtcactgggaattggtttcgctggggtcgctcttgctttcggtctgactgttctgactatggcgtttgcgttggggcatatttccggtggtcacttcaatcctgcagttacgctgggattatgggccggtggtcgtttccctgcgggagatattcctggatatattattgctcaactggtcggtggtattattgccgctgctgctttattttttattgcttccggaaccgctggatttgatgtggcagttaatggatttgcagccaatggctatggtgaacattctccgggagggtattcactccaggctgccattgtgactgaaattgtactgactgcggtttttttgctcgttattcatggtgtcactgataaacgtgcttcaaccgaatttgctcctctggctatagggctggcattaacgctgattcatcttatcagtattccggtaacgaatacttctgttaatccagcccgcagtactgctgtggcaatttttcagggggggtgggcattacaacagctatggttattttggataatgccggttattggcggcattactggtggtctgttgtatcgctttttactggaaaaaagcgattaa

SEQ ID NO: 386634 - DNA, 423 bp, Salmonella enterica
atgacatctgtttttagcgcgtccattaagatacaggggcgtaaatgttttttctccggacttttgtttctgcttctgtctggccctgtcggggcagacactatggcagtttctctgtcatgtggaaaaagtgggcacgttcagtttattctggctgattatggactggtgacagagttcaggacgccacaccacttttatgttggttccggccggcatcagattcgtcttttgtccggagaaaaagtaaccgagtggatattcagtaataacgaccgtatttttcatgaggataatacatcacactggtttgttcactggcatcaggataatcagaaaagtatccgggaatgtattgtgctcagtcaaaaaaagatacttccacaaacgccggagtacatgccggaacggaaacatcgctga

SEQ ID NO: 386635 - DNA, 339 bp, Salmonella enterica
atgaaactgaacataattctcagcaccctgctgctgaccgtctcctgcgcggggtcagcagccagctttgactgccacagggcaaccggaaccgatgaaaagaccatctgtacagaccggcagctgagcgaactggacacggaaatggcaataaaatatcactggctgaaaggactggcgggaatgggcgtggccggagaaatggaagatacccaacggttctggctgaaaaaacgccagtcctgcggttctgactcagcctgtctgagaacgcattaccggcagcgaatacaggcactggacaaaatttacgattcaatacccggacctgttatatga

SEQ ID NO: 386636 - DNA, 516 bp, Salmonella enterica
gtgactattcctgtaaactgcagtatgcgccggtccggtatgatggtcgcggtagcgttgtttatgctggcctcaccgctccgggctgagatgctgacatccgtacagcagtcatatctggagcaggcaatgcgtacacagattaaaaacgacagcgattttcagtccatccgggctgaatggactgaggctcataaagtggctgagtttttatgccggcctgcggcattgaatgcgctcagaaaaacgcatcaggaggttgataaggtttttctgggggatggtaaaaatggtggattgacgctgctctcgtcttctcaactgaccggtacgggacaatacagagcaggcggaattaactgggtgccgttcagtttccggtgcacgttgtctccttcaaccggggcggtaaccgggtttgactaccgtttgaagaccacagcaccgggtgcccgcgtgatggctcccggccctgtggttcgcatgaaacattatatggtgaggccgccgctatga

SEQ ID NO: 386637 - DNA, 333 bp, Salmonella enterica
atgatattgtttaagagaacacaaatcaggggaaagtgtccggaatgtggtacgcctttaatattcgttgttcctgtatggggaatggtggtgcgctggatattcctggtattcacgctgtatttattgtatctggctgcggggatgggggtgcatttgtgggatgtgtggcacccggtcagtggtgagaaaccggaggctccgcacctggcgactttcgtgggggttctggttattctgagtttgtggttgtgtggagctattccggcggccattctgatgtattttacccgggcccgccttcaggcttcacgggaatatcatgatgcataa

SEQ ID NO: 386638 - DNA, 423 bp, Salmonella enterica
atgatgcataagccttcaggccggcatgttgtgcagccggttaatactctggtggacgtcagacagatgaataccggacatgaagcctcccctctgcggaagcacatcagaacattacttattgatgtgctacggtattcttctgcagaactccctaccccttcgcatcctcttgttctcagaatggagaaagaggatgcgtatcggatttcatctgaatatcttctgttactgagaaaaacgcttaccgcacagcagacccggaaactggcgcaggatattaaaatctggtgccggaatgaatacggcatgccggagtattcaaaggaggagcgttcatatattaaagctctgacagtaagttttttaaatcagctggttccccctccgccccagcgactgaagcggggagatcctccgtag

SEQ ID NO: 386639 - DNA, 549 bp, Salmonella enterica
atgcgtaaatatattacagatgcagaatggcatatttttttcaatgccataacaggcagcggaactgaatgccgggataaggctatgtttaaaatggcttatcggcacggccttcgggttagtgaactgacgggaatacggatgagtgacctcgacctttccggaaaaacaatttatattcgtcggctgaaaaacggtttctcaaccatacatcccctgcaggaacaaacctgcagttatatttcagcctggctggaacagagaaagacctgcataaggaaaaacgataataactggttatttatttcttatcacggggagcgccttaccagacaatggatatataaactgagcaggaaatacagccagcaagctggccttaatctggtcgtacacccccatatgttgcgacatgcctgtggttatgctctggccaatcaggggcttgatacccggctgatacaggattatctggggcataagaacatttctcacacagtgcgttacaccgccagtaacccggcccggttcaggaacgtctggcagtag

SEQ ID NO: 386640 - DNA, 861 bp, Salmonella enterica
atggaatggattgaacgcaacctccaccgtaaaatcactctaccggagatggcccggaaatcaggatacacgtcccggcatttgtataacctgttcatggctggtccgggagtcagcccgtcagcatacatcagacagcgcaaactgagcctggcatcggttatgctcagagatacccgacgcccggtaaccgaaatcgccctgatgtacgggtttgaacattcacagtcattcacccgggcattcagccattatttttttcagtctccccttcagtatcgccgggctgattactgggatatgtcgcgtttttatccttccccactggtgaaagacttttcctgccagacggacatcatctggcttccggacaacatttctgtacagcctgaaacgaaagatacatggaagataaatttcggccttaattttttgatagaaacaacagcgggaaatatcatttcgtacccacagctttataaaagctgtgtggatttaatcttcaggcaacatctgcactctccttttattgtttatggcgaacttcgccccggttataccagtgactcggaaattgatatttatacagggtatatcagccagacaaaagaaaaagagcccccgcagagtataatcagaattccggccggttattatgcctgtttcagtttcagcggtacgcccgagcaaattattgcctttaatgcatgggccaaaggaaacggtatgcataaaaaccagcttatactgaaaaaaggggcggcattttctgcgttcagtaaaactgacaaccctgcaatttaccggacccagtattacattccctgtataccatctgcccctactgccagacgttcctga

SEQ ID NO: 386641 - DNA, 471 bp, Salmonella enterica
atgatcgaatccagctacgaatccgtccagatttttatcggcgttgatgtcggtaaagatacccatcacgctgttgccgttaaccattcaggtaaacgcctgttcgataaagctttacccaacgacgaaaacaaactcagagcgctgatatctgacctgaaacagcatggtcagatactgctggttgttgaccagccagccgtcatcgccgaggctgcccgtaccctgcctcacgcgctacgcacgctgaaactggctgtatccatgctctgcggctttgatgacgatcttgctgcacagacaacgcagaccagcaactgtatccgtggcctactacacacgcaaaatgagtcagggaaaacgacacaaccaagcctgcgacgtcctgttcgccatgatgcgcgacgggactttttatacccctgcggcatcataaatatgcttgacaacttaataggggcacccccctga

SEQ ID NO: 386642 - DNA, 633 bp, Salmonella enterica
atgcagaaacgcaagttcctcacccctgaggaggtcagcctgttacttgataccgcccttaacggggccaaccccgaacgcaaccactgtctcatcctcatggccttcctccacggcttccgtgtctccgaactcctccgcctgcgcctctccgatatcgacctccacggccgccagatccatgtcgcccgcctcaagaacagtttctccaccgtccatcccctcatcccccgggaagtccgctccctgcgggcctggctgcgcgtgcgtaaaaaaatggccgacaccggcaatgactggcttttcatctcccgctcaggttttccgctctcccgtcagcagttctattacctcctcacccgtatcagtcataaagccggtctccctgtgtgtgctcatcctcatatgttgcggcatgcctgtggttatgcgctggctgataacggggcggacacccggctgattcaggattatctggggcaccggaatatccggcatacggtgaggtacacggcctcgaatgcggcgcggttcgggggcgtatggtgcagaaagcgcgacagaaaagggcaacagaatgacccaaaatgtaaaccagtacaaccggagctaatgtacaaaaaattacaataa

SEQ ID NO: 386643 - DNA, 159 bp, Salmonella enterica
atgggtcattttgtaaaccagtgggtctgtgttcgggaggtgtggatgcgttttatggatggcgaaaaagtgggcgacattcttgttctggggttcctcgctttggtgatgttttgtgatgtctgtctgtttgttgaggcgtccggtgtccggtggtga

SEQ ID NO: 386644 - DNA, 447 bp, Salmonella enterica
gtgtccggtggtgagtggtggggccgtatccctgatgaatggacatgtccggatgaaatcgcccatctcggcataacggtactttaccgggctgtggcttgctgggggctgtaccttgaccggcctgtttccgtggccgatgtcagccaggcattcgccattcaggagcgccgggccagtgatgttctgcattacatcacgcataccgcccagtatgtcagagcggtaaaccttcctcccggacgagggaggaagcggatggtccgggtgctgtccgtcgcttctccgctggttccctgtcgccaaagggttccgacagaggaagagacgaagccgcttccggcatcccgtaagaaagactgtgtcggggagtgtgagacgcttgcactccggcgatggtttgtgtcccggcgcagaggagaaaaagtacccgggatggtcggatga

SEQ ID NO: 386645 - DNA, 519 bp, Salmonella enterica
atgagcattaaatctaaattagtaatggctggccttgtgacgatgagtctggcatccgtgaatgccatggcagctgttggtaacgccggtaaggtgactttctccggtgaggtggtggattctccctgtaacctggcacccgggcaggacggtactgatgtgaaagtggactttggtcagctgtctatggctcagctgaatgctggtataaaagctacccaaccttttgtgctgaaactgcagaactgctcgttgaacggtaaaacagccagcatccagttcaacagtaatgatgtcgatggcactaacgctgcgattttggatacgcgtggtacagccaccggtctggggattggtattcagggatataccttcggtaccgcagcaggacttaaaggcttggttgatggtaacaacgatctggcttttaccgctgttgctcagcagaaggtggctaaaaccaatgtgacggctggtgacttcacggctgcaaccaacttcgtaatttcctacaagtaa

SEQ ID NO: 386646 - DNA, 594 bp, Salmonella enterica
atggaggggcgctctgtttttgctgttcctgtgggggctggcatgaggatactgaatacagcgtgtcagctgttattgctgatggggctgatactggggtgtggctgtgcgaaggcggggctgcggttgtatggccaggcaacgatgcggggagaagtggtggcatcagcctgttctattgcactcgccgaccggtttcagtcggtgccgatgggtgaactgtctttgcgtgatttgcagtcaggttatgggcggacaactcgcgattttgtcatccatctggacaactgtatggcgtccgggcaccgggaaatggttcaggatgttgaccctgcaattcgggtgcgttttgacggattgcggggtacccgtccggatttgttccgggttcagggggatgcacggggggtggcgcttcagttacaggatgcgcggcaggagattgtgtatccgggagagtatttacctgtgctttaccagaaggcctataaccagcaggtactgcggtacagagtctccttggtacccgatggtaatgcgcttgcgggcggggattattcagcagcgttacgcttcagcattaattacgaataa

SEQ ID NO: 386647 - DNA, 2523 bp, Salmonella enterica
atgttccggacccggcttaaggtcagtcgtgtcgcttttctgatttttctgagtttaatggcaagggaaagcggtgctgtcgaatttaacacagatgttgtggatgctgaggataaaggcaatatcgattttaccgccttttcccgggcgggttatatcatgcccggcatctaccagatgcagatcagcctgaacggagatggcgtgggcaatgagatgtcggtgccgttttacgtccgttcatccgcaggagaaaaggatccgcttccggaggcctgtctgccgttatcccttgtggataagctggggctgaaggaggcgtcccgacagaaggtgggaacgtggcaccaggggcagtgtgcggattttcgtggtctgcccggcgttcagataacgccggatttgtcgcgcagccgggtgaacctgaatatccctcaggcctggctggaatacagtgacgcctcatggctgccgccgtcacgctgggataacggtattcctggtctgctgctggattacaacgccagcggtatggtgaccaaaaaacaggggcagtcgcagcagcagtatgcgtcagtgaatggcacggcggggctgaatgccggggcgtggcgcctgagagcagattatcagggaagttacagccataccaccgggtcacagcagccgacacaacagcgtttcgatttgagccgactgtacctgtaccggccgttgccgcagatgcaggcgaaactgacgctcggtgaaaactatgtcaactccagtttgtttgattcctggcgttacaccgggggcgttctggagagtgatgaaaatatgctgccgccgcagttgcgtggctatgcgccggaaattatcggggtggcaaaaactaacgcccgggtgacggtaacccagcaggggcgggtgctgtatgacagtaccgttccggccgggccgttccgtattcagagcctgagtaacgccacccgtggccagctggacgtcaaagtgacggagcagagtggtgaggtgcagacctttacggttaacaccgcatccgtgccttacctgacccgtccggggcgtgtgcgttatcaggttattgtcggccgcccaagcgactgggaccacaatgtgaacggcgatacgtttacggctggtgagatgtcctgggggatatccaacgcctggtcggcttacggcggcggtattctgtcccggggatataagtcctttgctctggggctggggcgcgatctgatgcgtttcgggacggtggcgtttgacgtgactcagtcctttgcccgtctgtccggggctggtattcagggggtgggtgatcgtcagggtaaatcatacagagtcagttactccaaacgctttgatgagataaatgcggacgtgacgtttgcggggtaccggtttacggagcgggacttcatgtccatgcaggattatctggatgcgctcaataacggcatattgcctcaacgtcagaaagaacgctaccaggtcaaccttaacaagcgttttgatgatatcggcctgccgttctcggtggggttgaactatgaacatcagacgtactgggaccgtggtgatacggaacagtacgggatgaacgtggggacctggtttgacctgccatcgctgggactgcgcaatctgtccctcaatctgacggcttcccggagccagtattacgggaaaaatgatgatgcggtgaacctgatgttgtccgtaccagttgggcgtgacactgccagtctgagtggtgcctacagtggaggccgttacagtgagcggctcgggtattacgggcgtgtcgggcagctggacagttacagtctgaatgccgggatgaatcatggcggtgatcaggacagtaatgcgtcctttaacggaatgtatacgcacaatggcgcactggcccaggtgggggcaaatatggctgttgagggtaatcgttacagctcctttggcctcagtattaacggcggcctgacggccaccgcgaagggggcggcgctgcatgccggtggctataacggcggtacccgcctgatggtggatacggatggcgtgggcggtgttccggttgatggcgggcgtacagtaaccaacccgtggggtatcggggtactgacggacgtcagcagttattaccggaccacggcccgggtggatgttaacaatctgccggacgatgttcaggccactcagggggtggcggaagccgccctgacggaaggggctatcggttaccggaaattctctgttctgaaagggcgcagtctgtttgcagtgttgcgtctggctgatggtacgcatccgccgttcggtgccagcgtgcgtaatcagcaggggcgtgaactgggtatcgtgagtgatggtggtctggcctggttgagtggattgtctgcaggggaagccctgaatgtgacctggaatggtcggacggggtgccgggtacggataccggagcgtgtcggtgatgcacaactacttctgccgtgtacaggcggggcgggtgagtga

SEQ ID NO: 386648 - DNA, 759 bp, Salmonella enterica
atgaatcaaatcagtcgttgtccggtgaaaggttgtcgttaccctgcttacattctggtcgctgctgcgctggcgggaagtctgccgtcagccatggcagcggtgacactggatcgtacgcgggcggtgtttaatggtgggaacaaatctatcagcctgaacatcagtaatgaaaacaaacaactgccctaccttgcgcaggcctggctggaaaatgcggaaggggaaaaaattacaaccggtccgctggtcgtgacgccaccggtgcagcgcctggagccgggagaaaagagtatggtcagggtgatggccacgccggctgcatcagccctgcctcaggaccgggagtcgctgttttattttaacctgcgcgaaattccgccgaagagcactaaacctaatgtgctgcagatagctcttcagacccgtatcaagttgttctatcgaccgaaggcgattgtgcaggcaccgggggccgtatggcaggacaagctggttctgcatccgcaggctggcgggtaccggattgaaaacccgacgccatattacattacggtgattggtcttgggggaaccgcagagcaggcagagaagggcaagtttgatgcggtaatggtgtcaccggacagcaacgtgagtgtgaagacatccggttcatggagtacaccattcctgacctatatcaatgattacggcggtcgtccgactctgcgcttcagctgcagtggtggtagctgtgtggcgaaaggtaaggcctga

SEQ ID NO: 386649 - DNA, 447 bp, Salmonella enterica
atgaagcaagtgcagtgggtaccggtggtgatggctgtcctgctggcgcatccggtttatgcagcggagcagatagcgccgcgctttccggatacgacgttgcccgccccggggggggaggatgatgtgatggcgcggcagggagaggtgtatgtgtccgggacattactggtttctccctgtgtactcagtgactgggcaacggagatgcagtcacggaactggatttccggtcgtgccagacaggtgacgctggctctggaagggtgcgggaccggcgagaccacagcagggctggcgtcagagtatggtacccccctgcatgtcaccggacggtgggggaggacggaggcatttcccctgcggctgaaaaatggtgtgaattacctgacattaccggcaccggcgggcgtggagggaatacggctggagatgagttatgaatag

SEQ ID NO: 386650 - DNA, 534 bp, Salmonella enterica
atgaatagagccggaatactgtcggttgccggcgtactgttgctgtccgtggccggaagtgcctgtgcagcaggtctgaatatcacctttaagggcagcctgattgaccgcgtgtgtgaatccgaacagggcgaccagccgctggaggtgacgtttccgacacgggcgctgaagtactttgagcaccacagccagacggatacggagtctttttttatcggcctgaaaaactgtacgtccgccacaaaacaaaaaacggtgggactgacgtttacgtttccacagtcagaggatgtcgggggaattacagcgctgaaaacgtccggtgataccggcctggtgattgttgtggttgacgggaagggaaatcccgttaaaccgggtgaagtggtgaatgccgggcagattgaaaatgccgggaatggcagtatcaaccgttttccgtttggtgcgtatgtcatggtgccgtccggcactaccgtgaagacgggggcgtacagcgccaccgccacctttacggtcagctatcagtaa

SEQ ID NO: 386651 - DNA, 1500 bp, Salmonella enterica
gtgagaaaggggagtgtcagtctggttgtgttgtggctggttctggtggtactggtcggatgtctgatgatagcgctgggttcatcgcgggtgcaggcggcggaggacagtgacatgccggaagtactccggtttgcccggcagtatcacgcggaagccctgcggacaccggcgaatgccgggcggtccggcgcgggccggacgctggcgcagttgcgtgccctgaaggaaaaaatgaaagcagagcaggcacaggcatcatcgcagtcagccaccaccggtctgaagcaggagataacccgtctgatggcggagctggcggcggcaacccggcagaatggcgcactggcaaaacaggtcagtgccctgcagcagcaggtggcggccggcaggactgacagtgttgcacaggcgaaggcaacggcggatcttgcggatgccaggaaacaggtgacggacctgacggcgaaactggctgccgtgacagaacagaataatgtgctgcagaaaacagcacagacgctgcagcagacacagtcagccaccaccggtctgaagcaggagataacccggctgatggcggaactggctgcggcaacccggcaaaatggcgcactggcaaaacaggtcagtgccctgcagcagcaggtggcggccggcaggactgacagtgtcgcacaggcgaaggcaacggcggatcttgcggatgccaggaaacaggtgacggacctgacggcgaaactggctgccgtgacagaacagaataatgcgctgcagaaaacagcacagacgctgcagcagacacccgttaccctgaaaaccccgcgccagcggcaggcttatgctgcgggggtgatgtttgcgcaggatgtgcgcgatgcacaggctggaaaccggatgctgggcgtgaacctggacagaactctgttgctggccggtctgagtgatgcactgaacgggcatttgcgtctggacgggaaagccttatcggaagcatcggatgacctggctgatgctgcgcagaagggattccggaaagtgaaggacttgcaggcaaaactggctgcggcatggctgaaaaaattcagaaaactgaaaggtgctgcacgggatgattccgggttctggtaccgggtgacctgggaaggggacggtgaacgactgaagccggatgatgtggttgacgtggttgtggaagagaaactggttgatggtacggtggtcagtgacatggaccggacgggcagtgggctgcgccagcgggtgtctgattttccaccggtgtttgcggccgggttattgcggctgaagaaccacgggcaaataactttggtggtgccaccggaactggcttacggcgacaagggttacccgccggatgtaccgccgggggccaccatgatttaccaggtgcgggtttccgaccgtattgatggtggtgaaataaaaggcggctcctccggtgccgcacagaagcagaatggcaggaatgcaggatga

SEQ ID NO: 386652 - DNA, 336 bp, Salmonella enterica
atggataccaacagaaatgacggacgtgacctggcctggctgagtgcgctgttagcactttccggtcccggtgcagggttacagtccggtgaggtgaacacgatttcatttcacattctggcagaactgtctagggtgcgtaacccccggatgttgagtgcgcttgaaatgcatctggtgcagggagctgaacgagaggttgcctgtacccggtacagtgtgaatcccggcaatttttcccggaagctggccgggataaaccgtgtgtggcagctgacggaagcgctcagggccatgaatgataaacaggaaacaccgacgggagccggagcatga

SEQ ID NO: 386653 - DNA, 447 bp, Salmonella enterica
atgatgaaccgactgacaccctgcggcctggctgttgtcgtactgttgctggccggatgcagcgccgtatcaaagtccggcgggacacccacaaaggcgctatcgcctgccgcccctgctgcgggcaaccaggtgaacataaaaccggcggttgctgcgcaggatgtagcaccggtgaccaccggaacggaagcctgcgaccgggagctgaaggcgctgaaaaaactggatgcccggcggtatgcgctgcggcgcgcccagtttaaccgtctgatgtccggggcagcagtgtatgccggtatccggacggacgtggcgggaggaacccgccaggcggtggatgccatgtatctgttccgtaccgggaagctgtgtacggatatttcacgtgacgtcatggatgcgctggcccggcagggagacagcatcactgatggtcataactga

SEQ ID NO: 386654 - DNA, 387 bp, Salmonella enterica
atgaagaaaagaacccgggtggtattgtcagggctgttgctggctgtggcgggatgtgcgggtgcggtcacgcagcagccggccccgtcgggtgcggaacaggtgtacgggggaaccctgaaccagtgccgcacggaactggcactgctgaagcccctgaatccggtgctgtatcagcaacaggagaaagccctgaacggagacctggcgtcagccacacagtacctgctgatgcgcagccgcctgaatgccggcatgcaggaaacgctggaccgcctgcatcaggctaacctgatgcggacctgccagcaggttcacaatgtgctgtttaatcagttgctggataaatccacggtggcggtcagtccgggggggagacagcagtga

SEQ ID NO: 386655 - DNA, 273 bp, Salmonella enterica
gtgaaaatggtaaaagtgtgcggggcgggaattcttctggcgggaaccgtcctgctggcggggtgcagcagtgccggatacccgtctggtgacggggcggcgcttctgccgccggaggtaaaccagggactgctgggtgacctgaaccagtatgttggccagttgctcgggcaacgctcatccggtaatggtgatgctgaaaaagtgcttgttcgtctgctggacgggaaggggctgccggaaccggttccggtgacgggcagtaaggcatga

SEQ ID NO: 386656 - DNA, 156 bp, Salmonella enterica
atgaccggattgcgccagtggaagggggagcctatgaagggagaggcccgccttctgcggcaacgcctgcggatgctggggtactggttgttgtttgttgtggctgtggcggaagtggtggtttttgtgtggctggtatcggtgatgcgcgggtag

SEQ ID NO: 386657 - DNA, 621 bp, Salmonella enterica
atgctgaaacaacatctgatatttctggtcagtgcctgtgagtatatgcaccgggggctggaatcgctgatgtcggacagtccggcccgggttatcagggtcagtcgtccggaggagatactggcatacccggtaagtccggcggataaccgtgtgattctggtctccctgccgtcggtgctgtcggcggcggtggcggggagagtgtttttatggcggctgggcgtactgcggtcgcagggcgcaataccggggcggttgtcctgtcttctggtgggagaccgtgagcggtgggatgacctgtcgggcgggtatgactggctgccctgccgggatgtgttgtcggtgcgggagatgttactccgtgtgctggagtggccggtgcgtgcagggtgcgtaccgtggcctgtgcgtctggtgctgccgttgtcaccacggcagcaagcgatactggaagggatactgtcgaggaagacggtgagccagatagctcgggagctgggggtgacggatcgcgcgatactggcctcgaggcgagcgctgatgacgaagatggggttgcgcaaccggatggagttatgtgctttcccccgtcttttattttgtgaagcaggtgagtga

SEQ ID NO: 386658 - DNA, 531 bp, Salmonella enterica
atgatggcacatttacagaaattattactccttgggggagcttggttgctgatgagtgggaatgtcggggctgctgaagttggcgtacatattacgggtacgctgacaattcctccttgtactattaatagtggtcaggttattaatgttaatttcggtaatgtattagtgactgatttatcgaatgtcagttaccataagaagacgactgttagtgttgcctgcccttattataagggaacaccatgggtcaaagttaatggtacacagttgtcaggggccggagataatgtcctgagtacaaatatttctgggtttgggattgctttgtatcagggagatggtgtgtcaataccgttacacttaaacggtgtttctccttatggcgctcagataatttctggcttttccggaaagggaactgctaacggaacctttacgtttactgcggtaccttataaggtgggaaccgatcagttatcggggggagattttagtgcaacggcgagtatgactattacctatatataa

SEQ ID NO: 386659 - DNA, 966 bp, Salmonella enterica
atgagggttacagtaaaatttttcctgataacacttttattaggaggatattcaggagtatgttttggatatggtatggtatctcaagcagctggtgttggtcgactgtctactgtggataaaaacggactgaagttaactgtaaaaccggcaggtatggttcagtgtgatgttaaagggtgggccggaaccaatgcggagtgcccccctacgtcaacttctggggttatggttacggggacggagtacatagtcattctgggggtgccatctggatggacatgcgaagccacatcggggcgttgtgagcataaaaatgtttctgggaattcggcgttagttttgtggacgacgaatacgtcagctaatgcacctttatcaagttcaaatatgcaggaatataggggaacgtatcaaatcacaggtgactggcagggggtggttaagactaatgaaccgcccggaggtccgtatacaaaaacatttgaacagtcctttggtgttactaatttgagccaagttgatgttcccggtgcaggagggaacatggttatgacttactatgtagatgatggtgggcatgttacaccagatccaccagttgcatcatgctctgtaagcactaataacgtgaccatggatcatgggactcagatgataacagcggcgaataatcatcaggttattgaaccaatggatattacctgtacagggaatgctactgcaactgtggatattactggcgggaaaaacaacagcgataattgtgaagttagtttaacaaacggtgccacaagttatatttcagtgagccaaaataagtctgcttggtaccgaacgatgcccgcgattgccttgtccggtggagcgaatcatttatatttaagatcaatcttaaatatttcaaatcagacgaacggtgggtattatactggttcagctgttgtaacaattaatattaattaa

SEQ ID NO: 386660 - DNA, 759 bp, Salmonella enterica
atgaatcgtcaacaaattgtacggcggttatttatcgccgcagctttttatttgcctttttccgcgtcaacattcgcggccacacatactgaaacccatccgtttgctgtaaaactaaccgcaagtcgggtgatatatgacccggccagaaccggaggggttagtctgggggtatccaacaaacaggattaccccattctggtgcagtccgttgtgatggatgcttcccgcaaaaaacacgggagttttattatcaccccgcctctgtttcgtttggatgcgggacaggaaagccgccttcgcatcatcagtactggaggtaattacccaaaagaccgtgagtcactgaactggatttgtgtcaagggtatccctcccaaaggcgatgatctctgggccggggatgcaaagaaaaataacactcgtgatgtaaacctgaatatcgaagtttcagtaaacagctgtattaaattacttatccgtcctgcctctgttatcggtggtgtggagtctgctgcccgccatgtaacctggaaacttcaggggaaccacctgatcgctcataatccgacaccttattatattaatgtttcatctgtacggatgggacagacaactgccagtggtgaaaactatattgccccgttttctgatgggatatatgccgtaaatggtaagacgatttccggggatgttaactggaagctggtgacagattatggcagtgaacaggatatgaaatctgttgccgcccgttaa

SEQ ID NO: 386661 - DNA, 2592 bp, Salmonella enterica
gtggtggttggtccgacgaaatatattatgaacagagtggcgggtaactatcggtattcgggactttttcttttttttctgctgtctggtcagtgttccgcccgcacatggcattttgaccagtccatgcttggtggtgatgcggcggcggatgtttcccttctggaagccggtgggcagttgccgggaacctatcatgtaacggtgatggtgaacggcaatgtggtggatacccgtgatatcgcgtttcatcaggcaaaggggcaggctgaacttttgccctgtctgagcgtcaggcagcttgcgcagtatggtatcaggacggaggattatttttctgattcggatgctggtgatgatgacagggacgaggggaagaaagataagtctgtagatggtgcatgtgcggtgctgagtcgtattccccgggcaactgccacgtttaatttctatgaacagacccttgcgctgagcataccgcaggctgcactgcgtccgcaggatgccggtattgcatctgagaccctgtggaacgacggtattcctgcattactgatgaactatgacgcgagtgagtcccgctcggttaaccgggaggggagcacgcaacataacgactcttcatatgtgcagcttcggccgggaataaacctgggtgcctggcgtttacgaaatgtgacttcctggcagcgcagcagtggctcccggggacaatggcagtcggtatacaccaggctggaacgaaatctttacaggctgaagagtcgcttatttctgggggaggaaagcacatcctcagacgtgtttgacagcattccattccggggaggtatgctcagtacggatgagtccatgataccgtggcaggaaagggagttctcacccgtggttcgtggggtggcccgttctcaggcccgaatagaggtgcgtcagcagggatacctggtgtacagcaccacagtggctcccggtccttttgtgttgtcagacctgccggcgaaaaccggtggtgacctggacgtgacggtcagggaatctgacggacatgagcagcatttccgtgtgccgtacggaatgccggctattgcgcttaaagaaggtcatctgagatacgaggtggctgccggggaataccggccggcagaccgaacagtggatacggttccggtctggcatatgtcggcaatatatggcctcccactgaatatgactctgctggggggtattcagggggggacgcattaccggtctgttgccgtcggtatcgggacactgttggggcatgtgggggcggtgtccctggatactctgcagtcgtccggggacactccgggtgttggtcgcacccggggggctatgtggcggttacgctacagccggacactggaaactattggaaccggaatatatctgtcggcggagcggtacacttcatcacagtaccggaccatgagtgatgtgttgaatatgtggcataaaaagcagactgaccgtttttcaccatattaccgtgacaacaggatgccccgaaaccgcatgactctgaccctgagccagccggtcggctggctgggatatctgaatgtgtccgcagaacgggaagcctatcggtcatccggggggcactcggattcactgagtgtcgggtattccgttactctgcccggggatatttccctgtcgatgaacctgagtcagagcacttctccgcacgccgccactgaacggcaggcaggcgtaatgctgggaatacctctggataccttgttgcatccggggagtggcgcaacctggcagatgacctcttcctccggaaagatggagcaggaagaggggatttacgggcgggcatttaaccagcagctgacctggaatgtccggcaaagtacgccggtgggttccggctccggaacccattcccgacagtccctgtttgtgagtctgccgggaacctacgggcaggtcggaggcagttacagttacagccgtcagtcacagcagatgaccgccagtgcttccggtgggatggttctgcaccgacacggtctgaccctgagccagccgcttagtgattcagtggcgttgatagaagcccccggagccggtggtgtgtcggtgggtaactggacgggcgtgagaacagattttcgggggtatacagtgctgtcccagctgacaccttaccagcagaacagaatatcgctggatccgtcgacgctttcttctgatgcggcaatagaacagacggatgtcatggtggtgccaacggagggggccgtggtgccagcccgttttgtcacgtcgctggggaaaaaatctctggtgaccctgactttccctggagggaaagttgtgccgttcggggcagtggtgcgcctggatcagcccggaaataaggatacgacagggattgtcggagacggcggagccgtttatctgacagggttaccagataaagggcgtctgcaggcgcagtggggacatcagaccggacagcggtgttatgccgattatcttttcccgaagaaggcagaaaaaatgggggatgtttattcattagcgactacctgtcgtcaggtgccgggtaaatag

SEQ ID NO: 386662 - DNA, 528 bp, Salmonella enterica
atggcagcgtttgctgcgctgtgtctgtctggtaccagtgtttatgccgccagtaacggaggaccgcaggaagctgatgccacggtgtcagtgacctcaccgttttctttcacgcatacgctgacaggacaatcgttttctgctggtcagattgttgatggaaccacggtggctgaggggactgtgtcaaccggtggcgacaatcgtataaatacagtcaccctgagctgggatcgaaccgttaatccggaatttatatttgacggttcagattctgcgctgatgctaaatggagacaccgacagggattgggacagtgcagtaccgattagatttacggcagacacaccatcactcattattgaaagtaattctatgcataaatacaacacgcaatttaaattgacaacgccgggaacatcatttcgctatacggttaaagttatcaaggcaggcgcggataatatttttccactgacggcgggggattaccgactggcggtgctcgcggatataagcatagcatag

SEQ ID NO: 386663 - DNA, 543 bp, Salmonella enterica
atgaaacgaaagtatgtcattacagcgtttgctgcgctgtgtctgtctggtaccagtgtttatgccgccagtaacgaggggctgcaggaagccgatgccacggtgtcagtgacctcaccgttttctttcacgcatacgctgacaggacaatcgttttctgctggtcagattgttgatggaaccacggtggctaaggggactgtgtcaaccggtggtgacaatcgtataaatacagtcaccctgagctggaacaacagtgttaacccggtgtttctgttcggaaccaatacagccatgatggagcggaaaggagacagtgacgtagatgacgcaataccagttgaatttacggcagatacaccatcaaacattgttcataccactaaatatggcactgagtttcagttgtcgacgccgggaaatatgttccgttacacgatcagggttgcgaagtttgggccacatgatgcaggagggaataaattcacgctgagatccggagattatcggctggcggcgattgcagatgtgacagcagcatag

SEQ ID NO: 386664 - DNA, 540 bp, Salmonella enterica
atgaaaatgaaaatgaaaatgaaaggatgtggggctgcgatagcagttctgttgagctgttctgcgggttatgcttttgcgggtgattttactggctcgcctgttatggcggaagcttcggtgagcatatcctcgccattgtcctttacgcacacactttcggcaagttcgttttcagccgggaaactggcggcggatacggtttttgccaggggggaggttgcgctgtccggagggggcaatatcagccaggtcaatctgagctggaacagaaatgtcaatccgacaatgctgattgcacaaaaggaagatgaagcagttatgaccagtaccgccagcgatggcagtcaacacagtatttttgttcattttgtcccggaaactcaggcgacatctgcagatggcgatatcggtaaaatttatcgactgagcacgcctggtagcaaatttgactataccgttaaattgctgggagatgctgcagaagcatatgccggaaattacaaattatcggtgcgggcagatgtggctgcagcgtaa

SEQ ID NO: 386665 - DNA, 525 bp, Salmonella enterica
atgaagaaaatggaagggttgatatccctgattgcattgtgtttgtctggcactactgcctgttacgcaggagattttaccggtgcaccggtaactgcaacggctgcagtagcggtctcttcaccattatcctttacgcatacgctttcggcgaattcgtttcagtcaggaatgattgctgccaacacggtcgttgcttcggggacagttgccctgaccgggggaagtcatattagtaaggttaagctgacctgggatcggagtgttaacccggaggcatactcaaaaggaggggacggggcttcggctcaaatgaaaattagtgattctgaccagaccggaattgatatccggtttgttcctgtgacgtcagctaaatatttggccggcgcgggttatgctgtctatcagttggatacgccagccagccagttccggtataacgttaatacgctgatcgacaaacaaacactaaaagccggaagttacaggttgtcagtatctgcagatgtaatggcagcgtaa

SEQ ID NO: 386666 - DNA, 528 bp, Salmonella enterica
atgaaactgaataaagcattactggttctggctgctgcaggttttctgcccggattcgctgctcatgctgcgcccgtggaggccactgcaacgcttgctgtgacagcctcaacggattttcaacatcagttgaccgcgtcaaataatatcgttgctggtaagcttcctgatgatacggttctggcaacgggactggtatcagggcagcagaatctgacgaaagtttctctcgcctggaaccgggctgttaacccaaaggcatcaactttaggtactgagtatggcaccctgattcgcgttggttcgccaaccggggataattctgtaatggctgtggtgaagctggaacctgtaacgcaggccaaagcccacgataatggtatggataagattacatacaccctgacatcgccggcaccatcattcagttatcatatcgtggctgcgaataaggcggctggtgtgtctacagagattcagtccgggtcttataaaatggcagtatcggcagaagccttttttgcctga

SEQ ID NO: 386667 - DNA, 387 bp, Salmonella enterica
atggaactgccagtgcgaatactgaatcttcttagtcagtcaggaaaactgactgcaagagcggtggccggatatattggaattactccggcagaggcgttgcaccggcttcatggactggaaattcagagcgaagtctctcagatgaatggcttctggtttatccgcccacgggaggcccggctgactccgtctgaagtgaataaggttctgaatattattccgggcagagggaatcccggtgttaccgttaccgaaatagccctgactctgggatattcttcgttacagattgaacaggcgataagaggactggccagtacaggacgggtgatgaaatccgggcacggttcctcaatccggtgggtgaagctacggggagggtaa

SEQ ID NO: 386668 - DNA, 510 bp, Salmonella enterica
atgagtaaagcgataattctgtgtgtgctggctctgactatggtatccggttttactgttttgtcggtcgcgaatgcttcgtcattgatggctcaggttcgtatgaatgtcagtccggcgacacagattacacatgagattcgggttaatacagtaacagcaggcaatggttatgatacgggaacgacactggccattggtatgattaacagtaccgtaccgtttacttcccttaatctgaaatgggacagggccattaatcccgctatttcaggcgtagcccgggaggcttatgcagtaaatctggcaacagggaaaaaaatcccggtaagttttgaggtgcagtcgcatgaccggatggtggatgcgggaaatgattctgtaaatgtcattttagatggcggtggcagacttacacagtattcttacggggtggtgttaacgcacggtgaaacgttgtatgccggtgcatatccggttggcgtgctggctgatgtggttattgcctga

SEQ ID NO: 386669 - DNA, 516 bp, Salmonella enterica
atgaaaaaggtagctgccgccggtatgtttttactggttgttggctgggggcatacagtgactggactggctgcttctgttgatgcgctggcagtgctgaaagtgagcgggaatgctctgcggttcagtaataccattattccatctcatgggctccgggccgggagggttccggcatctacacatatcgcagccggactggtactgggtaaccgtgctttcaatgaactgaccctgaaatgggatcgaatcatcaatccggcattacccggggagggggcatcagttgccctgttgcgggcttccggagggaagcccggggtggctgttcgtctggttatgctggcgccggagaagaccgatactatagtggatgacctggagaacgatcaggtgcgttaccggttttctttaagaacgggcgaggcatacggcattaatgtgttacatgatggggagattttagttcccggtatttacaggattgcagttgctgcagacatactggcagcatag

SEQ ID NO: 386670 - DNA, 522 bp, Salmonella enterica
atgaaatacttattacttgttatagctggcgcattgccctgttttgctgcaaatgccgcagtggaggcaactgccacgctggatgtggcggccggtgaggtgacaatcacacacagtctgacagccagtgatatgtcagaagaggatctggggggcggagaggtaatggctaccggtgtggttacaggaaaccggccacttgaaagagtagctctgagctgggacagggatgtaaatccgtatatcaccactccctctcgtttagaagaatatggtatcgtttccgtcgagggacattttaaaacgacggcgtttccggtgaaattaaaggcagtgactccagcgtctgcccgtgattcctggttatatcatcaggtaatatatacgctggcaacgccggggacacagtttcgttatcagatagtgaatgcttctggtgatttctttcctgctaagtcgccatggcatctgtatcccggtaattacaggatggctgtgtcggcagatgttgtgaattgttga

SEQ ID NO: 386671 - DNA, 615 bp, Salmonella enterica
gtggagctgagtcgctcgctgctgtcgggctgggtggatgcatgccgccagctgctgtcaccgctggaagaggcgcttcaggactatgtcctgacggacggcaaactccacgccgatgacacgcccgtcccggtactgttgccagggaataaaaagacgaagaccgggcggttgtggacgtacgttcgcgacgaccgcaacgccgggttcaacgagctgtaccgcaatggtcggataacggaagctgcctgctgggctcacgcccgccgcaagatccacgatgtgcacgttcgtacgccatcggcgctgacggaggaagccctgaaacgtattggcgaactgtatgccatcgaggctgaaatacggggaatgccagcagagcagcgtcttggcgaacgtcagcagaaagctaaaccgcagctggaatctctggaaaactggctgcgtgaaaagatgaaaacgctgtcgcgacactcggagctggcgaaggcattcgcgtacgccctgaaccagtggccggcactgacgtactatgcggaggacggctcagcagtgctccgtgctcaccaccgtggtcagagccgaagaacaggaagtttttgcgacctaggctga

SEQ ID NO: 386672 - DNA, 552 bp, Salmonella enterica
atgaacgacacctcttctgacgaaatccttctgctgaaacagcggcttgccgaacaggaagcgctgaaccgcgccctgctagaaaagctggccgaccgtgaacgcgaaatcgaccatctgcatctgcaggcacagctggataaactctgccggatgaacttcggcagttgttctgaaaaagtatcccgccgtatcgcacagatagaagctggcctgaaggcgcttcagaaagaaagcgatacgctgacaggccgggtagatgccccggcagtccagcgctcgctgcgtcagacccgcacccgcaaaccgttcccggagtcactgcctcgtgacgaaaaacgactgctgccggcagcgacatgctgtccggactgtggcggcgcattgagctacctgggtgaggatgcagccgaacagctagagctgatgcgctgtgccttccgggttatccggactgtacgtgaaaagcatgcctgtactcagtgcgatgccaccgttcgcggcccatcgaacggggtatcgcaggaccggggctgctggcccacgtactga

SEQ ID NO: 386673 - DNA, 513 bp, Salmonella enterica
atgaaaaaaaaactactaagttcgatattatttgtggtcgggatatgcagtgccacttataccctggctgccccggttcaggcaatagccaccctgagcgtgaccgatagcctttctgtttccaatgatttgcgacccgccccagatcttgtcgcgggacatacattttcggcatcagatattgttgcgctagggatagttacaagttacggcggtgatttcagcacaatgacacttaaatgggatcgcagcatcaacccaattgcaaaaacaggagatccatcatcatccatcctgcgttcgacagacggaagaaaacaggccgaaattcgtgttaatatggataaatcatccacagaccaggaagaagctgatgccatcaatgatcagatgcgttaccattttgccccgacaaaacaggcaagctaccggataaatgtgttgcatgacggagaaatttttgcccccgggtcttacaaattgggagtcattgctgatgttgcagctgcatga

SEQ ID NO: 386674 - DNA, 219 bp, Salmonella enterica
atgagcaatattgtgtttaatgcaacatttattgtttctcaccggaaaggtgatggtattctcctttgtgttacagtggctgctgaaagtaaaacagatgcaaaaaacaaggctaaaaagaagctagttctttataattattacaatattgaatgtctgtcagtttgtgtctgtgaatatgattatcgggaaggtgtgaaaattattagtgattcctga

SEQ ID NO: 386675 - DNA, 1302 bp, Salmonella enterica
atgaagctgaaaacatctttactcgcagcggtactaattctgtcttccggtatgacctttgcagcatcaaaggtatggatgcaagaggccgttaataaacaatatgatgaagcagttcagttacgcagagatatacaccaacatgccgaactcggaaatcaggagtttcgtacacaaaaagttgttgtcgatttcctgacaaaacagggtatagacgtagttactggctggaagaatgcgccaacagcagttattggaataattaatccggataaaaaaaacacaatagcgctacgtactgagctggatgcccttccaattaaagagaatacaggtttgcctttcgccagtacaatgacagggaaatattggggtaaaaatggtcctgtctcacatatgtgtggacatgatgttcatatggctatgctgatgtctgctgccaaaattctgcagcagaataaagataagtttgataacagagtcgtattgatttttcagccagcagaagaaggcgacagtcttcatgacccgtttgacagaaacgcgcctttgagtggtgctaatgctctggtgaatgatggtttaattgaaaaatatgatataaaacatgtttttggtatccatgtaatggcccgtcagccagcagggaaaatgcttattgccaggggggctgcactgaatagtgcagatggcttccatatccatgtggatggaaaacaatctcatggtgctatgccctgggcaggtacagatgcaacattagcagctgcaaacattgttgttggtttacagcagattgtcagccgtaacgccgacttgtctgagggaatgggggttattaccgttggtaaatttaatgccggagaaacagcaaacgttatgagtggtactgctgatatgacaggtactgtccgtagtaatcacaatgaagtacgtgatacactgataaaacggattccggaagttgctaaaggtgttgccgaagcagcgggtgcaaaagccgaaactcagatcgctaaaatctaccctgtgacagtgaataatcccgaactggtcgataaaatggttccggtattaaaacagaacggtgttgatgcggaaattagtacatggaatccgggggcttctgaagacttcagtttttacgcagcaaaagtaccaagtatgtttatgttcctcggtgcagattatccgggtgcaaaagatgtacaaaataaccacagtgataaatttgtggttgatgaaaccaccatgcgaaccggaattatggctcatttggttgctgccacagcgaaatattaa

SEQ ID NO: 386676 - DNA, 147 bp, Salmonella enterica
atgaatgacaaccaggcggatagcgtcattggaagcagcgcggcggattttattgcctcgcagatcgtttttcctgtcatgatcgcgcagcgctctcatagcacagaacgacgttttcaattctgttatgttccctggcggcgataa

SEQ ID NO: 386677 - DNA, 909 bp, Salmonella enterica
atgcgggaagaactggactttaaatcactgcgttttttctctgcattataccgactgggcaacgtttcccctgcagcggaagcccttaatatcagccagcctaccggtagtctgctgctgaaaaaactacgcgatcattttgacgatcctctctttgtgcgcatcggacaacggatgatcccaacgccgcgagccgacaatatcgcgccaaccatctttacccttctccagttagccgataacgagctaccgggcaatcctgaattctccccacaaaccagcacccgtaattttaccattggcatgaccgatatcagccagatgacgatcctaccgtctctgcacacacagcttcagcagcagggcgctgaaggcatcactttttccgtgctaaatatcgacgaccaaatgttgacggctctggagtccggcaaatgtgatttatccattggctacctgatgcaattaccggatagcacgtatcagcagcgcctgtttaatcagtcatatgtctgcctgacagcggaaaaccatccgcgcattcactccacgttcaccgcagaacactggcgcaaagaaaagcatctggcgatccacgtcaacggcaccggacatggcgatattgataaattgctcaatgagcacggcatgccccggcatgtagctctcactctaccgagctttttgggcacgggagaacttgttgcgggcagcgaactggttgccgtggtgccggaacagttagcgcgtcatattgtcaaacgttacccttgtcgcaactggccgctgccattctcgctaccagaaattgccatacgccaggtctggcatcagcgcctgcaccgcgatccgggtcatatttggctacgttcactgatcgctagcattactgcggataatggtggttaa

SEQ ID NO: 386678 - DNA, 999 bp, Salmonella enterica
atgcgcggtaaaatcgccttagaagaacatgtatctacacctaaaaacaacagtctgtgggattcaacaggtgaagcagcacgaaatggctcagaatatatgaaggatgttgagcgtcgcttattagatcgcagctatcagcttgatgaaatggcgcaacgtaatatcgaccacgttattctttcactgacttcaccaggcgcgcaatcaattttggataaagcgacagccgtttcttttgctcacgaaactaacgattatatcgtcgaaaattatgtcaaacccaatccggataaattcagcgctttcgctacgctggcgctgcaaaatccggaagccgccgcagaagaactggaacgtgcggtgaaaaaactgggcatgaaaggtgcgctgattaacggttataccaacgtcaaagacagcgaacatggactgtatctggatgacgaatccatgctggtattctgggataaagttaacgaactgaacgtcccggtttacctgcaccctcgcgaaccgctggaaggtccggcacgcggcatctataccggttatgaaagcctgatcggctccgcgtggggctttgcgcaggaaaccgctgttcacgctatccgtctgatgatgagcggcctgtttgatcgttacccgaatctgaatctggtgctcggtcaccttggcgaaggtctggtgcatatgctgccgcgtactcagcatcgtctgtaccgtcagcgttttggctgtggtctgggcaaagcggaaaaaccgttaatgcactacctgcaaaataactttattgtcaccaccagcggccacttcaacacttactctctgcaaaatgccattgaaattatgggcgccgaccgggtaatgttctccgttgattatccgtatgaagatattcatcaggcctgcgactggttcgatccactggaaatggatgccgacctgaaaaacaaaatcgcatggggcaacgccagccgcgtatttaacattaaataa

SEQ ID NO: 386679 - DNA, 723 bp, Salmonella enterica
atgccggtaggcatttttgtctgtagtggttcgctgctggttggcgcaattattggcgcctctctcaaccgatttattcccgagcatttaaaaaagactttacctcttattgccggattaatttcgattagcatgggggcatttttcctcaataaactggtgaacctaccgcctattgctctggcggttattgtcggcacaattatcggttgcctgctgaatatcgaaaaatggatcgaaagggccggaactaagttacgtacgcccattgagaaaatattcccaacaaaagaggatgccagtcttagctctgaagactttatcaatcagtttatcgccgtcttgatcttgttctgcgccagcggtacgggtatttttggcgcattaactgaaggtatgaccggcgatgcgacgatattgataaccaaatcaatccttgatttctttaccgccgccatttttgcctccgcgctgggttacattatcgccgttatctttgtgcctcagctcatcgtgtttgcgattctcttttttgccgccagcttcatcatgacattgctcaacccactgatgatcgccgattttaccgcctgcggcggcatcatcatgctggcaactggattcaggctatgcggcattcgcagctttccgactgcgaacatgctaccggcactgatccttgtgatgcctttctccaccggctggcaacagtttgtcgcctga

SEQ ID NO: 386680 - DNA, 567 bp, Salmonella enterica
atgcagaaacccaaaaagctgttcaacaacaccgatcatatccgcagtgaaatcatgcaaggactggtgtacgccggaatggggaaaatccacgctctgacggcgtactgcgcagtctaccgcaccataaagtcgggcgtgcagaccgttatcgtcagcggcggaggcagcggtcatgaaccaacttttgccgggtttgtcggtgaaggagggatcgacgcctgcgcgctcggcgaagtcttcacttcaccgtctcccgatcagattatcgaagccagccgggcggtccatcagggcagcggcgcaaagccgggagataaaacgatggtggatgcgctagccgccgcggcggagcaagccaacactgacgttgcgctacaactgcccgaagcgctgtctcgctgcgcgcaggcggcaatggcgggcgcggagagaacctgcaccatgacggcccgctttgggcgggcaaaaaacctgggtgagcgggccatcggacactgcgatcctggcgcggtctccatggcgctgatcctacaatttatggctgagtttgcccatcaggactaa

SEQ ID NO: 386681 - DNA, 1194 bp, Salmonella enterica
atgataatcaaaccaaaaattcgtggattcatctgtacaactacccatccgactggctgtaaagtcaatgtggaaaaacagatcgagtatgtgaagaaaaacgggaaaatcgctaacggcccttcccgcgtactggtcatcggagcctccaccggttacggcctggcctccagaatttccgccgcctttggcagcggtgccgccactatcggcgtattttttgaaaaacctggcacggaaaccaaaccgggttccgctggctggtataacgcggcggctttcgatgaagcagctaaacgcgaaggcctgtatgccaaaagcatcaacggcgatgcgttctctgaccaatgccgtgatgaagttatcaaactgatcaaagaagacctgggtcagattgatttagtcgtttactcgctggcgtccccggtgcgtaaaatgccgaaaaccggtgaaatcgtccgttccgcgctgaaaccgatcggcgaggtttatacctctaaagcgatcgatactaacaaggatcagatcaccaccgccagcattgaaccggccaccgacgaagaagtccggaataccgtcaccgtcatgggcggcgaagactgggaactgtggatgagcgcgctgaacgaagctggtgtgctggccgacggcgtgaaaactgtggcctattcttacatcggtaccgatctgacctggccaatctactggcacggcgcgctgggcaaagcgaaagaagaccttgaccgcgcagcaagcgcgctgcgtaaccaactggcaccgctgaatggcactgcaaacgtcgcggtgctgaaatccgtggtcacccaggcttcctctgccattccggtgatgccgctgtatatctccatggtcttcaagctgatgaaagaacagggaattcacgaaggttgcatcgagcagatcaaccgtctgatgaccaccagcctgtacgacgataacgtggcgcttgatgacaaccagcgtatccgtatggatgactgggagctgcgcgaagacattcagcaggcgtgccgcaatctatggccgctgatcaccactgaaaacctggcgcaagaaacagactatgcaggctataagctggaattcctgaatttgttcggttttggcctcgacgaagtggactatgatgctgacgtgaacaccgaagtcgaattcgatgtgatcacgctgtaa

SEQ ID NO: 386682 - DNA, 801 bp, Salmonella enterica
gtggcccacctctactgcactgataacggcaggcccgccatcgacccggtccgcctgattaaaatgatgctgccgggctatctcttcggtatcccttctgaacgccgcctggttaaggaaatccaggtcaatgtcgcttactgctggctcctgcgtatggggctgacggagaaagtgccggacgcctccactctcagccagaaccgtcttcgccgcgttaacgacagcggtatctttgaacagatttttgaccatattgtggaacaggcgctggcccgcgggatggcgaacggtcgggtactttacaccgacagcacccacctgaaagcaaacgcgaacccgcgtaaggcagtgaacgaacaacgcccggaaggcgtgagtgaatatctggagcaactgaatgccgccgtggaggccgacaggaagcagcacgaaaaaaagccgctgcccggcgtaaaaaggacgcccgacagtgcagccgccaccgttaagaataccaaagtcagcaccactgacccggaaagtggcttcatgcaccgggagggcaagccgaaggggttcttctggctggaccaccgtacggtggacggaaagcacggcatcatcatggatacccacgtcacaccgggcaatgtccatgacagccagccgttcatcggcaggctggcacatcaggtggaacggttcgggctggatacggtgaccgtgggcgtggacgcaggctacttcacggcagcggtgtgtcacctgacgcaggaggcgggtatcgcgctggtaccgggcctgccgtcgcctgaataa

SEQ ID NO: 386683 - DNA, 1134 bp, Salmonella enterica
ttgaggacgatcatcaggggtatctctctggcgctactgtttctggcggggagtgtatccgccaacgccgccttaccgctgacgctctacctgtccactccctcaatgcctgctgccagtgaagcctggccgacgatgcagccgcagccgctaccaaaaggattacgcccgtgctgcgcctttggttatgacttgcgcgccgagctgctgggattaccgatcccgttctatcagttaaataacgtggtaacggcggattcgctgggacatcatcagtataatgaccatctgtactcaggactggcgaacctgaccggccttagcggtgagaataacggcattgtgtacaccttgcgtggcggatttatcgacaccgcgcacgtgcgggataccgccgatatgacggtgtatatcttcagccaactgttaccaaagttggggcaggcttttacgctgaatctgggcgatgaattggctgaacgtcgtctggtcttcaccgccttcccccctccgattgatgtacgtgagcgttatacgttggccgtctggctgtcggcgcatctggcgttccaggtggcagagtggcatgaaatcgcccagtggtacggtttcgaatctgttagcggattttctgaaggagtatcggccttttcgccggaagatctctattccaacctcgcaggcgcccgcctggcggcatctttaatcctcgacggccagacgaaaacgcaagagatgtacaacacggcgatggaaaccgcgctgcggcaagcgctgacgcagttggcggcgcaatcagcgcaagtcacgcgttttcagttcgatatgctggatggtcgctggtggaacagccagcggcgggtaccagaaaagtatctggtgctgcatcgtaattatcagatgggcgataatcgtctgccgactgcggttcccggtgagctaacgccgccattgcctctgaaattgccccattactggcgcggcatcgcgctcagtgcgctggcgcaactgcaactgtggcctggtgatggtatgaggcagctaccgtctcccacacattattacagcgaaaaagattttgcctcactggcggaacaggcgaggctgcaggatgaaaaaacgcagaatcattaa

SEQ ID NO: 386684 - DNA, 1224 bp, Salmonella enterica
atgaaatgtaaaatgtattatctggcattcattgccagcgggatcctttacacgcaacactacgctcttgctgctcaacaggacgcttgtctgacctatgactgtgaacaaatgttgagcatcaagcaacgtattcgtcgtcacgacgcccaatacgctcccgcctggcaagcgctattgctgcaggctgacgcggcgcttgaccatgctgtttattcggtcacggataaaaccctgatgccggtttctggaaataagcatgactactacagctttggcccctactggtggccaaatcctggcagtaaagacggtatgccctatatccgtaaagacggacaaataaatccagacgctaaaacgaacggtactgacagtaagcgcatggtgcaattttccaatgacgttcgggcgctggcgctggcctggttttacagtggcgaggataaatacgcgaagaaagcgcagcaattgctacaggcctggtttctcgacagtaaaacccggatgaaccctaacctaaactatgcacaggcgatccccggaaaagtcgacggacgcggaattggtattattgatacccgcgtcttgattgatgtggcggatagcattgttttactggaaaactcgggccacatcccttcgcaagcgctgacgggctataaaaagtggtacgccgactatacgcaatggctattaacgagtcacaacgggtttgaagaggcgaactggtataataatcacggcgcatggtatgacgcgcaggtgacggcattttccctgtttaccggtcagcagcaacaggcgtcgcgtcaggtggaaattttcaaattacgccatctgatttctcaggtaaacgctgccggtgagatcacatcagaaacagagcgcacacgctccttccattacaccaattttgccctctcggcttatgcacatatgggtcgctatggtgaaaaagtacaaaatgatgtctggggtttcgaactggataaccgcacaatgaaaaaagcgtttgctctggtcagcaaacaaacgggaaaaccgcagacagcctgggcgcatgaagatatccgctataccccttctgaagcaacaggaccgttgttagcggccgcaagagcgtatcaggatgcggatttcatcaacagcgcagcacgcctcgcaaaagaaaatagtaaagatatcaatattctgatcccaggatcggtgctagtgaaataa

SEQ ID NO: 386685 - DNA, 1950 bp, Salmonella enterica
atgaagcagtttacacaatcgcaggtgttgcaggcccgtgaacatgtcacgccagagataatagaagcgctgatcgcaaacaacagtgatgttatgagtaacccggttctggtgcctgaaacggggtgcgctacatggaatcactactttttttgcccggatcatagcgtgcgtttaatctgggatcgtcattctccaggattacatcactgccctattgatcacgcaagttttgctggcgaaccctatgatggcgcatggtggcgttggcttaatgggttgaatgccaaagcatgttatgaattagcggtactatggctgctaacgaatgaaccccactatctcagtaaggttcgggatattttgatgcagtacgctaaatattatccggactatcaggagcatggtggcattccttacaatggcccaggtaaagctaacgcccagacattatgcgaggccaactgtcatacagattttgcaaggggttttgacattatccgaacaacgttaatagaggaggaagaccagtatatcgctgaacgtctattacgttccggtgctgagtttttgatgaaacaccggtgtaatcagatccataatcacgaagtcaaaataagcgccgcagttggcattattggggctgtactgggcaataaaaggtatctcgaatttgcggttaatagccagtatggacttcgctatcagctggaacatgccttaatgccagacggtctgtggtttgaaggttctctgcactaccatttttacgcgctgcagggatttttcacctatgagaaagtcgcccgtaattcaggttacagtttgctggaaacagcctggtatcctaaaatgttgagcgtaccgctgtcgcagttaatgccggacatgacgctaccgaaaattaacgactgtgttaacggtcaggaaaaactgacgcatactgatatttacgaatttgcctggtggcattatggtacgcctgaatatggacaactgttaaaacagatttacagccagcacccacgaaacagcatcgatgccttattttacggacaagcgctcccttctacgcctcttttaccgcctcaaaagacgctacacatcgcagaaagtggcctgaccattatcaggaataaaccaggacaagccatttgtatcaaacatactccctatggtggcgagcacgatcattacgatcgtctggggttaacggtgtttaatcatggtcgggcgatatttccggatttaggtaccaccggctacggcgcgcccctgcattacggttattacaagaattctttttcacataatacgctgtgtattaacgggaggaaccaggcgccagcgaatccctatgtggtggcatatcgcgaggaaaatggcacagtacagctcatcacagaagtcgagtggaaaagtactcccctaatcccggatagtaaaacccggattgagtgggatgccgaagcttataaagatgttgtttaccgtagaaacattaccgctaaggatgatctactgattgatatcattacggttgataacccttacgcccaggaaattaataccagttacctgattaatgcgacgccgccggaggcagagtacaccaccgcgctttttccacatacgatcgctactgatgccgtgcctattgcggctcctgtaaaactgagctggcagtcgcccgataagttcaacatttactgtttctccgcaggtaagagcgtacttttccagggcaaggggccgaataatccttccacgtcagagctgacctatttgacgatgcgctcaaaagaacagcgagttatccatatcaccgtcactgatttttccgggaacgatgatatcgacatgaaaatagaaaatgagtacctgctcgttacggtcaatgcccttgccgctcattctattcctctaatctcaaaccaggagagctattaa

SEQ ID NO: 386686 - DNA, 333 bp, Salmonella enterica
atgtttgtattgcacagtaatacggtgaaggagaatgtgggagagggcgtttcccggcatatcctcgcccatagtggttcccttatggcagtagaagtcacgttcgataaaggcgcaataggccccatgcatagtcatcctcatgaacagctgacctatgtgcttgacggtgagtttgaatttacgattggcgaagagacgcgggtggtgagacagggagataccttatataagcgccctgatattctccacggctgcgtttgtttgcaggcgggaaaactgcttgatgtgtttacgcccatccgggaggattttttggctgccagcaaataa

SEQ ID NO: 386687 - DNA, 618 bp, Salmonella enterica
atgaaacaaccatgggaactaaaccctgaacttacacaagaacgcctaaagaaactggcctctctcatccgcgacgttagagatgatgtggtcgacagacatgatgatgatttaggcgactcagcgcgcgcaaccggtatgcgggcatatgaatgttgcagaacacggatagctcgtgcttctatggactcagaagaatggccctggcttggaattgtaaaaaaagatggtaaatttacgttttccatcaaatcagtaccagtgcgactctatagaggtaagccagatagtcctgaagaacgtcgattaattccatgttatgaagctttgagccaagctagtttcttatttgaagaagttggtgatgcagcagatatcatatggttttttgctattgaagtagacgaattcagatacgtagatcgggtcacattcactggttttcttgaaggtgcccaagtttcatgctgggagattccactcaatgagaaagtgcctgctatcagctcaattgatgcagaacttcctgagcctgtgaaaatcgagaaaccagtcgtttctgttaaaaagaaagaagagaaaaaagcaaaaaatgatgatacgaatgatggtcagtaa

SEQ ID NO: 386688 - DNA, 1128 bp, Salmonella enterica
atgtccatgacattttatggcgagcggttaaggctcgcccgtttactaaaaggttataccctgcaagaattgggggatgctgttgcggttacaagacaaagcatccaccagtatgagagtgatgctagagcacctgcatatgatatacgcaatgctttggcagagctcttgcaggtatcgcctaaattttttgaatatcctctggctggtgatgtaaaaccagaacagtgccattttcgtaaacgccagacaacaccagctggtgtgaaggaaagggtgcaatcgtatagtactattcttgaacaattagtatctgaattatatgagcacttagacttacctgagaaccgttttaatctaattgataatgagaagatccctgaactcactgctcctattattgaaaagattgcagagggtgctcgagttcgctggggattaacagatgatgcccctatagacaatatggttaatgttgttgaaaaccaaggagcaatagttacgacttttgatggggtctcagataaagttgacgctctttcaattaacaggaaatatcccattatcattcgtaatactgcgaaagaaagcgtatgtagaatgcgttttgatatcgcacatgaatgcggtcatctaatcatgcatgatggcattgaaactggttgtaaaaaaacagaaagagaagctgatgcttttgctagtgcatttttatttccacgcaaatcttttgcccgagaatttcctgcttgtataacatcaagaggaacaattgattggaaaaaagtataccacctaaaattaaggtggaaaatgagtgcaagggcgataatatatcgtgctcatttcttaggatttattaatgctcagcagtacagaagtgctaatgtttggtttagtcagaccagacaagctaaaaaagaaaagtatgacgattccatcccaatggaagaacctcatatactacaagagagtttattggttttaaaagaacagttgggtatttcattcgaaatgcttgcagacaaactatgtgtaaaacctcatttgttagcagatatatgtggtatcgagtatactccgcctaaacaagataattatgaaaatgtagtggttccgtttaaattttaa

SEQ ID NO: 386689 - DNA, 714 bp, Salmonella enterica
atggaaattaactcctttacagaatttcatagtgtttttggtgaatataggaaaaataatcaatggatgttccgtggtcaagctaatcattcatgggaagtaaagcctaaagcaggaaggcatccttatcttgaaaaggatgatttagaatatcttgagggttggaaacgaaaagcgtctgaatacattaaagctaagccgcaaaatgattgggaatggatggctatcgcacaacatcatggattaccaacgcgattgctagattggtcttataatcctttagtcgcttctttttttgcgtgtctctctgaacctgaggaagatgccgctatttactgcttatccccacattgggagattatccctgataaagcgaaaccgggtaagcatagcaatatcgctagatataaacctactatggttgcatctagaattggtttgcaaagtgggttatttacagcccatccaaaccctgatgaagatatttcaaaaggtttaagtaaagaagataaatttgaaaaacatattatcaagtcatcttataagaaacagatgctctttgagctcaatcattatggtgttaataggttgacattaatgggggatcttgatggattgtcatcacacatgtgttggattctagaaaaccgacgttattgggttgatcatgatgagtttttaagtgagttatcaggaaaaaaacctgttaagtga

SEQ ID NO: 386690 - DNA, 876 bp, Salmonella enterica
atgaatgctcataaaatatatatgccacccccctcgaattggcaggattttcaaacattagtaggtgacgttgccagattgaaatatgttccagagtcagttcaagaatatgggaggcaaggtcaaaaacaaaatggagtagatgttattgcagagagcataaatggagatataattggctttcaatgcaaagagacaaagaaaggcactattactaaagaggttgttgactgtgagattgaaaaagctaaaaacttcgtgcctaatttatctgtgttctttatagttacaacttcccctagagatgtacatttgcaagattactgtaataaattgaataaaaatggtggtcttgggtttaaaatttatatgaggttttgggatgatatgattgatgatattaatcgttctagatcattgcttgtatcatcttataagtattacctcgacgaattcggaatgcgggaaaaagaagcccatctatatgcaatagctcaagcctttaatcggccagcatttacagatgattttttgcatgaaagaaatatatctgatttcgagtctgcattggttgataccaaggctttgctaagaacagggtatttatatgatcgctttggtaaaaatttagtattgcaaaccattccctcatcggcaataggttgcatagaatataaggcatttatcgatgaggttgataaaaacattgatgtgatttatcaggctgtattaaaggataaaaagttgctacagaaaaatccccgacaatttgatgagcgcgctggggagtataatataaaaaggagaaagattatgcgtaagataaatgaaatattaaatgataacaatatacaaaaaatatattgccattattga

SEQ ID NO: 386691 - DNA, 876 bp, Salmonella enterica
atgtcgaaacttacaaaacgcatggaaaaactcgccctgctggctggcggcagttttaaaacagtccatgatcgcctccgcatcgccgggcgtttaagccagcatctgcacaagctgaatatccagattcaggatctccagcatctgaaatcgtcacatatcgaaagctacgtgatggcgcgacgggaagcaggcattacgccacgcacgctacaaaacgagatggctgccatgcgcaccatccttgctcagtctggacgtcaaaaatttgcccaatcggagcgcatcagcaataaagcgctcgggctgggtaacgccagccgggcaggaacgcatctgccattaacctcagaacgctggttgtcggcgctgtctgcttttcatgaaaaggatgaagggctggctctgacgctggagcttgccagagcaatgggtttgcgttcacaggaagcggtgcagtgttgtcagtctctgaagacatgggccgctgcgttagagcgtggagaaaaccgattgcaggtggtttttggcaccaaaggatcacgttcccgtcagacggtggtgctcgaacctgaaaggttacgcagcatcctgaaccaggctatacccctgatggcacaacgcgggggacgtttgctcaataaacccgatctgcgcgccgcaatgaattactggcgtgccagcgcagttcgcgcagggctgactggcccctatgcaccacacagtctgcgctattcatgggcgcaggaggcgatggcgcactaccaaggactggggctgagtataaaggaagccagggcgatggttgcgatggatcttggtcatggcgatggtcgagggcgctacatccagcaggtgtatgggaggcaatcatga

SEQ ID NO: 386692 - DNA, 984 bp, Salmonella enterica
atgagctattacgtttctgccgtctccgatcgggcacgcaataactggccgaaaatatttgaacaacttggcattttcattccaccaaatcatcggcatggcccgtgtccctgttgtgggggtaaggatcgcttcaggatggatgatctggaggggcgcggcacatggttctgcaatcagtgcggcgcaggtgacggactggatctggcttcccgcttcttcggttgcgcactggttgcggccgccggaatggtgcaggacatggatcctgtaccgctggttccgccagccagggaaaaatcacaggctttgaatatagaatcgcgtattaagacactgcttcgtcattgcgaatccggagaagcgccgtatctgacaacgcgaggctggcgacgagcccagtggcttctgactgaacgtagtagccggacaatctgcggcgtgcatttcggggcgggtacgctggtattgccaattcgaaatacaggcgcgcagctaacaggtgcgcagttcattcatcctggagggaaaaagtacctgctacccggtagccatctgaaggattgtttttgcccggtacatcaggcgagccgcaacggtagaccggaaccctgggcaccggacaacaaaccaccggaaggcatcatcattaccgaaggatatgcaaccgcgcttgcggtctcatgccttcatcattttccagtcgttgctgccctgtcggcgcacaacctgaaaaatgtggccatcgctttccgggagcagtggcctgaatgccaccttatcctggctggcgataatgattgcagtcaggagaaaaatacagggttgctgaatgcaaccgccgctgccgaggtagtgaagggctgtgtggttctccctgcagacactacattgagcgactgggatgaattttaccgtcactacggtgaatccatttcccggattgtgttcaatcagcagcttcctgcaaatctctggtcttaa

SEQ ID NO: 386693 - DNA, 1053 bp, Salmonella enterica
atgacagcatcagaccgtactctcaccacctcccttccgctgcgccgaggctcggaagggtttaacaccagtcaggattatctggttaaaggactcatccccgccggagcgctgtgcagtatttacggccccggcggctcttttaaatcctttctggcggtatcgctggcgtgccatattgccagcggtacgtcatggggcggaagacgagtcaatcagggtgccgtgctgtttatcgccggagaaggaggaaccggtgtatcacggcggatccgcgcctgggaactcagcgttaatgacgagatagcgctcgataatctgtttcgcgtcgactgcccgatctttccagccgctccgggaagcatcgaacaggtgatcctggcggcgaaggacattcagaacatgaccggaatgccggtacggctgatcatcctcgatacgctggcccgctgttttggtaactcagatgaaaacaccgcgcgggatatgggcgcatttatccagggttgcgacgccattcggtatcatacgtgcgcagcgatgatgatcgttcatcactcgggtaaggatcaagaacggggcgcacgcggttcaagtgcgtttcaggccgcgctggatgccgagtttaatgtcaggcgcgaggggcggcgcaacgctatcaccctgagttgtacaaagatgaaagatgcggagatgccggagatcaccgcctacgatcttgaggaagttgttatctataccgatagcgatggcgaaccagtgacctcactggtgctgaatgacgagcccaggcaacctgacgatgacttactgagtagtggcataccacccggcgttcctcatatcacccgcaaccatacggcgctatggcgctgtattaaccaacgcatcagccagaataagccttgtacccgcgcgctcttgcgcgacgatctacgggctaagggaattaacgtcgagaagaaattttcgcgctggctggagaagctactgcgcgagcaactgattgtgctcgatggagaacagatccggctcctggatacgggggaatga

SEQ ID NO: 386694 - DNA, 1323 bp, Salmonella enterica
atggaacacactgaaataacttttgaatatcgtgatgaattcaatcgaaaaccaatcgctgaaaatctaatagaactattagattcagatattgatatatcacctatgattatcgacgggatgtggggaacgggcaaaacagagttctgccataaaatcatcaataaaatgaagagcagagatagtaaggtgatttatatagatgctttttctgacgatcatgctgattcaccattattgacaatattgtcatcaataatatctttaatacccactgaaaataatagcagaacagatttcataaaaaaagcgattcctgcgttgcgttttgttggtaaaacggctatgaaggctagtgtatcatggtttcttaaacaagaagctgataaggtagcagaggattttcaagaagctgtacatgaaataagtaataaagcaatagacaatactgtcgagactattttaaatgaccatatagaatcacagaaaaacataaactccttaaaagaagctctaaatacactcagcaatggagaaaaaataacaatatttattgatgagttagatcgttgcaagccaaattttgcagtatcaattcttgaatgcataaaacatatatttgatttatctaatgtgaactttgtgcttataacaaatacacatcaattaatagcctctataaatcatgtatacggtgcatctgtagatgcaaaaaaataccttgataaatttataaagttttcttattaccttcctgaaagatctaaaacagactatgatgcagatatacttgcatcacaaatccactgggaaacattggcatcagaaaaagaagatctaattaagataaaagataattatgaaagagacatgaattatcttatcgagtgtaactctttatctctccgtgatactgagaaattagcacgctatttagaaattttacaaaaaattgatagtgggaaaattggtgatatttattacggtcctgcactggcaaaattaatagctgtatatattttttgtttcaatacaaaaacagctatcaacgcacttaacaataaatctaaacttttagatatactaaaaacattcaacctcgaaaaatttaactttcaattaaacacagatgaaacaccaaatataataatcgcactcttcaatatatttaaagaccatcaggacatgagctctatacacactgatctgaatgaggaaatcattcgaaactggactatttatatgtcaagaaatgcaggggctccagccagcaatttactacgcacttttaaccagacaataaataaactgctactaaaataa

SEQ ID NO: 386695 - DNA, 204 bp, Salmonella enterica
atgaaaatcaccgtagaacaaccctcagccagagaactggtcgatcgctcgcgagtcctggtgcatgtgatgctcgagcatcctgatgatatcggcccgaattatgcgttgcttctcatccttgccgatcagctacaactgttaagagatgcttttgaagaagatgaggtcagacggcttagagatgagaaattaccgcagtaa

SEQ ID NO: 386696 - DNA, 198 bp, Salmonella enterica
atgtttgtagtgctactggcgcggcctgcgctcgccccttcaatggtggctcaggcaggggcttcgaaagaagcgccgggtcgtgataaccggtacgccaaccctgtctgggtcaccaccagtgagcctggcgtctccggtggtggcattaacctgcttatcacgaagcggagcgctgcgtatgtgtcctgtccctga

SEQ ID NO: 386697 - DNA, 1428 bp, Salmonella enterica
atgcaatttaaagccgggtttttatggggcggcgctgttgccgcgcatcagttggaaggcggctggcaggaaggaggaaaaggcgttagcgtggctgatgtgatgacggcgggcgcacatggcgtaccgcgcgaaattactgatggcgtgttatcaggaaaaaactaccctaaccacgaagccattgatttttaccatcgctataaagacgatttgcaactatttgctgagatgggatataaatgctttcgcacatcaattgcatggacgcgtattttccccaatggcgatgagttaacgccgaatgaagcggggctggctttttatgatgatctcttcgatgagtgtttgaaactgggaattgagcccgttattacgctttctcatttcgagatgccttatcacctggttacccaatatggcggctggcgtaatcgtaagttgattgaattctttgtccgtttcgccagcgtggtttttactcgctaccagcacaaagtaaagtactggatgacgttcaacgagatcaataatcaggctaactttcacgaagatttcgcgccgtttactaattccggcctgaaattcaggccaggtgaagaccgtgagccggttatgtaccaggctgcgcattacgaactggtcgccagcgctattgcggcgaaagtcgcgcatgaaatcaatcctgctctccaggttggctgtatgatcgcaatgtgccctatttacccgctgacttgcgagcctaatgatatgatgatggcgatgaacgccatgcatcgccgctactggtttacagatgtccatgtacgtggcaaatatccacagcatctgctgaactattttgaacgccgcggttttgtgctggatattaccgaagaagatcgccaggcgctgactcagggatgcgttgactatatcggcttcagctattatatgtcgttcgcgactaaagctaccgttgaaaatccgctactggattataatgaaacgaccagcctggtttctaatccatatatacagaaatcggattggggctggcaaattgatccggtgggcctgcgttattcactgaactggttctacgaccattatcaactgccattatttattgtagaaaatggtttcggcgcgaacgatgtgttagagagcgatggttcagttaacgaccagtaccgcatcgactatctttctgcccacattgcagagatgaaaaaagcggtagtggaagatggcgtagatttgatgggatatacgccctgggggtgtattgacctcatttccgcgggaacaggcgagatgaaaaaacgctatggctttatctatgttgataaagataatgaaggcaaaggtacgcttaagcgcagccgtaaaaaatcatttgcctggtatcaacgcgttatagccagtaatggcgaacatctctaa

SEQ ID NO: 386698 - DNA, 888 bp, Salmonella enterica
atgaaactagctgcatttgatattggcggcacagcgttaaaaatggcgattgtgaatcagaatggaacattcctggaaaaaaataaaagacagattatcgacagtgatggcgatcagattctgaatgcgatgatggcctggatagatattcatcctgattgcaatggcatagcgataagcgctccgggctatgtcaatccagaatctggttttattgaaatgggaggcgcgattcgaaaatttgatcgcttccatctgaaaaactggctggaggagcgacgtggtctccccgttacggtagaaaacgatgccaactgcgtattgttagccgaacggtggcagggtaaagccagaaatatgcgtaatttcctggtactcaccattggtacagggattggtggggcaattttctgcaataacgcgctggttcatggtgccagcttcaaagcgggagaatttggttacatgcaaacaaccaggccaggaatccaaagtattcaacactcttcaatgaatgaaaattgtacgcttcgtgtcttacgttttcgctacgcagattattttggcaaaaaactggaggacgtgacaggtgaagagattttcgatcgttacgaggctggtaatacagtatgccaacgtttggttagcgagttctttaatgatctcggtactgggctttataacctcgtcaatatctttgaccctcaagtcatatttatcggcggcggcattgttgagaggcctggtttcattgaaaaacttaaagagaatctttattggtttggtatcgagaaatatatcaatagtgtcagtaccggtaatgatgccggtctgattggcgcagtttaccattttaatcagcaaacaaaatcgcttatctgtgattaa

SEQ ID NO: 386699 - DNA, 1638 bp, Salmonella enterica
atgtattcaagtaaattgaagatcaacctgttagctatttctgtgctagcagctttgttccctaccttaacgctagctgcaaatttaactgttgaacaacgccttcaattgctggaggctgagttatctgccaataaaaaagaacttcaggagacacaatcacagttatctatctataaaaataaaatggcggcgatggaagttagcctacaacaaactgaaaggcagcgagatacagataaaacgggaattccggtaaaggataataaacggatatcatctataaagattaaacccgaacaacaggttgtattaagcaatacacaaggagataaaacaacagttcaaaatgtaacgatgaaggatattagccgatttattaaggatgatattggctttagttatcaagggtatttccgttcaggatgggggacatcaaatcatggttcaccacaaacctatgctgcaggctcattggggcgttttggtaacgaaatgagcggctggtttgaccttacgctaaatcaacgtgtttataaccaggatggaaaaacagcgaatgcgattgtgacctatgatggaaatgttggggagcaatataacgacgcatggtttggcgatagtgataatgaaaatatcatgcagtttagtgatatttttctcacaacacgtggatttttaccctttgctccggaagccgatttttgggtcgggaagcataaattacctgagtatgaggttcagatgcttgactggaagcaactcactacagatgttgctgccgggataggtatccaaaattgggttattggcaaaggacaattggatatatcgctcagccgtgatgatgttgatgtttattcacgggacttttccagaactacgcaaatgaacaccaactcaatagatattcgctaccgtaatattcctctttgggataaaagctctttctctgtcatgggtaaatatgcttttgcgaataaaaccgatgaacaggagagaaatgaggataacaattcattttttaagctcaaagatacatggatggctactgctattgtacgccaggaactacctaaggatggttttaatgagtttactcttcaggttgcgaataactcatatgccagtagctttgctgaatttacaggttccagtgactctatatcatcaggacgttactactatggcgatcactcaaatggtattgcatggcgattgatatctcagggagaattatatctggccgatcgtattattatggctaatgcaatcgtgggcgctcatggtgaagatatttacagctatgagacaggagcccatagtgattttagtagcctgcgaaccgttattcgtcccgcctggatttggaatacctataacgaatcaggggtcgaattaggctggtttgtacagaagaatactaccagtaatggcacagatgctaaggagtctgcatataaagctacactttatcatgcgctaaaagttggacccagtttacttaattcaagaccagaaattcgcttctatggtacttatatagacattctcaataatgagctatccaattttagattcaatgataacagtaaagatcaattcatgataggggttcaggctgaggtttggtggtaa

SEQ ID NO: 386700 - DNA, 312 bp, Salmonella enterica
atgtttgccgatgaaagtaccgtgatggaattacttatttatgcaggccaggcccgctctgatgctatggaagctatcgccgcttctcgtcgtaaagaatgggataccgctaattcattaatgcttagttcagaagcggcgtgccgtgaagcacataaaatccagacggcattaatcggtttggatgaagggactggaaaagtaacggtaaatcttatattggtccatgcccaggatcatctgatgacagcaatgttatgtcaggatttagctcgcgaacttgttgatctacgaaaggaaatggcaaattaa

SEQ ID NO: 386701 - DNA, 1323 bp, Salmonella enterica
atgagttttatggatacgtttgaacgtggcatggagaagatccttgtcccgatcgcaataaaactgaattcacaaattcatgtgtcagcaattcgtgacgcatttattctctcttttcctattattatggcaagttcattagtcattttaatcaactttgccgtattatcaccagatggatttatagcaagtattttacatttacaggctttctttcctcatttatctgatgcgcaacaaatatttacacccgtggttaatggatctgtcaatattatggctatattgatcgctttcctggtggcaaggaatatagccataagctatcagcaagatgatttactttgtggcttaactgcaatcgctgcattttttattgtatatacaccttatacgatgatcggtagccaggcgtatctgacaaccaaataccttggtccgcagggactatttgttgcaatcattgttgccattatttccagtgaatttttctgccgtcttgcacgtaaccctaaagtgacgatatcaatgccgcccgcagtaccaccagcggtttcccgatcgttcaaggtgcttattcctatcttttttgtgatggtgttcttttctgttatcaactacttgttaacccgtatatcaccaaatggcttgaatgatctgatctatatgcttattcaggcaccgcttaaagatatgggtaccaatatagttaccgtattagttttaggtttgttgtcgaattttttatgggttctgggcatacatggacctaatactgtagcggctatccgtgagactattttttctgaggcaaaccttgagaacctttcatacgcagcatcgcatggtacaacatggggtacaccatacccgataacatggggcggtataaatgatgcttttgcgaattgtggtgggtctggcatgacgttgggtttactgattgctatcttaattgcctcacgccgcaaagagtatcgtgaccttgctaaaatgacctttgttcctggattatttaacattaatgagccggtaatgttcggtttacctattgtattaaaccctattttagttattccaattattttagcaccgtttattaattcgctgatcgcctggttctttatcagtatgaaaattattccacccattgcctatgctgtcccctggactactcctggtcctctcattgctttcttcggtacagggggtaactggttagcattatttgtaggtttgctgtgtttggctgtctctacattgctttatctgccttttgtgattgcttcaaacaaagttaataacatggctacaactgattaa

SEQ ID NO: 386702 - DNA, 312 bp, Salmonella enterica
atgaaaaatatattgctcgtttgtgccgccggaatgtcaacaagcatgttagttaaacgtatgcaagcgtatgccgaatctactaatactgaagttaatataaatgcaatgtctatttcagaagctaaagaaaaaattaaaaagaatgaggccgatgtagttttgcttggtccgcaagttcgtttccagaaaaaagagatcgaagacgcagcacaaggaaatacgccagttgatgtcatcgatatgaaactttatggccaaatggatggaaagtcagttttagaaaaagctttatcactcattaataaataa

SEQ ID NO: 386703 - DNA, 708 bp, Salmonella enterica
gtggtatataaaaatattgttaatctacttaaaatgaaaataaatagtcctgtatataatattggagatcttttaccttcagagaaagaactcgctgaactataccatgtctccagaaacacgcttcgaaaagcgttaaagcatctggaggatatagggcttatagaaagaaaacatggttcaggcacctggattagaaataagcacttccagtcatctttgacacatttggacagcttcacagaaattgcgttgaatgaaggaaaaaaacctacaagtcagctacttaaatttgaattacaagcagcttcagaagagatcgcgaacgggttgcaacttcagaatggcgatcctgtccattatgccaagcgtcttcgtttcattgataatattgccgtacaattagaagaaacctggctttcggcaacaagattcccagatctgaccatttcgcatatgagaaagtctaaattctcttacatcgaaaacgattgtggtgttaaaattgatgggtgttatgaatcaatcatgccgacaaagccatcccctgaattagcccatcttttattggttagccccaatgatccaataataaaaatgtatacacaggctattgatgataatcatcagcctattgactattcaattctttatactaataccttcgaatttcaggtgaagtattatattccgcgtcatcgtaattaa

SEQ ID NO: 386704 - DNA, 801 bp, Salmonella enterica
atgtttgctcgttctctccgagagaccgagctttttgaccatgcagatacacttgggattaccgttggtgaagccttcaatgaggcatttgccttacttagacaaacaggcttgcggaatgagtatgtttatcgttctgcactcacacacaatcttttgcttgggaagcattcattaagaactgcctgtatgcttaatgaattcagaatcggctcttgcaaagctgatctcattatactgaacggaactggaacggtttacgaaataaaatctgaaagggattctttaagccgcctacaaaaccaaataacgaactaccgtaaagcatttgggaaaatatatgtgatagcaggttcagaacatatagatgatgtgctgaaaacaactgaatctgccattggggtattgagtttaacccgatggaatcgaatttctactataagagaagctgaagaagtcttagactttttatgccctgtaacaatttttgagtcattaagaattaatgaagcgaaaatcattgcttccgagttaggtataaaaatccccgacttaccgaatacccaaatgcatggtttcttaaaagaagaatttagtggtctaccacctgtttctgtatatagtttaatgctaaaaactttaaaggaaagcagaagtttactttctttaagagagttgattcttaacttaccaaagtctttacaaccagcggcactttctattcagcttcgctctaaggatcatgagcgattaattaatactatgcagcttcctcttaatgaggcattgttatgggagtaa

SEQ ID NO: 386705 - DNA, 933 bp, Salmonella enterica
atgtattatccttattttcgtgggaaacaatttgaactgttagctattagagacactgctaatgtaatggctgaggcaggttttactccaattatagagcctgtgagagaggctctcaatggtcttgagcgaacactgaaaacaataaaagaaaatgatggtaaggctattgtcatcattaatccggcatgtggtgatcactcttccgatggacaaagtatagctcaattattaaaaaatgaatttagtaattataaaaagatttctgtaggaatacttctggataagagtatgactattgctaaggttgataatctccttcattcagatctcgttcatggagtcacctttatccatgctgggtttgatgagccaaaagctttacatgaaagatttggggatggatacaaacatgtatttatttcaaactattgttctaaagcttatcgaaaacatttttcggcttcagaaagaattttaattaaagatggctttgaaaaaagacgaaatgctgaccatcccgattctgagttcttttcagatcttcatcttaactatgaagaagagggtatgaatggttttggtgattttttaattgttggtgatgaatttagtgagtccggtggccctgcatatgctgttgctattcatctaacttacgttaatacgaagcatgaagatgaaatgtacatctatcattttgtttcaacaacacgtgatacaccgacagatccagcaggtaagttcgcacagtcccttgataaattaatggctgccttaaattcaggtaaatccatgttgcttgaaacgtcggctatcaaagaatttagacgattacataatccgagtcacttccctggtttagggacagttaaaaaattgtctatgattcaccatatagaaaccctagccgatttcatggatggtaaataa

SEQ ID NO: 386706 - DNA, 1026 bp, Salmonella enterica
atgatcaagtactgctgtgcgagctgttttggggataatggtttaaagaaaaatatcataccttcactttccccagattttggcgattgttcgtattgtggtaccaaaggtattgagattattgagcctcatgctttatttgatcactttagttcattgataaacatctacgaaaatcatccggatggtaagagcctagttgcacatttgaaagaggattggaagctattttcacatcctcttttagatgaggctcatgccaaagagttattaggtgatatacttgatgatgggaatattgttagaaaaaccttcgtactttctgatgattataagagtgaatctctcgcattatgggatcatctttgtcaggaactcatgtatgaaaatagatattttctcaataaatcacttgatacagataggcttggcgagttattaagtttccttgctttagatgatttttctaaaacttggtatcgagcccgtatttatgcagatgatgctgcttttacaatagaccaaatgggggctccccccaagagattagttagtcatgggagagcaaatcctacaggtataccgtatttatatcttggatctaaaccagatacagctttgtctgaaattcgacctcatacaggtgacagagcttgtgtcgcagagtttactttaaaagataacctgactcttatagacctaagaaaccctcgtgaaactgtttcaccgtttttattaaccgatccaggtgaaatgggtaaaatgcttgcagatataccttttcttgaacgacttggttatgaactaacaagacctgtattacctaaaagtgcagcccttgattatattccaagtcaatatatatgtgaatttattaagaaaactggctttcatggagtactttatagtagttctgtaagtgaaggaatcaatcttgctctttttgaaccgttaaatgcgactggaggcaatgtaagtatttatgatatagataaagtcgaagttagtgtaagcaaacaagattaa

SEQ ID NO: 386707 - DNA, 723 bp, Salmonella enterica
atgcgccatatgtgggccttgtataacttcgccattgagcagggactactggagcagttcatcaatcccttccagaaaacatcactgcgggaatctcgtaagaaaaagaaaaccctgacccgagagcaaatcctcgcatcccgcaaagtactgaatcaatttatcgaaagggagaaaatgcagcgcggccatcgctcgcctttatatccggcctggttttggctgaccgtggttgaaaccttcaactacaccgctatccggctgaatcagcttattcacctgcgggtcagggatatcgatctggtccatgacacgctgtttatccagagcgaaggcagcaaaagtcatgatgagcatatcgttcccattgcctcccggctgcggccctatctggagcatctgcttgaagaagcaaaaacaaagggaatacgagctgacgatcagttgttcaacaacaatcgtttcagtcggcggacgctgcgccagggtaaaccgatgacagaaaatcaggtgagctatttctttgccaagctcagcgatgcctgccacagccgtttttcatcacatcgctaccgtcataccgttgccacagaattgatgcagaaaccggagcaaaatctgtacgtcacacagaaactactcggccaccgcgatattaaggtgacgctcagctatattgaacacaatgtcgagatgctcagaagttgcgtagagagagattga

SEQ ID NO: 386708 - DNA, 441 bp, Salmonella enterica
gtgaacgggtatgctgaaaacacctatgtggatagtggcggacaggtttacgttaacgctggaaataatggcgttgaagatccagaacaaggtggccagattgtgaataccacggttggtgcaggcggcctggtcgttaatagatatggcatcgacacaaatacgatcgttgaagctggcggcgaactggataccggcgcaatcactggaaccattccggcgatactgtggcgaaactggagccttatccccggcagcgccctgcccggcgctacgctggcgatcctctgcggcggacgctggctggcgcgactgaaacgcggacgtccggagagctggctgtaccgggcgctggagctgaaactggcccgtttcggcatcggcactcagcgttttgtcctgcacgatggcgtctgggccattcgccggagccgacgatga

SEQ ID NO: 386709 - DNA, 273 bp, Salmonella enterica
atgaaactcgcgccttacctgataacactgacgctgccgtttatctcgttatctgccgaagcggattaccacacccaaattaacgccggaaatactgtttctggcgatgttgttgatggctcaaaaggtaatcagcatgtttatggcacactgactgactccaccatcactggcccctatgcctatagctatattggcgatggcgggcaaaccaatcacatcacggtgagctatttctggaaccgggcggcagcacttatgacacacagataa

SEQ ID NO: 386710 - DNA, 921 bp, Salmonella enterica
atgtctaaacaagtggaatttgatgcactggttgaagaagctattcgccaaggggatctggcaaatttacgtcccgttgtagaaaaagaattgttgcattatgacatccttttttgcctttcggaggctggtttacttaaatctttaacctttcagggaggcacatctttacgactgtgctatggctctaaccgcttcagtgaagaccttgattttgctggcggtcctgatttttgttctgccgatttagcacagatgaaagactgtattgaagattaccttggaaacagatacggactcgaagtcactgttaaagaaccaaacgaattacgcgcagagcctgaatatgcagaagtaaaagtagataaatggcaaatttcagttacgacagccccggagcgtaaagatcttcccagacaacgtatcaaaattgaagttgctaatattcctgcttatacccatacctggcggcagttagttcgtaattataccgtgttgcctgatggatatagcgataccttgataagggttgagacgcttgaggaagtgatggccgataaactggtgtcattccctgcaaccaccaaccgtattcggtatcgtgacatgtgggatcttatttggttaaaacaacaaggcgcgacaatcaacgcaaatctggtgagtcaaaaactcaaagactataaaattgatgcttttgagaaaagccttcaggccagaatagattcacttcccaatattatcattgaaggtaacttccataacgaaatgaagcgatttattccatcatcggtatatgaaacaagtctggaaaaagaaggcttttcttcatttttgctggatagcctgaaagatttactgaaccaactcagaaaggagttataccctgaaaacgataaagataatttatttcaactataa

SEQ ID NO: 386711 - DNA, 534 bp, Salmonella enterica
atggataaactggtcgcaattaacaccctggacaagttcagtaatcaaggacgatatgtatttcatttcaacgatctgaaaaacatgttttccgatgaatcagaacgaacgctgaaggcatctctcagacgtctggtcgatacgaacatcctgacccgcgcaacccagggagtctatgtctacaaccgtgcgccaaaagacagttttatccttgagcatatcgctaaaacaatccgccggggcgagtatagctacgtcagccttgagtctgctctatcacaatatggcgtgatctcccagatcccaatggacaggttgacggtgatgaccaccggaagaggtggggaatttaaaactccctggggagttattgaattaacacatacacaaagacccgtaagcgatatcctcaacggtacggtagatacaaaatcgcccattaaattcgctaaaagagagactgcactgcgcgatcttcaacgggttggccggaatacacatttgattgatactcgggagctgaaaaatgtctaa

SEQ ID NO: 386712 - DNA, 465 bp, Salmonella enterica
atgcaggcgcaggacaacggcggcgcggtgttcccctcctacagcgaattgcaggtgcagttctctaaccgcccattggacgaaaaagcctcgcgcagtaccgtcaggacgtgctcgatgatgcggcccggcgcatcgctcgcggcggcgtgcaaaacccgctcgcctatctgttggcgacgctgcgcaaagcgcaggacggcgagtttaatcagtatcgacgggataaacctgcggtgccggaatttgtgccacctgtggtttcagagccggaaataccggcaaggccgcgtcaaaagtgggatatcagtaagttggttgcggagattcgggcgcagtatctggggagtggctgatgttgtgacggctttatcgattcttgctcatatgtttataaaaaccgtttttatcgacatatggtcggaacgtgtcgatgacataaacatattgcggctatatgtttaa

SEQ ID NO: 386713 - DNA, 303 bp, Salmonella enterica
gtgggcggcttcgcctacctggcggagctttccaaaaacacgccctgcgccgccaatatcattccctatacgcaatacatcgccagctacggcgaactgcgccagcttctgttattaggtaatgaactgagcgatatggcaggtcagccgcgcagcaatgtggccgacgtactgaactttgccgaacaaaagctgtttgccattgcgcagtcacatcaggagagcggcctgaccgacatcaacgcttgctttgacaacgtgctggcaggcatcgctcagcgctacccgcactggaagccatga

SEQ ID NO: 386714 - DNA, 159 bp, Salmonella enterica
atggcattagacccttatccgtttatttctcttgcactttcaacaacgcttgcaaatgtgaaaaatgcccctatttcatggctaattaaccgcgaaattctagccatggaggaaactaccgatgtcaccccggacacaccgccagctcgtaagcgttga

SEQ ID NO: 386715 - DNA, 5472 bp, Salmonella enterica
atgaatatcaaaataaaaaaatttttagccatcacacagataatattacaattttatccgctatcttttatttcatcttttagcgcctatgcgcaaaagaacaatcaggagcaagcatcagtatcatctaatgataattcaaaaaataatagtcaggataatactaataaagaaagtcaagacaaggtagatcaatccctggctcagggtgctatgcaagcgggctcacttcttagcagcgatgatatcggcaactctctggtctctgctgttgatggcgccgcgtcgtcttccattcagcagtggctgagccagtttggtaccgcccgggtcaatatcagcacagataagcattttacgctgaatgattctgacctggatttattgttgcccttatacgacagtaagcagaatctcttctttacccagctcggcggacggcggcatgatgaccgcaatactgtcaatggcgggtttggctatcgccatttttccgaacgctggatgtggggaactaacgtcttttacgatagacagatttcaggtaatcagcatcagcgactcgggtttggtaccgagttggggtgggattatctgaaactttccgcaaacggttatttgcgtctgagcgactggatggcctcttctcgttacgaggactacgacgaacgtgtggccaacggatttgatgtccgcgcgaccggttatctgccagcatacccgcaactgggtgcgaatattatttatgagcagtattacggtaacagcgtcgggctgttcggtgatgatgaggacgaccgtcagaagaacccacacgcaatcaccgtgggcttgaattacaccccggtaccgctagtgaccgtcgggcttaaccaaaaaatgggcaagaacggtgaaaacgacacacaagtaaacctggcattaacctggacgccgggcgtaccgttgagttcacagctcgatccctctcaggtggcgttgcgccgttcactggtcggcagccgtatggacctggttgatcgcaataacaatattgttctggactatcgtaagcaggagctgatttctctgtcgttaccgccgttactcactggagaggaacagtccaaacagaccgtagtcgcgaaggtcaaggcgaaatatggccttgagcatattgaatggcagggagacagtttcttcagccatggcggtaaaattacggctagcagtagcccggagcagtttacgttgactctgcccgcgtggcagaacagtggcgtcaatagctacacgttgaccggtacagcctgggataaaaaaggcaatgcatcaaatgccagtcagatgaaagtcagtgtgaacggtgtggatatcaacacgctccagtccaccaccacggtcgacccgacatctgttccagctgacggtacgacaacggcaaaagtaaccgtggtgttacagactagctcaggccagccagccaccggaatggcatcacggatgagcgcgacactgtcctcttccaacgtcagcgctgcggtgacgaaactaaaagcagcaaaccaatcgctaaaggcagacaaaacgccgacgatatcggtctttacagaaaccgcttccgggcagtacacggcgaccatcactagcggtacgacaccggatacactcaccattcagccgttgatcgatggttcagtaaaactggccagcgcaaaattgattgaaaaagcgacggtaattattccgcaactgacctcgctggacacatccgcgaccaccgcgctggctaacgggacgacaccgattacgctgacggcgcatgtcaccgatcagtacggcaaggcattgaaggatgtggtgatagactggtctgatgacaatacgcaggcagatctatcggcagcgcagacaacaacggatgcacaaggagatacacaggttcaggtaaccagtaatgcagtgatcaccacggttgtcaccgcatcaatagagggaggaaattctctcaatagctcgtcgcttagcttcactgctgatcttgcgtcggcaaaagtagcgaccatcgacagtgaaaaacagcaggtggtggcgaacaatatcgacacagataaggttaccgcgcaggttacggacaactcaggccacccgctcaacggtgtgacagtcaactggacggtagaaaaaacggacaacacacccgtcacaacgaaaagcacggccactgacagcagcggtaatgcggtactaacactgaaatcatctaaaacgggtagcgtgacggtgagtgcagcggtgagcggcacgccggcgcaagaaacggatccgatcacctttgtggcggatacagcctcagcggtggttagcgccattgcgctcagtaagaaacaggccgtggcggacggcatggacagcattacctataccgcgacggtgactgatgcgcagggcaatgtgatagacggcgcgacggtacactggtcagcggataacagcaatgcgaagctaagcgcaacccagactaccagcagcgctgacgggaaatcacagatcaccgtgaccgcgcagaaagccggtacggtcgtagtgagcgccggcaccagcagttccacattgaagcaggccgacagtgccacctttacggcagatatcaacactgccagcgtttcgagtttgacaagcgatcgtcagtccgcgctggcaaacggggtggatgagatcgccctcagtgccaccgtggtagatgcgaacggtaacccattacaggatgcggatgtccgctggacgtccgatccggcgacggggaaactttcttccggcaccaccaaaacggatacccacggtattgctaaaacgacgctaacgtccacggatgtggcgacttacagcgtgacggcgggcatcaatggcgccacaaaacaggtgtctggtttacgctttattgccgataccgacacggcgcatctcgacaaactaacctcttcaacaaccagcgtgcttgcggacggcaagacggcaataacgctgacggctaacgtggttgaccagtctggacatccggtgaagaacgaacagatcaactggagcgcggataataataaagcgaaactgtccgcgacgcagtcggtaacggacgatcagggccaggctcagattcaggttaccagttctgatgtcattaccacggtagtgttggcccaacataatcaggcggaaacactgaaaaccgatacgctcagttttacggcagataccgcgtcggcgaaggtggtgacggttagcagcgataaaacccaggttgtcgctaataacgtagacagcagcacggtcacggcgcaggtgttggatgactacaatcatccattgagcggcattacggtgagctggaatgccaaaaaaacggatggtacatcggtcaaaagcgccacttcagtgaccgacagtagcggaaacgccacctggatactgaagtcagcgaaaaccggcgtggtaaccgtctcagcgggggtcggcagtacggcggcgaaagagaccggagagataacctttatagcggacagcacgagcgaaagcgtcagcctactcacgccggacaaaacccaggccacggccgacggtatggatagtatcacctataccgcaacggtaaccgatgcgcagggcaatgcggtttcaggcgctaccgtcagttggtcagcggataacggagatgcgaagctcagcgccacgcaaaccaccagcgggaccgatggcacgtcacaaatcaccgtgacctccgttaagtctggcggtgtggttgtgagcgcacagaccagcgaagcgacggcaaaacacgcagacagcgtcacttttgtggcggacccctccacggcgcaagtctcatccatgtccagcgataaaacgtctgctctggcgaacggagcggatgcgatcaccgtaagtgcaacaatcaccgatgcgaacgataacctactgtccggttcggatgtgagctggagcgcaaccgcgcaggacgcttcatcggcgaagggaaaactgtcggtagacagcagtaagaccgatgccagcggcgtggcgaaagtgcagttgaccgccactgacgtggcaaaatttaccgtcatggccagcgataatggctcgtcgcagtcgctgaaagacctgagctacaccgcagacagcagtacggcgcaggtttactctctgacggcagacaaaaccacggatatcgtggcggataaagacacagtcactctcacggcgctggttgtggatgcacagcagcatccggtggcgggcgcgacggttaactggggcagcagcgagccagatagcaacctcagtgctaactcgtcggtgacgggtaatgacggtacgacaacggttactttcaccagcctgaaggccggcaatatcgatgtgacggccgccagcggcggcagcagtaaggtgcagacgctgcaggtgataggtaacgtggcaacggcaaaagtcacggggatcactgcggataaaacacaggaagttgctgatggtaaagcagagataacctggaccgccgcggtaacagatgccaacggcaacgtgctgaccgggaccacgctgaactggagcgccagcctgagcggggtgacattaacgccaaccagcagcgatacggatgcgaacggtaatgcaaccaccaaaggcacctcactgaaagccggcgacgtgaaggtaacggcaacgccagtcaccaacagcaatggcaagaaaaccgatggcgccacgaaatttgtcggtgatgcaaaaaccgcaaaactgacgagcctttcgccttccaaaactaaagtagggaccaatacgggcggcgttgtatatacggccgtggtcaaagatgtaaacagtaatattgtctcaggggtatcggttgcctggacaacgaatttaaataaattatcagctaatacgagtacaacggatagttcgggtaatgcgaaaattactctggatggaacgacacttggcgtagccaccgtaacggcgaaagcaaatggcacgacgatgagcaacaacacggtcacctttatcgatctgattgagtacgactggacggttgatcacaactcatcaaatcaatatacgggagatattattccgaactacccgagtatggggtttcttgtatcgggtaatacaacaggaccaaccagtttagtctggaatggtgtgccgggcgatagcaaattaactgcgcaactgaccaatgatgagggcaaggtctacactgtagtttttgccggcgccagagtaacgtatgactgtatacaaatgcagtttaatgatgccgctacctgcgtagggctcaagaacgcgccagtgctcaacttttattacagcagtaacccaagtttacctgccggacactatacagggcatattacattttacggtgaggactggcagactagacaaaaattactttcttatgacatttccgtttcactaacaaaatga

SEQ ID NO: 386716 - DNA, 597 bp, Salmonella enterica
atgtctggcaatccgcatttttggggagatgcattatttaaaattgaacaagctattcatgatgagtttatgggaacacccagtagatttaaaatagaaagaatagcgcaagttactgaattttatataaatgatggttatgtgtattatataatcaataacgacatcattcaaatattcaattcagaaaaacgtttattaggcttatcaaaacataaccacctgctgggtcttgttagcctttttggatataaaccaagagaaacatcattaacatccttaaaaaatttagttgtttacaaaatagatgacaaaaccttctcgtcacttatttcaaaacacaatttatggaagcaattatcgttaatcttatgcttttacattaataaaagcgagaatacatatagcaatgtgtcatatgacagcatatcaaatatagtgccaaaattaattcatgaatataaggaaattgaaccagatgaaaacactattagtttgaataaatttattttatccaggtgtaatatttcaaaatctcaattatttaacgtaatgaagagtattaagaaaacctcacataacaaatgcgaagagtga

SEQ ID NO: 386717 - DNA, 447 bp, Salmonella enterica
atggacgccatctatttaaaactggacggtattgaaggtgaaagccagaccaaaggcttcgaaaaacaaataaaacttattgcttacaaccaccatccgacgaagcggaagtccggcgaagcgagagggacatatattggagggttgacgctgacgaagcctgtcgatcttgctacgccagggatctatgagcactatcgtagcgggaaaacggtgaaagaaggtgtgctgacattatgccgtagtgataagggcgcaatgctgccatttattatttataggctcaccaatgtgcggatttcacgcgtgagcaatcatggcgatgctgcagacaacgccacggagaccgtggatttggtttatagccatattcgctgggatatacccgcattggcgccaaaaagcaaaacacggctgcctatccgccggcaggtgttatggcgatga

SEQ ID NO: 386718 - DNA, 909 bp, Salmonella enterica
atgaactctaataagttgcatgggattattttcgcccttattgctgcaatatgtaatagttcaataggtatatttagcgttaagttatttcaggctgggcttacagccaatgaaatcgctttttataaatgtctggtcggttttttgattatcggtttaaccctggcgatcgccagacgatggaagacggctttttattttataaaaacccggtggagagccgggttggtatgcgcattttttggttttttcatcccctatcactttgaaaccgaagcctatataaatgataacgtctctagtgtggtttttgtgcttttcgggagctctactgtttttctttttattttatcggcgctggtagaaaaacgattttttagtgtacaggaaattatggctacctgcctctcgcttttcgggttgtacctgattttttctcaaggccagggcatccgtattgggcttagtaaaggattattttttgcctgtatcgccgggataggttatggcacatttttgtttttaacaaaaagattaaattttggtgcagggctgtcgcggatattttcactactcttttttggcagtctttatttatcgcttccctttgcgtcaacaatccaccccgtggaattggggataaatgattttttatttattatttgccttaccgtattaccgacgataggcggattctggtttacaacaaaagcacttacgatggtaagcagccagtctgtgcagttggtggagctatcagaaccgatgtttgcggttatttttagccgtctgtttttggggcaatacaccaccgatttacagtacctcggcgggtgtctgatattttttgccattctgttttatgagtgtccttttacaacaaggctgtcccggaaaaagagtcattaa

SEQ ID NO: 386719 - DNA, 165 bp, Salmonella enterica
atggaattttacgagaaccgcgccagacaaccttttatcggattcgcacagctttggcgggggctgagaagatggtggctgagaaggattgcccgccaggcattgcggagaatgagcgaccaacagttaagggatatcgggttggacaggaagggtgtgaaataa

SEQ ID NO: 386720 - DNA, 1755 bp, Salmonella enterica
atggcggtggaaaaactgattgtcgaccatatcgatacctggaccacggcgctgcaaacccgctccaccgccgggcgcggcagctcgggtaagattgacctgtacggcattaagaaactgcgcgagctgattctggagctggcggtgcgcggcaagctggtgccgcaggatccgaacgatgaaccggcgtcggtgctgctggagcgtattgcggcggaaaaagccgagctggtgaagcaggggaaaattaagaaacccaagccgctgccggagattagcgaggaagagaaaccgtttgagctgccggtggggtgggaatgggtaacactggcgaccgtaggtgaaatagtcggtggaggtacgccaaagtcagataatccacaatactgggccaaaaatggtattaagtggcttactccggcagacctatatgggctcaaagggaagtacatttcgtctggagcccgtgatatttcacccgcaggactgtcaaactcatcagctaggttaatgccaaaagggagtgtacttttctctagccgagcaccaattggatatgtcgcgatagccaatgcagaactatcaacaaaccagggttttaaatcttgtgttccatatatcaaagatagtgcagaatatatatattacttcctaatggcatcagcaaaaaaaatagatgcagaggcaagtggtactacatttaaagaagtatcaggggcaattgtatcgaaaatattatttcctttgccgccattgagtgaacaactaaaaatcgtctcaagggcaaatgaacttatgttcctctgcgaccagttggaacagcactccctgaccagtctggacgcccatcaacagctggttgaaaccctgctaaccacgctaaccgacagccagaacgccgatgaactggccgaaaactgggcgcgtatcagcgagcattttgacacgctgtttaccaccgaagccagcattgacgccttaaaacagaccattctgcaactggcggtgatgggcaaactggtgccgcaggatccgaacgatgaaccggcctctgaactgctcaaacgtattgcgcaggagaaagcgcagctggtaaaagacgggaaaatgaaaaagcaaaaaccgttgccaccgattagcgatgaggaaaaaccgtttgttaccccaaatcattgggaatgggtaagattcggagagattggtgaaataaaggggggtggaacgccaagcaagaataattctgcattttgggaaggtgatataccttgggtttcaccaaaagatatgaaagtagactacatatcaaaaagtgaactatctatatctcaagacgctgtacaaaacagttcagtaactctcatctctgaagagagccttttgtttgttgtccggggtatgatccttgcgcatacattccctgttgctattgctaaaaaagaagtaaccataaatcaagacatgaaagcaatatcaacagatttatatcatcctgattttttaattaaaatgatgaaagcctgttcaatccgggtgttatctttagtagatcgctcctctcatggaacatgtaaacttgtttctgataaactttttagcttagtccttcctttacctccattgaaagaacagctacgtatttcatctgaggtggatagctttattaataattgtgaaaatctgaagcagattattaaagaaacccaacaaacccaactccacctggccgacgctctcaccgacgctgccataaattaa

SEQ ID NO: 386721 - DNA, 1167 bp, Salmonella enterica
gtgaaaaattacaaagtgattaccccgctttttccgacatacgaacagacccgtgccatgatgaaagccgtggcgggatactcagtcaaagcggttcgtaatatgatctccgccattcaggaacagactggtacaccgcagaatcctgttgactggtccgagccggataactggattaaagaacgactcagcggtgaagatgccaacattgcgtggcaaatctggaatagggacaatcatattcttaacccccgccacagctacggctgctacatgtttatcaacaacccgttgttcgatctgatgcaaaccaatgaggacggaggctggtatcccagcgagcaagggcgactattcctggagagcgatgaggctacgctacgtaaacttgatgatgtcgaaggcatgttgcaattactggagcttctggctggccgcgaacaggccagacgagcagacctgctacccgaatggcaggctttcttacatcagcattctaaatttgcctcacccagctcggtcaaaacaacgctctatgcccggctgtataacctggtcgagcgcaatctggttacccgcgaagggatgagctacaaaattaccgatgcaggtagaaaatggctcggcaaagcgctgcctgaacgtcaaactgacccgcgcaaagagctgctcgacgcagtgaaacgctataacgcgcaacaaaaagaggtattacgcgaacagctcgccaccatgaacccgtacaagtttgagcatctggtgggacagttgctggaagcgatgggctacgaacaggttgaagtgactaaagcctccggcgataaaggcgtggacgtgattggccaggtacaggtgggcatcaccaccattaccgaagtcgtgcaggtaaaacggatgcagaacaccatcacgcgcccctatatcgaccagctacgcggcgcgctaccctatcacaaagcgattcgcggcacgctgatcaccaccgggaaatttgctgccaaatgtgcggaagcggcactgttccccggcgctgcgccaattacgttaatcgatggtgaccgcctgctggaactgttgattgaaaacaacgtcggcattcgacgcagcaacgcggtggaattgctggatgtcgatttacagctgtttgatgagctggagattgaataa

SEQ ID NO: 386722 - DNA, 420 bp, Salmonella enterica
atgttatattttcgatcttttttgatcttatgcttgttatctctttcgggctgtagtttattaagttctaaagctgattacataccgaacaatgaaacattaccagaagcgacagtaggtaaactgtatttttctaagattaaaatcctgggcggtcgtgttattggtggaaagaaagtaaaagcaggttttgtcactcctgataatgcaggtatttttttacgtaattgcagattacctaactcggtaattacagagggcacaagggatactaaagatcataattgtgttgagatctatggaacccctacaaaaacaggaactataaaaatcaatattggtggtgggatgtatggaaatatgatcgctcccgcgagtgatttcagtaaagattatacgctgaatgtagttaatccttga

SEQ ID NO: 386723 - DNA, 1179 bp, Salmonella enterica
atggctacttaccatctcagcacccgtattcaatcgaatgttcccgcggattccttactatatgatctgtgcatttaccgcatggactccgacagaaataaatatatcctggtagatgtaaaaaaacagtcactccgggataattatgaaacacagagtcatatgactgaaaatataaatgatcctgtcaccaccatttatattatggaagtcaaagtttaccgaaaaaccatgttgtcttcgcacgatgtaatgttaatacccttctctaaaatgtacacactcgaggaatttgcgtcaggaaaatcctggtcttcgataaagcgtgaaaaccccagttattttgagtcagaaggtacgacaaatcctgaaagccatggtaaggaaattataactatcaaaatatcgcaaccagaacgtccatttatagcaaagaaatatcctatcgggacaccgcaagatccatttgagaaaaataatactcaaattgatattcaagagcgattttatcacaggtcttatcccaatcaaaacagtgccagtgtgtgcggtcctgctgcatttttttactgcctgcaaatggatcgccctgatatatatgcgcaggcggcacgagatttgtggcagtacggaaaaacaaaaatcggtgcgcttgaaatcgctcctggtgagggatgtcgtcatcctgaggggactttttataacgcttatggaccaaaaattacgggtcttgactggatgacactggcagggttaagagattcagagaatgcgatattcagctttgatactctggatgcccctatggcgggaattacgatgtggcaaacgctggcagaatggtttgaaaaagcgggttatgcaaaggtattcagtaatgtcggtattactcaagcaggcattcagggaattgatgatttaaataaatatgccatgcaaggatataaagttatcacacttattaatgacagtttgttaagagatagtgctgccgaacatactacatatccaactcactggattgtctggaatggtcctgtgactcaggggaatgatggatttgtaaatttaaatctgttttcatggggatatgtgtcagatcaaataaaacctcaaaaagatatatcattcttcattcgtcgattcttcggaggggtggtctttaaaccgctgaaatag

SEQ ID NO: 386724 - DNA, 195 bp, Salmonella enterica
atgtttgatactttaggtcaggcaaaaaaatatctcggccaggcggcaaagatgctgattggcattccggactacgacaattacgtcgagcacatgaagaccaaccatcccgataagccgtacatgacctacgaagaattcttccgcgagcgccaggaagcccgctacggtagcggcggaagcagttgctgttag

SEQ ID NO: 386725 - DNA, 234 bp, Salmonella enterica
atgcaggctatttcacttgctgttttgaccgcgggcagtgctcgcacaaaacgcgacggcgttttgaacgcccttcagggcggcccgaaggggagcgaagcgaatcatcctcacgtactgcgtgtacgctccggttgctacgcgctgtccgcggtcaaactgactgcgccaattacgcctgcggcactaagtgatccaggccgggtaagcgtgcgccacccggcttcaggttag

SEQ ID NO: 386726 - DNA, 3420 bp, Salmonella enterica
atgcccataacattagaacatatagctgctaagccatttcaggagaagttgaaggcaaaaagtatcagaacctgggatactatacagtacctttcagctttggatggagcgtataaggatactgtttttcatgaacaaatatctaatctacccaaagactatattcatctggatgagatggccagagatgaaaaagaatatagcttaaatgtttttgattttttctttgaaccaacgtctgagattatatgtgacgttattaaatcaactttggatttttattattcgaatagtccaacctttcgaaggttagttaattataaggtggattatagtatgaacaatgatattgataccagtaagtgtgaagtaaaagtatctccaaattatagttacgaaaatactgaaggagatagtgtgtatttatcgttaccgtttgataagaaaggctttcctatagatcctggatttcacgactgtgaaactagaataacatcagaaaaggtactcctggatttatttctaaagcatcttttatacgatgaattgaagatgaattatgaagctacaaatatatactctaatgttatttttaaggagattgactctccggcgatggcacatgcatcgctgtgtttttctcaggcttcggtgaacgatgaatatgaattattcgatattgatagcgtagcggcgctctctaaaactactgagcaaatcatatttgagggaaagaaaatacaaaaagaaattttatcctcttttgaaagagaaaaaaatacccagccaacaattattcataaaatggagagaagtataaaaaatatcgcagtcactggtttattactgtcatccagattaaaaatagtagatagtgatagcataaaaaatagcaactcagaagaccataataaattctcgtccagtaaagaaccactgagatatgcaagagctctaccggaggatcattccgccccaaatatggagcctcatccattaggtcaggcgttagatggcatagttaaacattctttatttgctgctggattgccgctcctcgaaatactcaaaaaacttggagatgagcagctaatgaataattataaaagaggctatcatgaattacttgtattttctcaaacagggcagtggacgcatggtggaagaaggcttgctgccgaatatatgtttaatggccttataattcatttaaatgagattgaaataattcttgataatggaaggaaggtttcttttgagtattttgtaaaagaacatattgaacatcaatataaaatatataggttaatctctcgtgatatgctggttcatcctttttatatcagatccacaatttcagtaactagaaaaattgcatctgtcctggtaaatgaaagccattatacgaaagtgctaaatcaaaagttttcagagatttcgagttcaaattttgatacattttatggcaagaaggctatctttacagcattacaaatttttaattttaccagaaaaaaccatgggttatctacatttagccttaaaaagatgaaagagctttttaagcgagttcaattagtgatacatcatttaagcaggaatggtggtagtagactattactgagttctgatggaataaagcataattttattatcatgcgtaatattattcagttatgtacacttatggctggtccagttaatgatagaaaaataaattctctatcaagaaaaattgtggttaataatgaattttccagtcatattaagtctttgttttcaaaaggtgatcaatttttaggccttttaatgaaggctgctattgataaagaattgaattgggctgagaaatattatcaagcagagagccatatcaaaaatcatatgcaaaattgtgatttgatggggttaatggatataaagaaaatgttgcgagaggcagttgttgggcttattcatgagattagtgatattgcacaatccagctggatgacagaagaagagcaatatcataaacaggttcaggccctcgaagcgttcaaaagtaaagtctcatccatggatggcggacaagcattcgtgtatgggtttaataaagtcattcaggaagggctgtggggattaattgagttgagttttgatgttgatgatacagcacatcaccgaacaatttcctcactaagcccagcatcaagatcagggcttcattttttaggaactatctggaatattgtaatgagttttgtccctggttttaatgcgttagctggcaccagcagtattctcaatcgggctattgtggaaaattctgctgatatatgtggatacgttcaggatattatacgtattggtatggaagctgttcctgttgcagaagcgaagtttacagaaagggcgtcaaatgcaaaatatactggtctccgctttgttgaaagtaagatagagagtggcttaataaaaccaccgattcaaaaaggtagtaattataaagttatagagtcaatagaatatactgattttatttatcaaaaaaataaccgtaaaattcttgaattaaatcctgagggaagtgatggattatatcgcgctacagggtttgataaagaaatacatggttattataaacagtcaggaaatggattttacagaaagcaaaaatcatttttaccgttgtcaacagaaaaacctaatacgataaaatatggtgagagggatctcgtattgactaaagaacctggttcagaaacttatcagggaacctattctgatactggtaaaaatgcaggcatgacattttatagagactctgaaggtaaattttacaaggcgtcagggctgaaaggcggggggcttattcgacatattgacaaaccttattcagagttgagagaaggcgatattggttatgatgaagatcttctggacatttccgatgattcaccactactggaggaaatgctgccttccctgtccgaagaattatatcctacgtcagaagaaaatgtgcaaagtgtttataaaaatctccagtgtggggatactacagcaggtgagattgaagttgtattatgcagggggacaactggtccgcaggctgaaaatattgttaagtttaaaacagcaggaggtgtagagggggccgatccaaatgtattgcctgtctctgtagaaaccgccagggagcaggttcggagtggaagagtggtacctgaatttacaacagaccttagtgttgcagatagatttagcagggaacatcatcttattattgttaagataaaagccaaatatcttacgcgaggtagtacaagtgaaagtggctgggttatgccacatactgcaccagtggaacctgttggtataattgaccggacgtatggtcatgcagaaaatatcggacaggcaaacgcttctaagtaa

SEQ ID NO: 386727 - DNA, 471 bp, Salmonella enterica
atgaacagatttactactcatatggttacttataatggagagtttgataagtatgccataagtgagtttaatcatgcctggacattaaaaccgtttaaaaccatctcccagaatcctgtcataggtaatgatgtctggattggtaatgatgtcgtgttgaagggaggaataactattggtgatggtgccgttattgcagccaattctgtcgtgactaaaaatgtacctccgtatgctatcgttgccggagttcctgcaaaaattatcagatacagatttaaccctgatatagttattaagctaatgaaaataaaatggtggaattataactttttcgatttgccagataataataagtgtgatgatattgattattttatcagtgaaatgaatagtatgatttcaagtggagctatacaggaatgtgtatataagagttttaatctctctgaagtgttccgcaccatttaa

SEQ ID NO: 386728 - DNA, 246 bp, Salmonella enterica
atgtgtctatacggttcagcaatacgcgatactttttccattcgtcgagctgcgatttcttatcatctgttgcgatatcaagatcaactgcatcctgcaacggcgcgattttttcagatgctatttgcaggaacttgtttttggtttcttccgcgtcacgaagctacgctgctgtttctgcctcttcgtcttttacccacgccttaccatcccatttctggtattcaccatctggtgaaactgtaa

SEQ ID NO: 386729 - DNA, 1614 bp, Salmonella enterica
atgcaaattcgactccatccttttcttacgatgtaccgttccagcgaacaccccactgataatgaaagcattatctataaaatattttttggacagaaaaaacatttctgtaaatatccctgcacatttaaaatacgcccagttaatattaataacagtcaacctggcagcgaaaccactgccgacaatgttaattatatgctgatcgcgcaatcgtcccgtaaggctatcggccagaaaacagcttcattatccgtcaataatagccaggtcgacggcaatattacggcccagtcacagagtgatggcaatgccggaataacactgaccaacggtacgacagtcaatggtaaggtccgccttgtcggtagcgatatgattctgaatattaatgatgcgacattaaagggcaatatagaggccagtagttattcagaatctgatattaacgatgccggaacccatatgacattgaacctgagcaatacgacctatcgcggtaatattgattctaatgatcaagatattaatggaaatctgacaattaatgttaacaatggcgcaataatcggcggtgaatcgctggatagcgccatacagattaccggttatgacacggtgaatttcaatgtgaattatctcgccccttcactgattgatacgggcgtcgtctcttatttttatctgaataatgaagagcaggccgaggtaaacagtagccttgcgacaggtacgctggcgccgattcgcagtggcgcttacattatggacgatgtgaaatatcaggcaacggatgtaagctctcaaaccacaaccgcgaatgaaggcaaaacatgtggcgtcaccttttataccgacgacccgacgccccctacgccagttccggaagccattaacgccgcggcggatattcaggccgctcagacaggcttattggccagtgacgatatgatccatcgaattgctgatggtattccccatcaactcgatagcgcgaaaaccgatcgtaatagccatttatggttgcagggaatgtacgccagcagcgatcgtacgctgtctgacacgcagcattggggctggttcgctgacgcagtatttacttacggcgatatgacttatagcagtaatggacgtgatggacatctttccgcaggaggagattatgacgggcgtagttggctggcgcagggccgcgtcggcgcacaggttaacgcgacacgtcatacctggctgcggccttatttgaccatgggtcatgccaacacccataccgatagttatagcgatggctatagtgatgttagcagcagtaaacaagacggcggctttgccggggcgggtatgcaggcaggcgtaagctacccgttacataacgtagaagtgaaaccgtatgttgaacgggcttacgttggacaatttggcgcgaagacagatttccataccgacaattatcgttttgccggtcaaaatcttaacgagggtaacgccggactgggaatgggaatgaagttttcagaaaagtggagcgcaaatacccgtaccaatacggaatttggtcacgatgttgacaacgaagtaaacgcctatattggcgtaaaatatcagttttga

SEQ ID NO: 386730 - DNA, 213 bp, Salmonella enterica
atgctatggcttaaagaggcggcgctgagttatcacattaatatctgtgtaccttgtaatgttcaggctaatgccattgaacgccatcaatctgagttttcagaaacgacgggctcaaaactgatattttacgccaatataggcgtttacttcgttgtcaacatcgtgaccaaattccgtattggtacgggtatttgcgctccacttttctga

SEQ ID NO: 386731 - DNA, 141 bp, Salmonella enterica
atgtcttcgttagaaaagtttgttgagtactacagggctggggaacaaattggaatttattctatttgttctgcccatcctcttgttactggaaccattctggagcaaatgttcgataatggttacagaactgcaatctga

SEQ ID NO: 386732 - DNA, 162 bp, Salmonella enterica
atggctgtgataatgaaagtgggctctgatgcgttgttgcatctgctgacgccgcaaggtgttgatgcggatgccgttgctattgattatatcaccggttacctgcaggttgttaatgacagtctggcctatgacaccagggaggagattcaccatgagtaa

SEQ ID NO: 386733 - DNA, 672 bp, Salmonella enterica
atgttgactgtaaaaaaaaggaagttttatctatttctgataatatatacattattaattgtattattatcatccgttattacaacccagtatatatttaaagtggttttatcttctaatcaggatgcgctgcgccgtattgacaataagcaggttgcgcaaataacacaaatctcccctgatactattgttgagatgttttcttatggctgtggctactgtgagaagtcagagaaggaactcgataaatttgagaaaatgctcccggcatcgaagaaacttatccgaatgcatgtgagtaataatggtggattggggcgttttgcaccgctttatgcaacgctgaatgtcatggggctggagtctaaattacgggtagctgcttttcatgccgtgatacaagaaagaaaagatcttgccgaaccgacgatacgtaatcagtggcttattgctaatggtgtagacgttgccgagtatgaaaaaactgagaaatcagcgcaggttaaagcgctgctacagctttctaaacagctaaccgaagtttacggcgtcaatggaacgccggaatatatcgtgggcaagaggtgggtaacgtttacagacagagaatggccagctatgggtaaacagctcatgtcattactgatgaatgataagccgcttgaaaaataa

SEQ ID NO: 386734 - DNA, 945 bp, Salmonella enterica
atggatattttcatcctgcatgtatgggccttatataatcatgcagtaagcaagttcaacgccctgatgcagataacacataggaaattcagtgtaataaaattccgtgtggctctacgaatacctgttcgctatgtgtttgcatgggcatacattaagaggttaacagggctgtatgcaaagggatatcgattaagggcatgtgttgcaaacgcgaatcagcgctgcttattgccgcaatcgtcgctaaattacaccttgacggcaaacagacgtgagattattgagttctattcaacctggggacaggatactcaaattctccaacaaattgattgctgtgcagaggaactccgtagagttgccaaagaagtagttgatgcgggtacgccattaatactagcacctttgcatatgatgtccgatgttgcggccgtgatagtggcaagtagagcgaatcccataaagtcaacggtagttgtttcttccaacgccaatgagtggaatgcgcgagcaagagcgcaggggaatattgacgtagactattgctctgtagagcagaatacgcacggtataggtttgagtcttgctacggcgtgcattgatgtgagcgaggggacgcgaggattgatcgtgtttgccgatatggtgcctgattactcaatgcgcagctccgataaggctcaggacaagtttctgtgccggatgtttaatcgtccctcttatttgcataatggattaatacgcctgtcaaaagtgacgaaagccgatgttatattttttcatctttattacgatcaacaaataaaaataagagttttgcctgctataagctacaagaatgtaagaaatgaattgcctggagtgattgaacaagcaattactcagtttccgcaggattggttattatggcatcaacactgtctttattttattaatgaataa

SEQ ID NO: 386735 - DNA, 189 bp, Salmonella enterica
atgaagaaaatttcaaatgaacaagctacggtgattgttggtggtgatgactgctattacacacagaagtatgttgaatatagaagtaacggtactaaggcgtgcgttggcatttaccaatgcttcgataaacatggtgaacctaccagcacacgtaaagatgatttgttctggtatgattgtcaataa

SEQ ID NO: 386736 - DNA, 2103 bp, Salmonella enterica
gtgagaaatgaaatcccagcgatggtcatgcaaaatgaagtcagtgaatgtggtctggcctgcatttctatgcttgcggattactatggtattgaggctccattagaaaagttgcgccttaaataccccacgtctttgcatggattcacactggctcgtttgagcacaattctaaacgagatggggcttccaggcgtacccgtacagtttgattatgatgaattagatgcactcccgttaccggctattttgcattatggtgccggacattatgtggttttagcctggcgtagcggcaacaatgtctgcgttctgaatccttcctttggtaaacagctcctgactttcgatgccttaaaacgtgaaataagtggctttgccttaattattgatgaacaagaaaaacgagtgcctcctggggacggaaaagccaaaacaaataaaaactggcttccttcctggctaagtgttaaggcaacgtcaaacgtaccctatatctatatattaatggtaacaacttttgttatctcaatggcagtatttatcattcctgtcgtgatgagctcctcactgaatgccttatacagtcagaaacaggttgaggtatcatggtggctctatattatttcttttatcggaattgcaggtatagatctgctaaacggcattttctctgcaaatgttgtgaaacgattttctcatatcagcaatacctcagggttcaggcgtttgatacatcaaccgttacgttactttcagaaacgtaatgctggtgatatttatagtcgttttagccattggtgcggggcattaagaggaaaaatagcgctggataatacgttacgcatcgattggcttattgccttactctccttcggcgtgatgttttgggttaatcctctgctatctttggtgtcattgttcagtatcacgctgatgggcttaatcagtttatgggcagcctggaaagacagaatctatacccagaaaattgaaatgctgagcgccgagcagaatgattttattatggaaacggtgagtggtattcatacaataaaatctgccgggctgcatgaacatcgacagattgcttttgcacagcaaaataaaagaatggttcaggcattacgcaactatgccgtatataataaaataaaaagtaacctttaccaattgacgggtaatggtgaaaccattctctatattgctatatcactgccgttgttacaaagtggcgcgatgcattttggtacttttgtttcatatggtctgattaaacaaatatatggtaactatatgtcaaaacttttttttaccgtattacagaaaaacgaaattggtgtcattgataagcgagcgcaagattttttatttagcgaagatgcttcgacaaacagcacaggtacaactgagcatttccaacgaagtattcgttttgacaatttacgttttgcctggactccagagtgtaatgtgatcaatgagctgacgttaacgctccataaaggagaatgcgtggctattattggtgagtccggagagggtaagaccacctttctgtcgattgctgctgggttgctgatggcagacagtggggagatcgctattgacgatgtggtgcaatcgccgggccaatgggcgagcatggcctttatgaacagcaccgatcatattcttttgcaaggtagtatccgggacaacattacattgttcaggagtgattacaccattaaagaagatcgtcagattagccatatactcgacgcgctgggtattgccgatgtgattgagcatcttcccggcgggctcaatgcacgaatccgggagggtaatagcgggctgtctgcaggacaacatcagcgattgctgctcgcgcgggccctctattgtaaccatgaactgattatccttgatgaaccaaccgctaatctggatgtgactgcggctcagcagactatgacggcgatcgttgaacattgcaggcagcagaataaaacgcttattaccgtaacgcataatcctgctttacttggggcattcgacgcggtttatcaattttcccaggggcgtttattgagagaaggctacgctcatgagcagtaa

SEQ ID NO: 386737 - DNA, 1155 bp, Salmonella enterica
atgagcagtaaggctaaagcattctgccttagcgctgtactggttatcgtctgcttcggcatctatcttgccgtgccgaacagccacgagggttctgttcagggttttgcggcgcagtcggtaattcgcggcgatattaaagaaacggtgatgctaactggcatagttaaaccttttcgcaaagtgaaagtgggggcgcaagtcaccggacagttaaagcgactctatgtgcaggacgggcagcatgttaagcaaggggaattattagcggagatcgatccttctattcaggaagccgatctcaaaaaagccgaagcgagtttatcccgtgctctggcacagcaggaggcggcaaaggtattgctttggcagtaccaggcggaatatagacgccagcaaaacatgaaacgcgatgacgcaacgcctgagaaaacgcttgaacaggcaaaaagccagtatgaatcgcaaatccaacaggtacgtatagaagaagccagcgtggttcaggcgcaaatggaagttgaaagcgctaaaaccaatctcagctatacaaaaattcatgcaccgatggatggtgaagtgctggctattgtaacagaagagggacaaaccattgtttcttctcaaacggcaaccaccattcttattcttgctgacttgagtaaggtcagcgtgggcgtgaatattcccgaagtggatattttaaagatccataccggacaatcactctcgttttatacccttgctgacgccaaaaaagtgtggcagggaaaaatgggcaaaatccaaagctcacccgatgatataaataaagaggacgacccatctacaagttcgtccgggaaaaataatccgatttattacacgggcacgtttgaagtcgataatgcgtgtcggtgttttaagacctcaatgacgactaacgtttttgtcaccagcgcggaggcgaaaaatgtattgctggtgccactggctgctctttcaacaatcgaatcatctggaaaagattatgtcagaaaaaaggtcaacgaccagattatagatacaccagtaacggttgggctccaaaatgagagctacgcagaaataacttcagggctttcggagaaagatctggtaattgttaacgggccagggaaagacggtaatgagtaa

SEQ ID NO: 386738 - DNA, 1926 bp, Salmonella enterica
atgagtaatgatttacctgccgctatctgtcttaaaagtatccgcaaagagtacgttatcaataatgtttctaatacggttctggcagatattaatttaaccattcaccagggcgaaatggtggcaattgttggtccgtcaggttcagggaaatccacgctgatgaatattattggctgcctggataaacctgacgcgggccgattgaccttatttgacagggataccgctgaaattagccacgatcgcctcgctgagtgtcgccaaaaatatatcggctttatttttcaacgttaccagttgttgccctggcttagtgtcattgataacgtgatgatgcccgctcgttatactacacaaacgcatcagcaggcgctgattcgagcgcgcatgctgatggcccggctgggtatggctgacaagcttagctatttacccaaccagttatcgggtggtcagcagcagcgtacagggattgcccgtgcattgatgaacggtgcgccgattattctggcggatgagcctaccggtgccctggaccgacaaaatggtcaggaggtgatggccttactaaaagagctgcaccgcgaaggccatactatcgtggtagtgactcacgatgcggaaattgccgcccagacccagcggcagattcatctggaagatggcaaaatcgtttgccagcatacaacagacatgccggatgtctctttgccagcgcttttaacgcaggtacagtgcgcccgtttccgcttgcgagacgctatctttaccgcctggcttgccttgatggggcatcgcgttcgcgccttcctgtctatgctcggcattattatcggcattatgtccgtcgttaatacggttgccatcggtgagggggccaggcaaaaagtccttaatgatattgcgcgcctgggggcgcataaaattgaaattcagccaggagttgatactcgcggcaatccgctttatggaatactgagcgctgacgatctgcgctatctcaaaagccttccgttcgtaacagaggtttcagcttttgttagccagcatatggccgtagccagcctgaaaaaagcaggtgtgatgggcgttcgtggcgttggcagggagtggttcgcgctgaataaccaacatattcttagtggtaatctgttttctctgttcgaacaatcgtctgccgcacaggctgtcattattgatgagatcgcccgtcagaaactcttccccgacgcatcgggggacgttataggacagctcattaatatcggtggctcgctgtggcgtgtcactggcctggtgagtaatggccttgtaacgggagaagggcaactttatgtcccgtttacctcatttatggagcgtatctctccatccgctacagtaagccagatagatgttcacgtagctgaaaacgttgatgaaacggatgcttccagacaaattgctgtggctatgaaggcccgacatggtgccgggaatatccaggtgaaaaccaatcagcaagtactgaaagcggtaagcaacgcctcgcaatcccttaatctattaatcaccgcgattgcctgtatctctctgttcgttggcggcataggtgtcatgaacgttatgttggtctccgtttctgagcgtacccgtgaaattggtatacgtctggctgtcggagccacccgacacgatattctgcgccagttcctcaccgagtcggtggttatttgcctgcttggtggggcactgggagtgttactgtcgttattgacgtcactggcgattgggatgtttgccaccaccatcgttatgaaaatcggactgctaccggttctgggcgcgtttgcgatctctaccctgaccggattggtattcggatttttccccgcccgtaatgctgcgaagctaaatcctgtagaggcgatagcaagagaatga

SEQ ID NO: 386739 - DNA, 1365 bp, Salmonella enterica
atgaaattttgtttcttgattctcgtgtttttactggctggctgtattcactctgaaccgtcgtcattaaataacgctaaaggggagtggttaaccacggtgagcggaagaagcgtaatggcccgtgcaatgcgcgtcacgaatcattttaacgatccacaattgacgaagttggttagtgacgtgctggttaacaataatgatctggccgttgccggattccatctacagcaggcgtggctggctgccgggttaattgatgaaacacgctttcccggcctgaccgcctcaggtggcgctacgaatagccaacagctcaaacccaaacaaccttccacggaaagttggcaaagtgacgcctcgctgagttgggagattgatttgtggggcaaggttgctcgccagcatgatcaaagcgtctggcaggcgcaggccagtgattcggatcgtctggcgacagcgctgtcattaattaagactacagcggaactgtactggtcgatcgcattaagtaatgcgcaactgaaaaactatgagtcgcaactggtcatcagtgagcaattgaaacagttggtggaaagtcaatatcattcaggcgcagtttcagcgagcgatcgctttcgcgcggaacagagcgtattacagatgaggctttcttatgacgcgctggtggcaaaacgtgatcaagacaggcatgcgttggctatcttatttgacagtagtccgcgcaaacaacgcccagaaaaactttctttacccaatgctggcgccacgcccgggccaaaagcgattcctgtaagcgcattatccgaacgaccagacgtgcgcagtgcggagatgcaactgcgggcggcgctggcggggtctgatatcgccagactcaatttttatcccaccctctccgtgagcggcactgtaggagcggcaaacgcggtgttttcacaatggtttgctcatccgtctcgtagcgtgtcggcaaacctggcgctcccttttctgcaatgggatgccatcatgctgaccattgagaacgctgatctggatgtaaaagcggcagaggctgattttcgcactaaggtctggaaagcgctctctgaaacagaggatgccctcaccgagagccaacatgctttagcgcaatatgagatgcgcggccattatctccagttgagccatgcattgtggcagcaggaacaaatccgctttacgcaaggcgactcaagtctccaggatgttttggacgcagaaagtagctggcttcaggctgagaacgacattcagaatgtgaactacgactatctttccgggattatgaagctgtggctcacgtttgatagtgataaaaccggtgcgccggtacagtaa

SEQ ID NO: 386740 - DNA, 1251 bp, Salmonella enterica
atgaagacacaatatcgcagagttgtcataacagggcagggcgcgatcaccagcctggggcaaagcgttaatgagtgctggcaagccatcatggattatcggctgggatacaaacaccgctcgctggaatgtgccgggatcaaatcggcgttttatggtgaaattgaagacgagcccagtattcgatttgtaccgccgggtatccgcagacggttaccgcgctttgcccgtttagcgatgtttgctgctaaagaagctattgagcagtcatatggcgatcgggctattaaggattattatgatccctgtcgctgtggggtgattattggcactggttgggccggccaggatgaatcgattcaaaatcacgaccaataccgtgatacaggcctgggctcaacctttggctgcattttctctatgccaaacgtcgctacggctgcctgtagtcaattttggaacctgcgtggttatcaaaataccccgattgctgcttgcgctacgggtacgatagctattggtgatgcgttcgaagctattcgttcggggcgggcggatatgatgctggcgggcagcggagagtcattacgcagtcatacctcaatatggaatattgatgtattacgtgccctgacgcgtgagcaggacgatattacaaaagcttgctgcccatttagcaaagatcgcaacggctttgtattatcagaaggcgccgcggtcctttgccttgaagagcgcgaatcggcgattgcccgaggggctacaatattaggagaaattaccggttacggtaatttctccgatgccacggattttacggctccggcggaggataaaatcgcacgtgttaaaaccattgaatatgcgcttcgccaggcaggaattgaggcatccatgctggattatattaacgcgcatggtacctctacgccgcttaatgataaaaatgaatgtgaagcaattaaaaccgcattgggtgaggctgcattttctatccctgtctccagtacaaagtcttattctggccatttaatcgccgcggcaggtagttttgaaacgattatctgtctacaggcaatgcatcatcaccgggttccagccacgcatcatctttataaccccgatcccgactgcgatttagattttgtcgcccaagggcatagacaggtagatattcaccatgcgttgaatttaagttttggcttcggtggcgcgaatgcggcgctggttatctcccgtggagaagcctga

SEQ ID NO: 386741 - DNA, 777 bp, Salmonella enterica
atgttgcaatggagcgctaaggacgcccgcctgtgggccatcttttccggggatgaaaacccgatacattttgacaacgatgccgcaataaccactggcgcgaatggcataacggtacatgggatgaggtcgatgtggcatctcaagcaagcccttgctgaaaagttgccacgttcttcagaagaagaagggctacactgcgccattcggctacgtagcccactccttattggacgtaattattgtttgaaggtgaaagcgggggctgactgcgcgcgtggcgagattattgacgccaacagttctgccgtttgcttttcgggaaaattatcaaaaagcccgctgccagtgcttgatgaaataggcttagctccccgccttatcctcgggcgttcgcaaaaaagtcattatccgcttcctggctatgactggtgttttctggatgcgcttttattcaggatgattgttgatgcccctgaatccatggaagtcgtgcatagcgttttacctgaacttcccgcaaaaacgttaggtgacgtttttgttcaactgccgatcgtgcaaacacatcatgatgtttggttgtcggcaaatttattacatcaaacctgggcagatcaagatatcaaaggtgcgatcctgccttcgctggtaatgggtgatcgtcagagcgggtttattttacaaatgagcgctgcgtgcttacagcaacaaaaattaatcatgtcgacgacggtgacattaaaaatttggcctttagtaaatagaaacggatga

SEQ ID NO: 386742 - DNA, 240 bp, Salmonella enterica
atgaataattttcaggatgtctggacaaatatcgttaatttaattgccgatgtgaaggatgtggctgtggatgatctgtctgcagaaacgatgttgcgaactctggaactggatagtctcgattatgtcgagatgatggttactattaaacgtaactatggaattacgctggaagccgagctgtttattaataatcccgatattactctcggtgaactatgtcagcatatttgtgagtaa

SEQ ID NO: 386743 - DNA, 738 bp, Salmonella enterica
atgagtcagccatggattttggttactggcggtagccggggcattggcagggagctggtgctatcgctatccgagcgttggcgtgtggttttcacctggaagaacaacgcgactgccgcctcagaagtcgtggatcactgtcgcaggcaagggtgtctggtggaggcgattcagtgcgatggcgccagtgaggaacaggttcaccaaacggcaatacggttacttgagcaatacggcgctccttatggcattgtgcataatgcgggtgtaccgatggatgctttacacattcaccaaacggccgagcgctggcgaaaggttatggatacgaatctgcatgcgcttttttattggcatcagagtctgctgccagccatgtttgaggcgaaatcggggtctatcgtgttcattacctcggtttctggcgctgtccgagggaatgcggggcaaacggcatacagcgccagtaaagcggcaatggtaggattgtgccgatcgttggcgcttgaaaccgggcggtttggcatccgggtaaactgcatcgcaccgggggttattaacagcgaattgcttaacaccattccagcggataagcttaaagccctttcccgtcaaatcccactcagacgtattggccaacccgctgatgtggcatcgtctgtgcggtttttcttgaatgaagagagtcaatggattaccggccaatgtctggtggttgatggtggaatgagcgtataa

SEQ ID NO: 386744 - DNA, 552 bp, Salmonella enterica
atggaagaaagcaatccatggccaacatttgttgacgcattttcgacagtattaagtatctttattttcctgacgcttctgttcatattgaatagtatggtcgtaatgtatgagagttcacagaaagtttatgctcagtttaaggctgaagtgcaacaaaacagtcagtctgaaactgtaagcgttgaaaataaaaagcaatacagcgtctcaaatgatggtgtctttattaaggatacaactaattattcatctgtaattttgagcaaagataaagccattattagttatgaccccaataagtggcagatatcagaagataatttaaagcaggtaatcgactggattggtagtgaaagcaatgtccgcattgtggcgacaaacggcagtaacttacctgtgtctgatgaaattaaaattgcctatgagagagctatcttgctggcaaaatctcttgaaattaataagcatgaattaaagctttcaattgaagttgcatcaggctcagatagcaataatggacaagtaataatttacaagggaacaaaatga

SEQ ID NO: 386745 - DNA, 1251 bp, Salmonella enterica
atgatttcaatgaagaacaaagtcaatatatttataattccaattttatctttggtagtagcattaattcccgctatgtttttattatctccttatctacggggttatatattttcaacatacagagcgagcgctatattcaataccgcaattcttactatttatagcattggtgcttttgttagtttctactcgatagttgaagttggacgtgccagatttattttaagtcgtggagatggaaataaaaattgtcgattgatctctaatcttaataagcttttttattctgctgaataccccaatgctggttcattgatatcaagtgccaatgaaagcgcttttaagacaaaaacacaaaggttgtcattaattcatacttgtatgaatacatcaaccatgatggggttgctcggcacgttttttggcttgtccgtaacggttgcgtctgttgttgtcttgctggacaaatcaagccttggggggggcgggaatagtagcgagatattagatgttatcgttaatatcatgaaatccctgtcggccccacttcgtgggatgaatattgcttttgtggcttctatttatggcgtagtcagtgccatcctcttaggcgtacagactattatttgtcgaagtgcctacaattcacttttttattgtttaagagagatgtcaattgaataccttaagaaaaatgatgagcaaataggtttagataataacaaggttaatgcaggtagaattattgtaaagggtattaatagcattcttgaacaggtaattaatctcaataatgcaacgaataaacaatgtgatattactgcagcggccttgtcggggattgatatgaatatgtctcgcatcaattcttgtctttcaagtattagcgatgttttggtaattttgagtcaggagcaaattatccttaagtctggtgttgattctgcaaaaaacatgattaacgaaggtgtttgtttacagatgaaaaatcaccatgaaaatatcaataaatataatgatatcctcaaaggaaacttatcaatagcggcaggaatagagagtgttagtgacgaacaggaaaaaagacatcttgaacaacttaacatgctaaaagaaaattcaactgaaaataaaatgtatgcagatattctcttaaaagaaatggagtcaagtcattcaacattttatcctttgtttgaaaaattagtagaaatgcataaacttttaacaggtagggttacaaaataa

SEQ ID NO: 386746 - DNA, 228 bp, Salmonella enterica
atgaaaatgaaaatgtataccgttgatgtggactccatacactcagttcgtatgatgcagtggcttattgtctttctgcttatcttgttggggatttcttcccaggctgagattaatgcagttgttcatggggaaggtaatgttgttaaccgttcaaactctcaggtagtttcactgagtaagggaggagtaatcgcggatttatacctgtctcttatacacatctga

SEQ ID NO: 386747 - DNA, 291 bp, Salmonella enterica
atgaagaaaaatgcagtggttattaacccgaaagatagcgtcgctactgctctccagcccctcaaggccggagagatcgctagcatgtttattggtgatgaaaatctgaccatcatcttacgggatgatatcccttacggtcataaatttgccattaaagccgtcgcgctccatggcgaggtctacaaatacggtgaatccattggtcgggcaacgaagtctatccagcctggagagtatgttcatgttcataatgttgaaagtgaacgtggtcgtggggattggcaataa

SEQ ID NO: 386748 - DNA, 1164 bp, Salmonella enterica
atggaaaaaacaatcaaaggttatcgtcgtccagacggcagcgtgggtattcgcaactacgtcttaattttacctaccagcgtttgctccaataaggtggctcaggacatctccgctcaggttcatggctcaacctggcttaataatgattttgggtgctgccagattgccggtgatgcggcgttaaccgaaaaaacactgatcaatgtagccaggaacggcaacgtgggagccatactcgtggtcggattgggctgtgaaggcgctgagcctacccacattacgcaagaaatcaccaaattcggaaagccggtttcctgtattacaattcaggatgaagggggtaccttgcagtgtcaggcgcacggaatttcaatcgcacgtcaatatgcgcaggatttgtcccagcaagactacgaagaaataaacgtcagtgaactgatcctcggaatggagtgcggaggttccgataccacctctggcctcgcttctaaccctgcctgcggcattgcatccgatttattagttaacgatggcggcacatcgattctctccgaaacgaccgaattcattggcgcagaacacgtggttgcgcgccgggcaatcaattcacaagtcgcagacgatttaatcaagctggttgtcgggtgtgaagaaagagcgaaagcactgggcgcagatatcaggggcgggcaaccgactccgggtaatatccagggcggcattaccactattgaggaaaaatcgctgggctgcatgcacaaagcgggtcattcgccgttgcagggcgtcctgcaatacgcagatttccctggcggtcgtgggctgtgggtgatggactcccctggacaagatatcgaatccatctcgggtatggtggctggcggcgcgcaaattgttatttttacaaccggacgcggaacgccaaccggcaacccgattgcgccagtgattaaaatcaccgccaatgaagagacattcaccaaaatgcgcgacaacattgatatcgatgtttcgtcgattatgcgcggtgaatcgtccattaatgagatgggcgaggtgatttatcaggaaatcattaaggtttctaatggtaaaaccaccaaagccgaagatcttgggcataaagagttctctatttacaagatcgcaccgaccttttaa

SEQ ID NO: 386749 - DNA, 918 bp, Salmonella enterica
atggtaatcccgttattgatcggagcattattaaagacattttgtcctggtgctttagagatagggagcttttcaaccgcaatagcccatggcgcactggccatcctgggcgtattttttgtctgtatgggcgcggaaattcgtctacaggctgcgccagtcgctctgaagaaagggttcgccattatgttatccaagcttgtggtcgggacggcaattggcttactggtcgcaaagttttgcggagcgaacggcttctttggtttgtccgcactcgccattatcgcggcgatgaccaacgcaaacatggggctttacgctgctctgaccaaacagtttggcaatgaaacggatgcgggtgccatcgccgtgctttctgtacttgaaggcccctttctgacgatggtagcgatgggtgccgctggactggtgtcgatcccgatcatggagctgttcgccgttgttctgccaatactgattggtatgctgctcggcaatctggacgaggatatgcgttcgttcctgaaaagtggcggcgcgatgctgatcccctttttctcttttggtctgggaaccgggatcgatttcagcaccctactgatggccggatttgcgggggttattctgggcctgatgacagcattcattggcgcgctgattaatgttgccgtttcccgtattgttggtggttcagggattgccggagcggccgtgtccacgacggctggtaacgccgtggcgacccccgcagccatcgccgcggttgaccctggcgtgtcagcattaatcgccgtggcgacaccgcagattgccgcttctacgatcgtcacgtccttagtcgtaccgtttattaccgcctgggttgctcgccgtgaacaaaggagaaccgtccaacgccagcaattatcaaaaacataa

SEQ ID NO: 386750 - DNA, 1929 bp, Salmonella enterica
atgttaaaattacctaatatttgcattgtctctccattacaagcgctctctctcgaagcagaacgcctgtcagaccgatatactggcatcgcaaatataacgatattaaatgccaccctcgatgatattgattccgtgatcccggtattgcgagtgaataaccctgaccttgtgattagtcgtggaggaatggcatggatgcttaaacagaaaatcccgcaaccggtcattgagataaaaacatccgcctatgacattatcgatgctctcaggccataccttggactcaataaaaatattggtgtgattggctttcgcagcgttatcgatggctgtatgaaaatagccaggatgctcaatctgcaactcactgagtttatcattgacgaaatggtcaacccttgcattgagaatgccagaaatgacttcgtcaattacacccaaaataaccagatagaccttattattggcgatgccatttgtccgatttattttggcacacacagcgtggaacacttcatccctttccattcaggtgtcgaatccatagaactggcattatatgaggcaatacagctatatcaggcgctcgccaatgagcatattgagcaaaaccagctaaatctgttacttgaccataccaataaattcattcttctcattgataattgtggcaaggttattcattgcaatcacaaagccactgagcttttgcaactcagcaagcatgatttaatcaataaaaaaataccgtctttaacgctaaactgggaggatctgcaaaataatatcccgctagaaaatgagttaatcaataccccctacggcgaatttgtagttaaccagttccccatcgtggaaaacgaaaatctcaaccgggtagtgattaccctccagacatcatctaacttacagaatgctgagcagaagataagaatcaaagaagcgaaaaagttagggtttcacgccagatatcacttcgacgattttattacctgcaaccgagaaatgcaggaccgcttaaggttggccagaatttatgctggaaccgaagcaacaatactactgctcggtgaaaatggtaccggcaaagaggttctggcgcagagcattcataacgccagttcacatagcaatgggccatttgttgcggtcaactgcggcgccatccccgcctctattatggaaagcgaactcttcggatatgttgacggcgcattttccggcgcctctaaaaaaggccgcgcagggatgtttgaactggcacataacggaaccatcttcctcgatgagatcagcgagctggataagttcttacaagcaaaactcttgcgaattctgcaagagcgccaactgatgcgccttggcgcagaccacatgatcccggtgaatgttcgcgtgattgcagccaccaacagaaacttaccggcaatgattgcaaccggcgaatttagagaagacctcttttatcgcttgaatgtactcaaggtcaccacattaccgttacgtgaacggccagacgatatccaaattattgggcaggcaacattcaatacgctgaggaagtcatatcagttgccccccattgcattgagcgaggatttatggggtgagcttaaaaagtatttatggccgggtaacgtacgccagttaaataatattatggaacggctggcgttatcttttcagtcaggcgtcgtgtcactctctgccgccgctttactgattgaggatttacaagccgataaagcgtgttcctcaaaacatcaacataactgcccggactgccaactgctcgaaggcccgtataaacggatccgtagccgtattctcaaaggcgtgctactacgacaacaaaacaacaaaagccgtgcagcgaagcagcttgatattgaccgtagctctttcagccgctggcttggcgaatga

SEQ ID NO: 386751 - DNA, 753 bp, Salmonella enterica
atgttaaatatcaaaccctttacgtggttttcgaaaccgcatcaaagctataatctaaaggatgaaaatagcgcttcacttgagacggaccttgctgaaagtgtgaatttatgcagctacaggagtgttagagaagagtgtcatgaggtaaatattagtttcacgctttcccgtcaggactacgatgaactcgtaaaattaggttgctataacgcgcaggatatcattcagaagctttgcaatatctgtacttcgctggcaaataaattaataatccaggcaactgcggtatcccacctttgtaaggaggtgaatatcaggttagctcaggatatccaatcctatgtaccttcgagaatcaatgcagtactcgatgatgttcgtaataaaaaacagaaaaatattccctctacagtgcgcgctgagctgttgaggacagccatgataaaaggaggctatggaaaaatggtggaagggaagagtcaggaaaaattactcagttttgccaggcctggcctgaccgccgagattaacaccttagttgatcagatgttacccatgagcgccagggtggttaactatttaaaccaagcaatcaagccgtcaatctgcgatcaaacctatgatgcgattgtctcacaccctgacattaacaaaatgcacttgcaacaagaatgttacatgtcagtttcagaaatattgaatatagccaggctgcaggcagaagaatggtttgaagaggggggaaaataa

SEQ ID NO: 386752 - DNA, 366 bp, Salmonella enterica
atgaacaaacgcaagccacgcaaagccgtcgccatgaccgccagcgcactgcaaaaaatggaggcgttcaccttcggtgagccggtgctggtgctcgataagcgcgacattctggattacgtcgagtgcatcagtaacggcaaatggtacgagccgccagtcagcttctccgggctggcaaaaagcctgcgctcagccgtacatcacagctcgccgatttacgttaaacgcaacgtgctcgcaagcacctacattccgcccccgctgctgtcccgtcaggatttcagccgctttgcgctcgactatctggtattcggcatcgctgcgcgaggcgatgcgcaacccgaaaggactcggcaacattaa

SEQ ID NO: 386753 - DNA, 375 bp, Salmonella enterica
gtgccactgagcgaggtcgccacaaaggatgcctttttcaacatcaagaaagccagcgccgccgacctgatggatgcgcaccgcgtgccgtttcagctcatgggcgacaagcctgagaatatcggctcaatgggtgatgttgagaaggtggcgaaagtcttcgtgcataatgagctgtcgccgctacaggacaggttcagagaagtaaacgactggttcggtatggaggtcatcaggttcaaagagtacacactcaacaacccggaatcatcaccactcaagccactatcatggagtaaaccccgaaaaccaggcatccagcaattaggggttggaatgccccccgagcccgtagacacatctgccctacaataa

SEQ ID NO: 386754 - DNA, 291 bp, Salmonella enterica
atgttactaattactgatgaacaactggagaaagtcagtggtgcgggtggcctcggtgaagcattatcgggtattggtcatgttgtagatggggcggcacgcgttgctaatgctgtaaatggtggggggcttggcgatggtttagggactcgatggggacgtgccggggcgagtgattattgtcgcaatgaggcaacccaaactgataaaatgtccccctctctataccatgactgtatgaagaatcctgctggttggggatataaagactcaggcccatggggagggtga

SEQ ID NO: 386755 - DNA, 633 bp, Salmonella enterica
atggaagacgaaagtaatccgtggcctagttttgttgatacattttctactgtgttgtgtatttttatatttcttatgttggtatttgcgcttaataatatgcttattatgtatgataactccattaaggtttataaaacaaacatcgagaaaacgactaaatctgctgttcaaaatagtggagccaataacagttcaaatgctaatgaaatagttaaaaatgaagttgctactaaaagtacatcagacggaattactgcaatgacaggaaaagaggttggtgtgtacgatattgctgatggtcaaaaaattgatatcacatccacaaaaaatgaacttgttattacctatcgtggcagactaaggagtttttcggaagaggatattaataaaatcacggcttggctagaagacaatggtaatagtaatttattgatagaaatggttattcctcaggcagaactctctttctctgattcgttacgactgggatatgagcgaggtattattctgatgaaagagattaagaaaatatatcctgatgtagttgttgacatgagtgttaactccgcgatatcgagtgcaacgagtaaagcaattattaccactatcaataaaaaggtgtcacaatga

SEQ ID NO: 386756 - DNA, 579 bp, Salmonella enterica
atgacgtttaaaatgagcgataaagcgcagacaattaaaatttataatctgcgttcagatactaacgaatttattggcgcgggcgatgcgtatattccgccgcataccggattaccggctcactgtacggatattgagccaccggaaatcccggcaggaagcgtcgcggtgtttgacagcgaaaaaaacacctggaacgtcgtcgaagaccaccgggggcagacggtatacagaacggataccggggaggcgatctggatttctgaactggggccattaccgggaaacgtgacgaccatttccgcggacggtcagtatgaaaaatgggacggtacaaaatgggtgaaagacgaagaggcagaaaaagccgcccggcttcgtgaagcggaggagactaaaaaacgacttctgcaactggcgacagataaaatagccccccttcaggatgcggttgacctggggatcgcaacggagaaagaaacatcgttgctggaagtctggaagacttatcgggtgctgttgaatcgtgtagatacatcagccgcgccggatatcaagtggccagcgcccccacaataa

SEQ ID NO: 386757 - DNA, 573 bp, Salmonella enterica
gtgctgtcttacttaatggtaattcactttgttttatttggaaattcttctgatttaaaaaacttttggaaatatgaagtaatacggcgggagtatatggatatctggaggcttttcagagagaaaaaacaacgtaaccggaatttccttttctggtggaggttggctaacgaaatgtatattaatggtaataatttacataagaaagcagcaaaaaaattaaacaataaaataattaacaaatttggttgcgatattggattaggtgcaaaaattgggaaaggattaacaattcctcaccattctggaattgttgttcattttgctgttgatattggtgagaacctgatattacggcagaatacaaccattgggaaaatagatggtgacatgtctgattcaagagtaagaataggtaataacgttaatatcggggctaattgttgcatcattggattatcacgcaaaattggggacaatgtaacaataggtgcaatgtcttttataaataaagatataccatcgaattgcacatatataactaaaaaaaccggtgttgtcttgcataaataa

SEQ ID NO: 386758 - DNA, 897 bp, Salmonella enterica
atgctcaacaaagaacggcattatgcaatactgatctggcttaaccggtatgagcgcgcgacggtgaatcacctcgccaaactttttggtgtgacaaaagaaacaatccgtagcgaccttaataccctttctcgcgaagggtgtattgagcgctgccacggcggcgccattattaaacgccgcattttccatactcaatcggtcaataatttagataccaatattatgcatttttttgacaatcctccgtcaaaaaaaacagtcaaatcccaacataaagggcggaagatgaaaggtaaagtttgtattctgggttcatttaatgttgacattattgctaatgtggatcgtttcccacaaagtggtgaatctattttttcagaaaatacagttattggccctggcggtaaaggcgcaaatcaggcgctggcagtcagcaaatgtcatgtcaaaacgcattttgtcggaaaagtcggcaacgatcaatttagccagttagcttatgaacatctttcatcctctgacattgacagttttatgctgtatcaggataagcagtcaaaaaccggtacagcgttaatttatgtttgccaaagcgatggtgaaaatatgatagccatcagccctggcgcgaatcaatcgattaccgccgatgaggttgaagctatcacctctgaagtcaggagctcggatgtatttttaacgcagttggaaaataatctcccggccaccttcagagcgatcgaaattgcccggcgttgcggtactaaagtggtattagacccggcgccttattcgccacatgtcattaattgcctgcaaaatgtcgatttcctgacgcccaatgagactgaagcatcgttgctttcaggtatccaggttacggatattatgtaa

SEQ ID NO: 386759 - DNA, 759 bp, Salmonella enterica
atggcatcttctgctacacccgcttctgttggtcaccgtcctgtggcaaccacagatgcaaaaaaagtagacgtttctggtgagctgacaaccggttcaattctccatctcgataatgttttctttaccgataaggataatgatctgcttgatctgaataaaatgaataatactgacgatattaaatggtatctggtggataatgatgctgccgacccttctggtgcgccagcggcaaccgggacatcttttaccattcctgcggatgcgggcggcaaaaaaattaaaatcgtttaccgaattaagacggcgacggggaccccagacagcgcattcttgcctgaaactgtcttattaacctctgcatcttctggtgtgggcggtgactctgccgcagacggcacaatttctaataagctacgttctgtcactatcaatgtggtgaatgaaagtggtaaaccgactgatgaactcaatggtaccaatgacgtcaacactccagtggtaggcggcactcttgaagcagtgctgcagtgtgccaccaccgcgtccgctgaatgtaaagtgagtaactataactttacctggcagatggcggatgcaactaccccagatacgtttaccgaactgaacaatactcacagtgaaccacataaatatgtcatcaaagggaccgaacagaataaactgttccgtgttcacgtcacgcctaaaaatacaaaagtaacgtcggataataagcgcgctatccgtcgctga

SEQ ID NO: 386760 - DNA, 831 bp, Salmonella enterica
atgcgcatgccgaaatgtaattttataatctatagtctccttttggcggctgtaccgatgagcgtctcggcggactcgtcgacaacgtctgcggtaaccgtcgggatgctttctcctcctactgcgccgagtgttggacacagaccgtcaaaaaatcttagtgacgtacgattgactttgaatggcagtgattattcttatttaagttataccccctttcctggtataactctcaggagagatactatccatcgtgcctcagatcctgataataattatcaggctgctgagaccagcactgttgtatgtacctattatcaagttaacaaagataactctcaacatatactgaaacgggaaagcccatgtcaatataattttaatattaagaaagaacatgtaggctcgaggataaaactagaagtttataacgaaacggatatgacttcagcgtcagggtacatacctgtgccatcggtctccgagcctcattacattgagacacaacctatatctaatacgccaagcccagatttaacggttatgaatatagataatgctgtattgtcaccgggtgaaagtactactataacaactcttgttaaggatattgatgggaatcctataaataatgcgttgatagaattttttataggatatgcgaatggagatggcctatgggatataggacttgttaagaaaggcgttgttcctggtgaatatatgcaagttataacttatcttggacacggtagtgaaaagattgaagttaattatcgctaccagggaaattcttttggaaagagtttctcgattacaggaaagttgtaa

SEQ ID NO: 386761 - DNA, 126 bp, Salmonella enterica
atgcctcagtggagatcgcgtattctgtacagaaaacgcctgcgtctaatcgagacccgtgacgcaggcgaaggagaacgggtctacatcggaagcgggtattatacttatttgtatgacaaataa

SEQ ID NO: 386762 - DNA, 465 bp, Salmonella enterica
  misc_feature (398)..(407): n is a, c, g, or t
atgtcatcgggtaatattctggctatcttttatttcttattggaaggtattggtaatacgctgcttgtgacatttacctgttttctttcagcgttttttaccgggcttacagtcgccgtattacggcgactgtccccccttccactacagaagatactcgacgtactggtctttactcttaggggaattccaatacttattgctgtttttcttatttattttggattgccatcgattggcatatatatttcacccctggtggccatgaacctcagcgtcggcttaatcagcgggagttatcttgccgaagtgttcagaggggcgcttaaattagttgatccattcgaaattacggtagcgaaagtagccggtatgcgtcaattacaggttataataannnnnnnnnnccacagatgttgcgattttctgtgcccggtattatcaatgaattttcttctgtattaa

SEQ ID NO: 386763 - DNA, 1227 bp, Salmonella enterica
atgccgttcagtgttggacaagggtatttcaaatcgtctatcagcgttgaaaaatttaacgctataaaagatagttctcgccctccggaaatgagcttatgggaaagaattaaagaatattttttctctacatatcatgcagaggcccttgaatgtctctttaaactttaccactatcaggaactgaacttaacaccagtacaggttcgtggagcctatatcaagcttcgtgcgctagcctctcagggatgtaaagagcagtttattatagaatcacaggggcaagccgatgagttgattattaaaggtgataatggcgaaactcttttatctattgtggttgaatgccatcaggacgtttttagccttgccagagaaatcaacaaattataccctaagacaagaaatagttctttggacggcattaccagactgataatttttggcgacagcttgtctgactccatggggcgtatgtttgaaaaaacatattatctcttgccctcctatcctcaatactatgagggaagattcactaatgggtttacctggactgaatttttatcatcgcctcagtttttaagtaaggagatgattaattttgccgaagggggaagtacatcggctagctattcatgctttaattgcatcggcgattttgtatcaaatacggacaggcaagttgcatcttataccccttccagtcaggatctcaccatgtttttattggggggtaatgactatatgacgctacacaaagataatatagcaaaggtagttgagcaacaaattgatgatattataaaagtaatcaccgagggagtggagaatgttctggtcatgggaattcctgatttatctttgacaccctatgcacaacattctggcgagaaaagaaaacttaaagatgaaagtactgctcacaatgctttgttaaaaagttgtgttgaagagttaaaagaaaaatacccacagaaaaagatattttattttgagaccagtgacgcatttaaacaattaatcaatgtggccagtaatattggttatgatacgaaaaatccttatactcatcatggctatatacatattcccggggctcatgatccccaactggatatatgcccgccatatatttttaatgactatgttcatccgactcaggaggttcaccttagttttgctttgatgctagaaaagtttatagtcaatcattattctaacgaataa

SEQ ID NO: 386764 - DNA, 633 bp, Salmonella enterica
atgagagtgcacgcatgtgctgtcacatcgaatttacccttcaaaagcatgaaaaaacagctttgccgttttttctgcgaacgcgtgttaagtcaatggctcaatccgctcagggcccttatttttcacattttccacggagcgcgacacggcagtcagataaacttatcgacaggcacggcaccgttgacggctatacaggggcagtcctggcaggagatggtagaccatcggggggaaacggtttacagcactgaggacgccagtccagtgtctattacacgtcccggaccgtatcctgataataccaccacactcactcctgatgtcccgtaccctgtctggaacggagagggctggataacggatacagcggcgcagaacgcagctaacattcaggaaaatatccgaatttacagggagttaattatatctgtcgtgctggcacaatgcccactcacaagcgcggtgtcgctgggcgaaacactcacagacgcacagaaaaacacactggcaggtctacaggaatatgcgacagaactggcggaatttatccagaatgcagatttaaccatcactaatatttcatttccgaccgttaatccaggattgttggaatacccttttaactaa

SEQ ID NO: 386765 - DNA, 189 bp, Salmonella enterica
atgatatgctttgcatcaaatacaccaaaaatagacgaagtcaataaattatttggcctccctaactgtgtaacggatcaagagcaattttcgcaagccctgggtaatatacaacagttcgaatggaagccattattgaatgaaatgtgtaccatggcaaaagagaattataaatttcttaattcttaa

SEQ ID NO: 386766 - DNA, 666 bp, Salmonella enterica
atgaaagtatttttaattaatgatacagagaaagagtatcactggggttgttacggaacatcttcagccataaaagatcaattatatgcaaacggcgttgaagtcattacctctttttcttgtaaagacggaagtaaattagagaattcgccaagaaaatgcctgtctgtttatagcaaaaatcctttaatacgatatgtgtctaaattatacttcttgagattttttaaaaagaacctccctgaattatgtaaaggaatcgaagaaagcgattatgttataattaatggcgagggaacaataaacagtatacacattgcaacaagatttatattttttgtggtttttcttgcaaaagatgtatttaataaaaaagtaagcattattaaccactcctgttaccctaagataaataaagaaaaacaagttttttattataaaaatgtatactctagatgtgattttatcgcggcaagggaaagaagatcactgcatatcataacaaacattctgaatgtaaacgcaacgctatcatttgatagcctcccactttcaattaaagatttaaaatttatccctccttcttactatagtggaaaatatgtttgcctttctggtgcagtaaactacaacgtagaaaattcaaaattcaaaattcatatctga

SEQ ID NO: 386767 - DNA, 651 bp, Salmonella enterica
atgaaaaaaatcgccattgtatccggattggttttggctgcttgttcgggtatggcttatgcttccgcaggggacagtacgctttctgttggttatgctcagattcattcgcatggcttgaaagatgcggttaaatctgaccgggattttgctgcggcttatggtggacgcatggatgattattccgatccgcgtggtgtaaatatcaaatatcgttatgaatttgatgatcatctgggcgtgatcacttcattcacttatgccagtaaaacgtttgaaggtggtgcctcttctctggggagtggtaatttctatgagggggaagataaagggcgctattttagcgggatgatcggtccggcctggcgatttaatgattatgtcagcgtttatgctatggccggggttgcgtacagtaagctgagcagtgatttagctgaataccagccgataacgaaattggatggcacctcatcccgtaaacgtgtggcgtcgtgggatgacagttcagatcatacaagctttgcttatagtgctgggttgcagtttaatccgtgggagcatgttgcaattgacgctgcttatgaaggctccggaactggtgactggcataccaatggatttattgtaggtattggttataagttctga

SEQ ID NO: 386768 - DNA, 282 bp, Salmonella enterica
atggcgttgatcccttcgtggtcttcgagtgcgcacacggcttcgttttcgccattcacgaagccaccgggaggcacccggcaccgcaactccatcacaggtaattattgttttcaacatgacttccttgccccgattttgtcggggctttttgtgacagatgttgttgcaatggtaattagttccattaaaacagcattattgtttgatttagatcatcttaactctttttttggggagtcatccgggggcttccgttgcgaacctgtaccgggccagtga

SEQ ID NO: 386769 - DNA, 684 bp, Salmonella enterica
gtgacaccgcagacaatcacctgggtcaggagcagcgtgatattcgcgctgaattgtggggataaaccgcagcaggggcagctggcggcgtttgaaggatttgcccgcgccaccagcaggcgttacgggcggcagcgtgaccggacgttgcagcttggtaatcgctggtactgtcgggatacagatccggtttacgcggtggaaacggtaaggaataaaaaacaggtgatcccgatagcgccggagacgtacagaacagcggcatggcgtcgggcggtaaatcgtctgggggattatgagaaagcgtggatactgtattgctatggcgaaaaacacacatacatgaaccatatgctggtgtgtgagtatatctggctgcagatgatggacaggctgaaagggcggcgtgttacggatgctgtgatggagaacctgattaccctggctggagtggtggcatggaatgccgggcagattatgcgcgagcgggaaggggcgacaatttatgctgcgacatacgcggcgcaggaagtgggggttaaagccagcgcatggagccggaattacaaaaaacactggcagtttatgcatgataaatgtgcagaactggatcgtgcagccctggaaaatctgatgaaaaatttaaaaaatagcgccggaaaaagaaaagatttgctcaggtaa

SEQ ID NO: 386770 - DNA, 1122 bp, Salmonella enterica
atgaaggcaatactgacggcatttccacaaaacagcgccagggtaaccctgctgaaatccggaaacctgacccccagactccgcgatggtcagcgtgtcatgatttgcgacgttccccgacagcttgagaatgtgccggcgggagaaataccggaaacggggcaatggctggcgcgggacgaggcgctggagccgttttttgctgactgtcgggtaataaacgctgccggtggtccggaggggctgaacagatgggtaagcagaatatcggattgtcagtgtgctggcgctgaggacgatcacgtcaggaacctgacgaccgcacagacacaggatggcggtgccgtgaggctgtgccacgcgtgcgacaacgctcactacatgaagggataccgcgcactgagcgacatcatcaccagaaaccgcgcggagtggattgtggattatgtccgtatgagcctgaggctggaaaaaaatcaccaggtgacgctaccggagatgttctgctgggccgtactgcacggcgtgaccaacgccatgcccgtgaacgtgatacgtcgctttgcctccctcccggaagatgaggcgctcaccggcacgataaaggaagccggtattaacccctggcaactcggtgcccgccagatagtggagaaaaaggccggggaggggatagctactgtaccacctgatatttatacagtatcagataaaaaaggccttattaagactccggggcttaatgaatccgcggcagaaagggtaaaacccgctttaacgctggccgtcgacagcgatccagctgcggggtatatgagaaagccaaaaatgatccgcctggcgctgccgggctatacgcagtgggtgaagcgccagccctgttgcggttgtggtaaaacagcagacgatccgcatcacatcatcggtcatggttttggtggaaccggaactaaagcgtgtgatttgttggttattccgctgtgcagggtatgccatgaagccctgcatgctgacaccagagggtgggaagagcagaacggcagtcagttactgtggctggccagaacgctggcgagagctacgggcactggtgcaataacagcagcgagggcgaaacagtga

SEQ ID NO: 386771 - DNA, 267 bp, Salmonella enterica
atgaagggtattgattttgagcggctgtctccggaaaaaatgctggaatttggtgaggccatgatccgccaggcgaggcgtatggaggagatgggcggaacgaaagacgccgtcattaaaaatctgctcccggcactgcaacaggtgaggcaggacaggcacgcggtacaggtggcggtggacgggctgattgatcatgtggccgcgctggagaaaagttttggccggctggagaaaatagcgcgatcggtaacgggtgaggagtga

SEQ ID NO: 386772 - DNA, 1935 bp, Salmonella enterica
atgacttcaccgataaacggcgggtcacgcacgccctcaacggcgtcaccggaagagcagcagaaattttttgatgatgtaaggcagaccttcgaaagcctgccgcgttttattgcgaaaaaatttaacgacagggtaagcagcgcatatcgcctgaaaggtttcgcgggcgctcagacaaagtttagcgacattatccgtcacgatttgcgactggtggagctgactcaccaggtgtacgccatcgcgccgggtgagttaccggggtatctgtttggcggtctggcatcagacaacgcctatggcgcagtccgctcgatgacattccggtttaatgcgctggtggacggtgacgaaagcgccaccgcgttgctggcgcaggatctggctgaatttctttgtgacgaggtggaacaccttaaccgcacgctgcgggatgaaagtgcgtcggaactgctgggcgtgctctacagtatggcggcgggtatcgcggagcactttaaagccgatcctccggagtggagccgtttcacgggtaaaaagctgacgctggaacaactaaaaatcgccatcagcaaaatgctcagcgtgcggttctggtcccgtcatttccggacatttacccgccgctggcgcgaacacctttatattgctgtgggtgacgtccgccgccagcgatctgttatctgttcgccgcagtgggttcagcactggctggccagccgcaaacgtgggcgtgaaatcatggcggaaaccgaccttgaggacgaggagaccggagagacgttaccgctgttatccgctgtggacgccagcgtgtcaaataacgaaaagcgtcgtgctgaaatgctgacgcgtgtgaagggactggaggaactcgcggcgctggaccacatgtcacaggacagtgattacgtggcgctgtttttcacctggacggcacctcagcagtatcacgcctggctggaaaccggacggcgcaaccggaaatggaacggggcaagtccgagagagacacagcgctattttacccgcacctttaagaatttcagtaccgcactgacccgccgcgatattcacatcttcgggatgcatgtcactgaatctcaccatgacggtacaccgcactggcacggcatactgtttgtccgcagggagcaggaagcgacattacgcgatgtatttgaggggtatgccaatgcggagaactgttccgctcacaggccgggaaagccgccggagcagtctcagttgatgattaagcctgtcgataagcgaatgggcagcctcacagcctacatcaccaaacatatctgccggaacctggagggatgcgctcccggaggcagggataaggaaacgggaaggccctggacggagctggcgcgccattctgcggcgtgggccagcctttggggaattaagcagtttcagtttactggtggtccgcctgtgtcagtgtggcgtgaactgagaaaactcagcgatcagaaacaggccgacagcgttagccctgttttcggtgaactgcatcacgcggcgggagcaggagactgggcggagtatacccggttgcagggcggactgccggcagccagaaaaaacctcaccatgcgcacctggtatcaggcggccagtgagccggacgagtgcggccagtacaccgccatcattaaaggcgtttatctgccggggacgggtaaagccccggtagcgacgcgtacccgcaaatggaaagtaaaaacaccgcgtcagaacgttaaaccgggcttcatgaaaaaccgcaggaagccagctttaacgccctggactcgtatcaataactgcactatgcgcagaaaacaaccagtggatcacccgccagatccttacctgaaaatcccgatccagatggaactggatttcggggagatgaaaaaaggtgagtgtaagtga

SEQ ID NO: 386773 - DNA, 222 bp, Salmonella enterica
atggcaaaccgcaaacagtgccgcgcgcaggctgcgcgcatccatacgcaaaccgaaatcaaccgccgtctgttccgcgccggacaaatatccgcagtcatgcgtatcaatatgctgtctgacgacgcatacaccatccctccgctatatattgcatctgtctttagctatctggctgacgatctgcgggaaattcagaagctggcagaaactcagggctaa

SEQ ID NO: 386774 - DNA, 180 bp, Salmonella enterica
atgtacaaaataaccgccatcgtcaaaaagccgggtaattccccgacaaactgggttcgtttttctgacaaaaaaatgaataaagccgagtgtgaaaaaatgctgtccggcagaactgaagccggaaaatcacgcgaagagaaagtcacgctggaagagtttaaatgtattaaggaataa

SEQ ID NO: 386775 - DNA, 234 bp, Salmonella enterica
gtgaacaatccattttttattaaatgcctcaaagatacagaaggatggtggactgagggcgagatttacgaagcctgcatggttgacggtggttttgtgatgtttggtgatgataacgatccgaacgaaaaagaatggagcgcaacccctgtggaatatcgtgaagatggttcgatcctttatcagattggcgggattgaaggtgaggttttgtttgaggaggccgcccaatga

SEQ ID NO: 386776 - DNA, 363 bp, Salmonella enterica
atgggtaaaaattacactccggcgcagaaagccgaaatacagaagcgcctgacggagctggtacgaacacacggtcgtataacgtttggcgagctgcgggagatggcgggactaactatttttacgacccgtcactacctggaaaaggcggaacgttgcggagaactgtatcaggccgggagaaacgggatttttccttcagaacgagattttcgtatctggatgctaaagcgggacggtgtcgggggaaaaccttacgacagaagccggaattcagtctgtacggagtgccggaacagcgaggcggcgcagcgtgtgttgacattttatcggggatatcaacagggagtgatcagcaaatga

SEQ ID NO: 386777 - DNA, 741 bp, Salmonella enterica
atgagcaatgaaacggtacttgatgcactgaaggcaatgggcaaggcctcataccgtgaagtcgccgcgcgcctgaaaattgaaccggttgaagcgctgaacatgctccgcgaacaacgtgagcagggtttatgtgattttttcgatggtggatggaaggtctcgggggatgctgacaaaaatcctccagtgtcaccagctccagtaaagtctgttttacgtgcaaaaaactcaaaagatgcacctgaaaaaccgctgcgcggtgagtttactaaaccgatcaaacctgaggttatcgtcgcactactgaccgaaaatggggatatggataccgttgccctggcggcggctgtggggcgtgatcccagaggtttggcgtcaaatctctgcctgatggcccggcgcgggcacataaaaaaaatcggtcaggggaagggcgttaagtgggggcttcctgacgaggtgtacgcttccgcgacaccggagtctgccgtgctgccggaaatcaggattacgccgaaagttaccaccccgacagctaaagcagttcagttgataccgtctttcactgaaaaacgaccagaccatgtgattttcccctccctgcatgtggcaaatcgcgaattgcgccgggcgaaaagtcacgtccagaagtgggagcgtgtttgtgctgcgttgcgggaactgaataaacccggtagccgcaggttgctggcgcagctttctcaacagggggagtga

SEQ ID NO: 386778 - DNA, 2151 bp, Salmonella enterica
atgagtggtttattaccgtatttcgtgaatctgcgtgccaaagtgaaatccggcctgaaagatgttgttttctggataagcgctaaatcagacgccagagcattgcgtgaaatggaaaacgcgctggaagatgcagatatcaaacgcagtgcatttttcaaagacgccgttattaccggacttcctgtatataacgatttaccacaagagggtgaactggatttcacctggtgcgaacgctatgtattcagtgatgacactggcacctggttacccgtcgtgccggcgcaaccagaatccgccgacagcgataatgtcagcatcggcgaggagcatacagatgaaaacgccaccgataacaccgattccggcgataccgccggcaccagtgataaagtagtgggtagtgaaatggccacgggtacagtcccatcctgggatgtgaatgttaacggcgaaccgatggctgatgttgaaaaattgatgctgcatcctgttgccacgctgagcgaacgtcatcgcatactttctcagttcattcttgaagataaattttcacgtcaaatcacaccggaacagcttgccgaagtaaaccgccttgagatggacattagtaataactatatccaggacatgctgcaggcctgccataatgtaccggccattcaaaagctggacaccccagacctgtggaaatttactgacgccgttaaacgaattttcccgcaggacaaacaatccgccctgtatttgatgacggattttgcacaggcatttgctaatacagaatacattgatcgtggactgctggttaacgagtggtgcgcaggcagatacgtatcccgtattgagaaaccgacagcagccagcgccagcgaagtgccggcgacacagaaaaaaccggtagccaaagcggtggaagtggagtacccacgtcgtagtgaaaaagccacacacaggacgattaatattgaaatagccagcgccctgataccggaggccgatccctgcaatttacgccctgtattaaatcaggccaaagatattattcactcagaccgggaagactggaaacgttggtcggctacgctcagcattatccctgaaatcaagacatacagtcgtcagactatttttgacgtgatacgcaaagcgccaaaagccgtgcatacaggtaatccggatcttcgccggacctggtgcgaaagttttcttgtcgttcatggcattcgcgatccggactggtacgagcatgtgcctgataatgtccccacaacccatgaggaaaacaccgcccgggttcgcaaggcgggtaaatgtctgcgggatattgaggcagggagatttctgtgtgatgaagaagaaccgcaatcagcaggcgcactggcagatgagccggcagcgcctgaaacagtggaaccggacgcaactgaacataatcaggatgcgcagccgctggatgctcagtcacaggtagaccccgttgaagtggcataccagaaaaaacgggcagaactggaagaggcacgtaaaaacatcccgcccaaaaatccggtcgatttcggtaaacaactggcagccgcccgcggtgaatatgtcgaaggcatcagcgacccgaacgatccgaagtgggttcgtgacgactacagcgcctcaaataagggcgaaaaaacggaaaatgaggatgccgacgatgtaaaccagaatgacgatactgccatccagaacaccgattctgtaaaccattctgaaccattcgctgaccagatcgaaccagaagtactggaaaccgaacccaaaagtctgcaacccgagccagtaaccaaagtcgccgatggtgtttttgatgcgtctgcattctttgcggatacctcaaatcagggcgaaaaaacggaaaatccgccatcaattaatgatgaccgtccaacagaaatcaaagaagagaaaaatactgctgcatttgatcagaatggccccgtactggaaaaaatcgcccgtcttctggaggtaaataaccagttgctggaaacgagcatttcacatcagtttgcggcattcaggcgtcgggagaaattcctgaagtcattagttctggcgcttacaacctgctgcgaaaaccacaacacggaggacgaaaccgatgagcaatga

SEQ ID NO: 386779 - DNA, 243 bp, Salmonella enterica
atgaacacactaccagagacaatcccacgcaaatacaccgaaaaagaggaaagagtgcttgaggaaaatctgacgcctgaacagcgccttgtggtgtgcagggtttttaaaagcgtcagcactaagggtgtcagtaattccagacacaataaaagaattgagtttgtggaatatctggaaagttttattaacagggttacatggctggcgctgactcagagagaaaaggagagattaagatga

SEQ ID NO: 386780 - DNA, 582 bp, Salmonella enterica
atgaacaacgtaatgattgatattgaaacgctgggtacaggtcatcacgcgacaatcatttctgtggcgctggcggtatttgaactggcaaccggtaaagttgccgcagaaaaatacatcaggattaactggaaagaagactgcgaaattcgcggaggaaaaatagaccctgccaccgtgacatggtggctgaaacagtcgacggaagcgcgggtggagttgattaccggtgatgaccagatacttcccgatgatgcgctgatgcaggtttttgagtttatacggaaacattgcgatgaaggaccggtttatgtctggtcaaaatcgccgtcgtttgatttgtcgctcattaaagacgcggcggaacgctgctgtatcccggcctccgaaatcccgtggcaattctggaatgaacgcgatgttcgcaccattgaagggattgccgccctgctgagtattcctcttccgtacggcaaaaatgacgtaactcaccatgctctcggtgatgttcgcggacaaatcaggaatgtgacagcggtaatgagtgctctgctggtcggatatgaggcaacagaggtgtga

SEQ ID NO: 386781 - DNA, 129 bp, Salmonella enterica
atggttcttcgggtaaatgatttctgggttttatttttcggcgacagcatggcgtttttcgattgcgaagccgctgctgttaatggcttgtcccgttatgcggacagagtaattaaggagcataaataa

SEQ ID NO: 386782 - DNA, 963 bp, Salmonella enterica
atgccaggacaatcaaaaaagagcttgaatcaggtaattgccgggtgttacatttttcctgccgtcacagtgctgacggtcgggtgtggaagcccgttgcagttaccagcgacttcggacgctttaagcgtcttttttgttgtcgcagccttattcgccatagcgcgtcattttatggcgtggtgtatccataccgagtgtacggcgtaccagattgtcgtacacagcaggatgcatcacgtcaccatgtcaatggtagctctggcggggccgacttcggtcgggccggtttctggtaacgccggtacttccaccctcgtcagggctatcgccagtaagtgtggaagcttctgcgatagcatgattcagtgttaccagaggctgccacaatggctactaccccaaccccaaaacgcccaaaatccgcgatcccccaactcagttacgactgtcgtcgtaagcgtcggtgttcgcgtaaaaaacacagtaaaaaatcattgcgccgatctcgcattacgggatatagtcacagcgttgctgcaaattcagcaaccgggcttcgcatcccgaacgataactcggcgccagaacacgccgcaaaagcgtgttttttgttgcctgatgccccacgttcaatggcggtacgggcgggagcttcttcggaggcgccgggttccgagttacctggtaatgcgaatcccgttcgtgctgccaccaatggcttcgcatccgttgatggtagtgaaaaatctactaactcggaggctgccacaatggctacgaccccaacctcaaaacacccaaaatccgcgatcccccaactcagttacgactgtcgtcgcaaactggaccgcgcaaaattgctcgcactacacctgtacatcgatacgctggagagtgatcgtcttcagttatgcattccttatattttttcctgcatccacgacgatattaaggctgtag

SEQ ID NO: 386783 - DNA, 192 bp, Salmonella enterica
atgaccagtacgttaatcggcttcgttctgttgttcagtccctgcggtaaagatgcctgcgagtgggtgccggtaactgaaaaaatttaccccaccgtgcaggcgtgccagcgggtgatggacgaactgaaagtgcgacagccgcactacgaatttagctgcggtgaggtttatcgcggggaagagggctaa

SEQ ID NO: 386784 - DNA, 198 bp, Salmonella enterica
atggaaaaagacgagttaaagcattttcgcaaaggtattaaagacgttcagcgcatgttgacagttgccgcaaagcgcctgaacgacggacgctatgaggcagcagtggagtttatgatgggcgaggcggcattgttgcagaagctggccacagagcttcggtccgttattgaagacggggagcggaaaccgcaatga

SEQ ID NO: 386785 - DNA, 213 bp, Salmonella enterica
atgacgacgctttccaattctgaaataaagttgattgctcacgacatggttatccgggaattaatccttgctcttggagaaaaagaattagcacgcatacagggcaatcttgataaagtcttccagtgtatggattctgataattcattaaataaccaggacatagcaaagcttaaagagaccgttaactttatgtttctccatcgctcctga

SEQ ID NO: 386786 - DNA, 366 bp, Salmonella enterica
atgtttaacgtgaagcgtaatggctccagtgtggaaataaccgacgttcccgccagtgttccgaattcagtatttaaggatattgccgatgaaactggtgccggcgaatgcctgatcgcttacgtaaaaggtcaggataactacgaggtggttattcgtcacgataacgtgaatatggctggtgcggctgtgtggctggcgctgaaggcgtcggagaaaatatctcaagcacacggagactataaacgatctgcctccgtgcgcgagagcgggcttatagaagcggcaacaggaaaagcgtcaggagcgatggagaaacataaagttaacggtctctttaagctttgctatgtcctggttatttaa

SEQ ID NO: 386787 - DNA, 531 bp, Salmonella enterica
atgcagaacgttagtgcagaggatgtgttatctgaatctggtcaggctgacaaagaaacggggggattggaggtgggatcggaatccccacagcttatggatttgataaatctgctaagtgcattagacccgcaatcaccacaggggcgcaaaaaatccagattgcgtcttgaggggccgattgcggcagtggctttcctggacaaggccgcagcatacgttggattgacccgcgaggcgttggctacagctttaaggcgtggcgaaatgcccgggcataaaaaaagaaaaaatccggaagacgagagttcgggaggggactggatatttaacgttaaggcctggaatgaattagcggatcaactgccggaactggagccgccagaatggcatcactggaaagattactggacgtatgaccgggggagccgaaagtttcagcgggtaaaaaaagaggattgtttgaaggtgaagggtaaacgcgtctataaaccgcgaaaatcaaaactggaacaggctaacaatatttaa

SEQ ID NO: 386788 - DNA, 342 bp, Salmonella enterica
atgactacgtcgtcaatagattattcgaaaaaattacgtcagataagagaggctgagggactcacgcaaaaacagtttgcggaattaacaggcctggcgattagcacggtcagaagttacgagggggttgggcaaacagccagggctgccatcgtagaaaaagtcattcaagtggatcgatttgaaaaatatatgttttggcttatgaaaaacaagacgttaccttctgccgggcaaatcgccccggctctctctcttgatggctcagaaaggcctacggaaagtccggatttagctggagacgttcaaaaattacgccgctcacgccgcagtgctggctga

SEQ ID NO: 386789 - DNA, 828 bp, Salmonella enterica
atgagtttgccatgcgagattttttctacggttcatcgcttcgaaaattattatattgacgatatgcaatatggcgatatggatgatggcgattttcagcagctggggttagtagatatatcgatgcgggttgacccatttaagtgtttgcagtttgaaacgatgtattcatttaacacacatgctttggacttcgcccctcagaaactgcaagggagaccgattagtcgccagcaatgtgcagatattatgtttgatgagatgaaagagttgtcttcgcaattcgccagcgggcagtatgcccctcttattgggaagttgattgatcattttcattatggcaacgggcagccatggacagacgaacttctgaatcgcgcatatgctgagatcattagtggcattgggacgaacgatgtgttaatgaaaattcgggatgagatcaataaacaattgcatagcaaacgggacgcacgcctggattatttattctttgcaagacttaaatctgtgatgcaagattctaaactgccaaaattcaaccgttatatcgacagggtaaatggtttagggatcagcgtacatgatatctatgcccagaaaataaagttgatgagatttcagcgttatgcaaagtcgtgggaggggactcttttctttaaaggccaggaccattttggtctcggtaaagaagatattaccaatgtgctctataaaaatttccgcttcttccgtatctggtttttcctgcagcatcattgtgattatgcatacaaaccctttatgactaatttaaatgctcatgcgcatattaaggggagcatatga

SEQ ID NO: 386790 - DNA, 525 bp, Salmonella enterica
atgaattcgaaacgtaacgtcatcattggtggtctggtgttgctgatatgcatttatctcctctggactcaacgacctgtgaaaattcttcgggctggagagagatttgagtatgaacctccatttttgcatggtcttaatgtcagcagcaaacgtggttttatagattttgaggtttatgatattgccgttaaccaccttgcattaaccgagtggggacgaatccactggtatctgcagcacaaaaacgagctaaaagcaaaatatcgaatccctacaagcgcatcttaccatattgtcttttgggacatcggaggcggttttattgatggcgagaaatcaggcgatagtgatctgttttgctttccgccacagaaaaacacaaacgaaaattgtattgaaaaaaatatgctgctaagtgtggattttgacgcgggttcttatgaacgattttctttcggtgatagtgattattactggattactatgccggatggcaaacttgtaagaataaaaaacgcataa

SEQ ID NO: 386791 - DNA, 345 bp, Salmonella enterica
atgaccggagacttcgaaactgacgtcgaagtaatctttcaaaagaatgagaacggatttattgtctgctcgtcattaaaaaaacagtatcgtgatattttgcgccagggcagcccaaatgtgcattttctgtggctggatggcgattacgagactattctggcgcccatgcagagtcgggctgggcattttatgcccgtggcgttgttcaaaagtcagtttgatgcgctggagtgtccgcaggaggatgaacacgatattgcccgcatcgacgtgaatcacgacatcgaacatgtgacggagcagtgtcgtcaggcgatgctggcgtttcgtcacggacaataa

SEQ ID NO: 386792 - DNA, 1251 bp, Salmonella enterica
atggctctcacggatatcaaagttaggactaccaagccctctgacaaacccttcaaacttactgatgggcagggtatgcacctgctggtcaaccccaatggttcaaaatactggcgtttacagtatcgctttaatggaaagcaaaagattctggcattaggtgtctaccctacggtgtcacttggcgaagctcgcagaaaaagagatgtagccaaaaagttggtatctgatggtatcgacccttctgagaagaaaaaagcagacaagatcgagcaaagcgaagccctgacattcgaagctgttgcaagggactggcatactgcctgtaaaaggaaatggtcagattcccatagtgagagggttttaaagagccttgaagataaccttttctcttccataggaaagagaaaaatagccgagcttaaaaccaaggatctcctcgttccgatcaaggttgttgaagcttctggacggttagaagtagcagcccgtctacaacaacgaaccacagcaattttgcgatatgccgtccagaatggcttaattgactataatccggcccaagaaatgtctggggctattgctgtagcaaaaagaacccacaggccagctttgccattcgaacgattctcagaactcttagaacgaattgataacttcaaaggtaggaaactcactaagttagccgtaaagctgacattgctcattttcattcgttccagtgaactcagattcgcaagatggtcggaaatcgatttcgagaatgcaatgtggactattcccgctgaacgagaaccactacccggagtgaaacattcgcaccgtggttcgaaaatgcgaactccacaccttgttcctttgagttgtcaggcattggctgtgttgacggaaatcaaagagatcagcggtgatcataaactcgtgttcattggcgaccatgatttcagaaagcctatgagtgaaaatacggtaaacaaggctttgaggtctatgggctatgacacaaccgtggaggtctgtggacatgggttcagggctatggcttgtagtgccttgattgaatccggtttgtggtcgaaagatgctgttgaacggcaaatgagccatcaggagcggaactcagttcgtgctgcctacatacataaagcagagcaccttgatgagagaaagcttatgttgcagtggtgggccgattaccttgacctccttagaatacgacaagtttcaccatttgattttaaaaggatttaa

SEQ ID NO: 386793 - DNA, 816 bp, Salmonella enterica
atgaaagtagtaagcccttatgaagaattaaaaagctggtttagtctcgaaaactatgagcagttaaaatcacttacaatcaaagaactgcatactgagcttgcctttagagaagcgattttcgacagtgtaaattttggatgggaagatgataatcaaaatttaagatctatccttgaaggtaatcctattttaagcacacaagataataatcatggtcattttggcaagggccaaagacatgttgcgcaggttagcttcggtgatataaaaaaattagagaacaagttaataatgtttagcatggatttttttgaagaaaatggcgatttcaaaaaagagttgaaaaagaagccaataacaaaaactatgagagacttttttcttaaccaaaatagcagcaagatatatgtttcatttgatttaggaatgtccagcgatgaagaaattataacagccttacaaacgatgctacccattctcaggaaagaatatgaaattgagccagtaaaaacagaaaaaattggactggcaaaaataagaaagcttgtcgattacaatattattccaatgatggatctattgatttgggcaaagtttaaaaaagtaaaaatctcaaatatggtcttgtctcgtgtcttgtatcccgactttacaagtgagatcagaggagaagatcacattaaagatacaggcaggcctgttgcagagaagtcattgaatggagaaacaacccgtagtctcgaatactttatcagcaaaaacagccatctcctcaacataccgatttctgaactcggctctttctatttgtaa

SEQ ID NO: 386794 - DNA, 207 bp, Salmonella enterica; identical to SEQ ID NO: 176215

SEQ ID NO: 386795 - DNA, 528 bp, Salmonella enterica
atgaagggaatgcagaagatcaaaagagggaaaagcttctcaggtgtggctctctatgtgcttaagctaggttcacatcataaaagcgatccagtcctaattggcgggaacatgttaagtggctctgtttttgaactgatttccgaattcaatgtcacgaaacagcttcgtccagatgttcagaaaccggtttggcacaactcgcttcgcctgcctagtggagaatcactaacgtctgaaaaatggtccagtatcgcagatgactatatgaaactaatgggattcagtgatactcacctccgttgctatgtcctacatgacgattctgccggtcagcacatacacattatcgcaagcaggatcgacctcaatggaggaaagctttaccttggtaggaatgagaacctcataagtacccgcataatcagtgaactcgaaatcgctcacagtctgacagtgactaagacagcccattccattacaccgaagcaatcgaagcggaaaagaattatcattatgtacacctaa

SEQ ID NO: 386796 - DNA, 396 bp, Salmonella enterica
atgaatgatgcaatttttgataaagattcttttaaaagcaaaagaggaaaattcggcgtaaagttattacctaagcagttaaaaaggacacataatgtgagtgtaagatttaatgacgaagaattattaatcttagacgataaaagatacggatataatcgcgctgaatggcttcgcatggctttacttcaaaacttcccttttgccattcctgaaattaatttagaggcatggcaatcattgtctgatatatcccaaaagttaaataagctgataaatcatctggacactaaaagcagtaatagtgagttaacgaaaacagagatcttcgctataaaaaaacaaattaaagagcttcggtcatgtcttacagcttctgagcccttctcaagatag

SEQ ID NO: 386797 - DNA, 573 bp, Salmonella enterica
atgacgtttaaaatgagcgataaagcgcagacaattaaaatttataatctgcgttcagatactaacgaatttattggcgcgggcgatgcgtatattccgccgcataccggattaccggctcactgtacggatattgagccaccggaaatcccggcaggaagcgtcgcggtgtttgacagcgaaaaaaacacctggaacgtcgtcgaagaccaccgggggcagacggtatacagaacggataccggggaggcgatctggatttctgaactggggccattaccgggaaacgtgacgaccatttccccggacggtcagtatgaaaaatgggacggtacaaaatgggtgaaagacgaagaggcagaaaaagccgcccggcttcgtgaagcggaggagactaaaaaacgacttctgcaactggcgacagataaaatagccccccttcaggatgcggttgacctggaagaagcgacagacgaagaaaaagcccggcttaatgcgtggaagaaataccgtgttctggtaaaccgtgttgatacgtcaaaacctgaatggccggaggcccctgtagcctga

SEQ ID NO: 386798 - DNA, 1272 bp, Salmonella enterica
atgaatgattccatttataaaaaaataagatggcaaattattgtaaccacgtttttaacatacacagtaatgtatatatccagaaaggcctttgctgccgcagccccacttttaatgcatgatgttgggatgactgctgtgcaatttgggacagcatcatctatttattacatactttatggcgtatcaaaatttggttctggattactggctgacagaattaatcctcgggtatttttggctccggtattattggtcattgcgatgatcaatgttggcatcggtatgtgcaataacgttactatcctgctaacattatattgctttactgcaattgctcaaggatgtggtttccctcccatagccaaggcaatcagccagtggtactcaaaatcagaaagagggggatggtattcattatggaacacttcgcacaatgttggcggcgcgcttgcaccgctcatcgcatcagccgttattacttatactggtaactggagatatgcttttttcgttccagcatttattacattagtacaagccatcatttccgccattttcatgcgcgataaaccagaaaaatacgggctacctaatgttggcgtttggaaaaatgacaaaaaacagcttgagctaaataaacgttccgaagccggacttaccatttggaaaatgttttgcacttatattttaaataacccaataatctggatagcaatctgtggagatttatgtatatatgttattcgaacagtaaccgatgactgggtaagtgtctattttgtaaaagtattgggctggaatttaattaaatcaaactcacttgttgcatggtttgaagttggggggattttaggtggattaacatcaggaataatatctgataagttttttcatgctgacagatgggtaaccattttgatttatactatagttttattgcttggaatgggaagtgtaattttaacaattaatattcattattacttggtcgctatatctttttttattattggtgccggaatttatgccccccagatgttatttgcattaggcgtcattgaagcatcacacactgatggggccggtgctgcaacaggactgaaaggtggtgtaacttacgttggagcagcactcgctggggcacctatcgctatgatccaaaaatattactcatgggatggtgtttttggactactcgggataatcgcagtaatattgattatactgactgctagcctcattcttatagaaaaaagaatccggaattga

SEQ ID NO: 386799 - DNA, 1314 bp, Salmonella enterica
atgagaaaaccaagtcccatatcaacaatcgcctttttattattcatattatttgttacgttattcattattcttcctgataagaatcatacatttataaaacttacccctagtgtaaatcatcaaattttactcgtcgccttatttttcataaatataattatatccatcttcatgtttatgtcattcatcataaataaaaaagataattctgtctttcttctcggcctgtcattttttagtgggttagtctacttcactgaaacaattttcattatacaaaaaaccgcaaatgaatttactgaaatacaaacaaactcagagcgaatcgctgtcttctattttttcagacaattaaattttgtgctattattatcccttgctgtatatatatcaaataacaagcctgatttaaaaaacgctttcaaggataacattacccttattttaggtatagtaacaactatcagtctacctttaatcacatattatgtatgcaactctcaatattatttatttctcaaaaataatcttctaattaaaaacgaattggaatgggaaattgtatgtataaaatcagtcattgcattatggtcactgctgcttttatctgttacattaagaaaagtaaaattagaacataagttttatacttatatctctttattatgtttcaccagtatcttatgtaatatcattttacttacatttaatgaggctaaatatcctgtatggttcattagtcgagggatagaggtaatgatgaaagtattcatagtttcattgatgatgtttgaaagccttaaaaacctaagacgttctaatataatggcttttaatgatgaactaacaaacctacataacagacgatactttttcaaagaatatcattctttacttgaagataataatataaaacaaatatgcataattattatcgatattgatcattttaaaaaaataaatgacacctggggacataaaacaggtgatattgttattaaaaacacagccaacatcataaaggagaatattcgccctgacgatattcttgctcgcttaggtggtgaagagttcattatattattatacaatttgaatattagtgcagccagaaaaattgcagaacgaattagggaaaatgttgaagcctctgtaaataatacaattacagttccagtaaccgttagtgttggtctttgtttgttaccaaaactggattgttttcagctagatataatctccttagcagatcaagctttatacaaagccaaaaattccgggcgaaaccaaatatgtgtttatcagaaataa

SEQ ID NO: 386800 - DNA, 519 bp, Salmonella enterica
atggcaaaagaaaccgtgataccaatgctcgctattgccgcgtggagcggtacgggaaaaacaaccctgctgaaaaagttaattccggcattgtgcgcctgtgggattcagccaggtttgataaagcacacgcatcataatatggatgtggataaacccggaaaagatagctatgagttacgcaaagcgggtgcggcgcaaacgttggtcgccagtcggcaacgttgggcgttgatgacagaaacgccggaagagtcggcgctggatttagcgtatctggtgagtcgaatggatacgtctaagctggatatagtacttgtggaaggtttcaaacatgagacggtcgcgaagattttattatttcgccaggacggcgggcatgacggggaagatctaacgattgatgagcatgtcattgcggttgccagtgatgtgccgctccatatgaacgtgccggttctcgatcttaatgatataccgcagatcgcgacgtttattctgcattggttaaaacgataa

SEQ ID NO: 386801 - DNA, 144 bp, Salmonella enterica
atggcgctggaaaaaggtattgcacaacgggtggaggcgtttattgatcgggacgcccctctgttcgtcatcagaatattgatgaccggagagcggcacatgtcgccagtacagtactggccggagagaaagaaagtcgcgtag

SEQ ID NO: 386802 - DNA, 312 bp, Salmonella enterica
atgatattcatagaaacggaaatctttaccgaagacgtcaaaaatctgttggatgacgatgagtaccacagattacaacttttccttgcgatacaacctgatagtggtgatcttatacaggatgccggtggtttgaggaaggttcgttggggcgttcggggaagggggaagcgtagcggcgtaagaatcatttacttttaccgagtcagtcgatctgaaattcgcctgctactcatttataagaaaggtattaaagatgatttaaccgcgcaagaaaaagcggtgcttcgtatgttgaatgagaggtggtag

SEQ ID NO: 386803 - DNA, 291 bp, Salmonella enterica
atggataaagcgttatttgaacgtttaacgaaaagtatgtctcaaatgaatgagattgttgagggagcccgccagccttcacgcaccttttatattgatgccatgaaaattaaagaaattcgacaagcctctggattatcacagactaaatttgcagatttaatttccgttagcgtcgatacgttgcgcaattgggagcaaggccgacgttcgcctaccgggccagcaaaagccttgctgcgcgcgatcgctaatgaccctgaacatgtgatacccgcgttgggctgttaa

SEQ ID NO: 386804 - DNA, 519 bp, Salmonella enterica
atgccaacaccatgttatatctcaattaaaggacaaactcagggcctgattactgaccgggcctttaccgctgaatctgtcggcaatatctacgttcagggacacgaagacgaaatgctggtgcaggagttcagccacaacgttaccgtcccgaccgacccgcagtccggtcagccgtcaggccagcgttcgcacaaaccgtttatcttcaccgtggcgctgaacaaagcggttcctctactgtacaacgcgctggcctccggcgaaatgctgccgaccaccgaactgcactggtaccgcacctctgtggaaggcaaacaggagcatttcttcaccacccgcctgaccgactccaccatcgtggatatcgattgtcatatgccgcactgccaggacgcggaaaaacgtgagttcactcaactggtaaaagtctctctggcttatcgcaaaatcgagtgggagcacgtctccgcaggcacctctggcgccgacgactggcgtgcgccgctggaagcgtaa

SEQ ID NO: 386805 - DNA, 279 bp, Salmonella enterica
atgggtaatgatagaggcggaagtatagctcccaaagagcgtattaacattcgctacgtactgaggactgatggccaggcgtcagaagtggaactcccgctcagcctgctggtaaccggggatttactgggtaaacccgacgacacgccgctggatgaacgccagcccgttgccattgataaaaatacctttaacgccgtactggcgcagtccgggattgaacgtaacgtctctgtgccgtcggtactcagtggtatgccagccgccagatggatgtga

SEQ ID NO: 386806 - DNA, 333 bp, Salmonella enterica
atggatgtgatccttcatgatccggtaattcaggagctggaagcgctgttacgttcactgaaactgctggttgaacgcaccgaaccgtgtgaaaacatcaaaatttatctgctgcacgccactaaagaagaactgctggataattttgagttcgccccggaaatcacccagagcggtttctataaacatgtctactccaacggttacggccagtgtggcggcgagcctgtcgcggcagttatcggcaactatgcgtttcaaaataacgcagcggatctgaaactactatctgtacgaagcaatggggcagctacaggccttgtgcatcggtaa

SEQ ID NO: 386807 - DNA, 195 bp, Salmonella enterica
atgcccggcggcgctgcgcttaccgggcctacgagtgcaggctggataaggcaaagctgccacccggcagaatgctatactcacttgaacccgtatgaattaacggcgataattcgccgcaatagcgatttacaaatcaatcccttcctcgtcgggtttaacgacgcggaggggattttttttcatctgttttaa

SEQ ID NO: 386808 - DNA, 1509 bp, Salmonella enterica
atggaagagaagaaagatgtcatcattgcgcttgatgaaggaacaactaacgccaaggcaatagcgattgacggcaccggaaaggtacttgccagatcgtctcaggcgctggctatcaaaacgccccacgagggatgggttgagcaatctggcgagtatcttgtcgaagcatcgttaaaggtaatgcgcgacgttatagagcaagtgggaaacgagcgcgttgcgggtatcgctatcagcaatcagcgagagaccactattggctggtatcgtaaaagtggtaaatcgctcggttcagctattacctggcaatgttcccgcactgccgaatactgcgaacgtcttcgtaatgaaaattacggtgaaagcatccagtcgattaccgggttgccgattgctccgctattttcaggttcaaaaatgcgttggttacttgataccgtgccgaacgggaatcgcctcgcagaagaaggtgaaatctgtttagggactatcgacagctggctgctttggaatttaacagggggagacgttttcgcctgtgattattccaatgcatcacgaactcagttattcaatattcatgagggagcatgggataaaaatatgctttctcttttccagatccctgaacaggcgcttcctgaaattaagccgtcgagtggctgctttggttatactcgcggcctggacggcattgcggatggcattcccgttctttcgatgattggtgattcccacgccgcgctttatggtcatgctaaaggccaggctggatgcgtaaaagccacctatggtacggggtcttcggtgatggctccggttatttcctctcactcatccatctcatctttggccacaacgatatcctggcatgatggcgcgcatctggtatatggccttgaaggtaatatccctcataccggtgatgcgattgcctggatggccgatagcactggcctgagcgaattgtcatcgcaggaattaacggatgaacttaatacgttaccggctacggttgagtcaacgctgggggtttattttgttccggcgttaacgggcctgggggcgccgtggtgggatgaaaatgccagaggtattatttgtggtttaagccggggtgtcaaaagagcgcaccttgttcgcgctgcgctggaaagcattacttatcaaattgcggatgttgtgctggcgatgaggcaacatgctgatttccagatcaaggcattaatggttgatggtggtcctactaaaaatgattggctgatgcaatatcaggccgatttattgggatgcccggtgatgcgcagtaatattaccgaattatcagcaatgggggcgggattactcgcgaggaaagcgctcgacaatttgagtgacgaagaaatgtcacagttccagtcattccatactgaatttaaaccaaatatggaacgacatggccgtctacaaaaacgctggcgtgaatggcaggtggccgttgaacgcgctcgttggatgcctgcataa

SEQ ID NO: 386809 - DNA, 1470 bp, Salmonella enterica
atgactaaaaaagccaggaaataccaggttgatgtagatctatccacattttaccttacgcccatgaaacgattttattatgcattaggagattatggttataatttcatgtactactggattagtacatacctgatgatatattacacagatacgataggtattcccgcggctacggtttccattatgctgttagtggtgaggattttcgacgcagtgcatgatccgttaattggttcattggccgatcgcacgaatacccgatggggacgttatcgaccgtggtttatggttggttcaatagcattagccattggtattgtactgcttttttctgccagtccatcatggtcatataatatgaaattgtggtggatgtggggagtttatctcctgctgacgatcgcctcttcttgcagtaatatgccttatggtgcgttaaacggatgcattacgccaaatagtgaagaccgggcaaaagtatctggcttaagaatgatgctggcgaatgttagttcaatggtgacggtcattattgcagttccactcattatgtttttttctcatgatggaagtgcaaccagtgctgaaggttataaatgggcggtgattatcacctgcattttaggtctgcccaccatgattctgtcatgtatcaaaactaaggaaattttaactccaccgccaagccagcatcatattccgatgcgggcgcaaatgcgttcgctgttcaataataaggcgataatgatccttatttttggacagtttatcctgggctgcgtcatctatggacgggccgccatgctggcctactattggcaatataatgcgcagaatgctgggtatgccgttacattcggtgtgataagccttgtggccgcgattgttggtacggggtttgtgggcaattacatctttaagaagttgcgtcataaaggtaaaacgtgtgcgatactgaactttattactgccgcagcacttttcattatgtatttcactccggcaccttctgttttattttggatcggtacttttataagtagtatgaccttttttgcctatatgggcgtacatttcggtgcaattggcgatgctgttgattatggggagtatgtttctggtgtcagatgtgacggcttcctcgcttcttttgtttcggtcgcgaataaagcgggcggagcagtgatgccagccgttgggatcgcggttttggcctggctgaactatgtacctaatcatgtcgaggatagcaggatactcgatgctatcaactatttcgttacaataattccagcggtgattagcttattaaatggattaatttatatggcttatccaatttctacagcaggccatgaggaaataatgaaagaactcattaatcgccgtgtaaaacataacgaaatttttgaagggattcaggaaagtcgggatgttcatttcaaggaagaattgaaggctgaatag

SEQ ID NO: 386810 - DNA, 786 bp, Salmonella enterica
atgctcgctaaaaatttttcgcaagaactctttaatttaaatgaacgtgttgccttcgtcacaggggccgggagcggtattggacaagtgatcgcctgtgccttagccagcgctggcgcgaaggttgtctgcttcgatgtacgagaagatggagggttatccgataccattaaacatattgaatccaatggtggacaagcctgtttttataccggtgatgtccgtcaattaaatgatttacgcgccgccgtcgctcttgcggaaaagagctatggccgtcttgatatcgccgttaatgccgctggtatcgccaacgctaatccggcgctggaaatggaaacggaacagtggcaacgggtgattgatatcaacctcaccggcgtgtggaattcctgcaaagccgaagcagaattgatgacaaaatgcggtggcggttcaattatcaacattgcctccatgtcaggcattattgtcaaccgtggtctggagcaggctcattacaattcctctaaagcaggcgtgattcatctgacgaaaagtctggcgatggaatggattgaaaaagggattcgggtcaattctattagcccaggatatactgcaacgccaatgaatacccgcccggaaatggtacatcaaacccgcgagtttgaaagccagaccccaattcagcgcatggccagagtagaagaaatggctggcccggcgatcttccttgccagcgacgcggcttctttctgtaccggtgttgatttggttgttgatggtggttttgtttgttggtaa

SEQ ID NO: 386811 - DNA, 951 bp, Salmonella enterica
atgtcgaaacaggacgaacagcgccttctggtgaagattgcaacactctattatcttgaaggtcgcaaacagtcagatattgctcaacttctctccctttcccagtcatttgtttctcgtgccatcacccggtgccagaaggatggtgtcgtaaaaatcagcgtggtacaaccgtcgaatatctttttgaacctggaaaaaggtatcgaagatatgtacgggattaagcaggcgattgttgttgacgtcgaagaaggcgcatcggattttgccattaagcgtgctattggttcggcggcggcacactacctggaaacccgcctgcgtcctaaagatctggtcggtgtttcgtcctggagttctaccattcgggcgatggtggatgaagtccacgcacagaatctgaaagccagcggcgtcattcagctattaggcggcgtggggccgaacggtaacgtgcaggcaacgatcctcacccaaacgcttgctcagcaactgaactgtgaagcgggtctgctgccttctcagagcattgaaggctcggtggatgaaaaaaaacgtctgatggccagtaaagatgtcgcagatgtcgtttcacgctttgatgatgtcgatatcgccattgtggggattggtattctggagccttctcatcttctgaaaacatccggcaactactataacgaagaaatgcttcaggttttggccgatcggggcgcagtcggtgatatctgcttgcactattatgacgcgcaaggccatgcggtactcgaagagcatgaagatccggttattggcatggaactggaaaaagtcaaaaaatgcccgaatgtcgtggcgctggcaggtggctcagataaagtcggcgcgataaaaggggcgatggccggcggctatattgatgttctgatcaccgactaccccacggccagacggctggttacgcaatag

SEQ ID NO: 386812 - DNA, 831 bp, Salmonella enterica
atgaatccctttaattatgatgtacaggcacttgagcaaaaagcgcgtgcggtgcgccgtcacattatcagactcaatgccgatagcccggcaggaggacataccggggccgatctgtcgcaggcggatttactgacagcactgtactttcgcattctgaatgtttccgcagatcgtcttgaggataaaaatcgcgacatctacatccagtctaaggggcatgcggtggggtcctattattgtgtactggctgaagctggctatttcccgctcgactggctcgcgacctatcagcattccaattcccatcttccggggcatccggtacgacagaaaacgccaggcattgaactcaataccggcgcattaggccacgggttgcccattgccgttggtcttgcgctggcagcgaaaagagataacagctcgcgccgcatttttctgattacgggggatggtgaattagccgaaggcagcaactgggaagcggcgctcgccgcagcgcattacaaactggataaccttgtcatcatcaatgataaaaataatctccagttggctggcgcaacgaaagacattatgaacaccgatccgcttgccgataaatggcgcgcatttggaatgcaggtgaccgagtgtgaaggtaataacatggcttccattgtttctactctggaaggattgaagcaagagggtaaaccaaacgtagtgattgctcacaccacgaaaggggccggggtatcttttatcgcgggtaaaccggagtggcatcaccgtgtacctaaaggtgaagaaattgagctggcgatggaggaactgaaagatgagtaa

SEQ ID NO: 386813 - DNA, 939 bp, Salmonella enterica
atgagtaatgcagaacacttagcgaatgtaatggttcaggcctttatcgacgccgtagagaaagggattgatctggttcctgtggtggcggattccacttcgacggcaaaaattgccccttttgtgaaggcgtttcccgatcgactggtcaatgtgggtattgcagagcaaagcctggtgggtaccgcagctggtctggcattgggcggaaaagttgcggtaacgtgtaatgccgcgccgttcctgatttcccgcgccaatgagcagattaaagttgatgtctgctataacaataccaatgtgaaattgtttggtctgaactctggcgccagctatggccctctcgccagcacccatcattctattgacgatcttggcgtaatgcgcgggttcggcaatattcagattttcgccccgtcatcgccgcgcgagtgtcgccagattattgattatgctatcaattatgatggcccggtctatatcagaatggatggcaaagcgcttcctgaactctatgatgaagactatcagtttgttcctggcgcggttaacacgcttcgtgaagggcaagcagtcgctttggttgcgacagggtctacggttcatgaaattgttgacgctgccaatatacttgcgcaggccggtattcaggcaaaagttatcagcgtaccgtctattcgtccttgcgatactggcgcgctttataccgcgctgaaaggatgtcgttttgccattgttgctgaagagcataatgtcaatggcgggctgggtagcctggttgcggagatcatcgctgaagcgggcgctccgattaaactgaaacgccttggcatccccgatggcgaatatgcagccgcgggcgatcggaaattcctgcgccattatcatggtatagatgctgagagcatcgctgaatccgccatgcaattattgaagtaa

SEQ ID NO: 386814 - DNA, 168 bp, Salmonella enterica
atgggaggactggatcacctgaatgcaaaagacgggaaggggacgctgtacttcgccggacagggtatccagcaacagtgggctataaagcgagaaatgctattactccgatataccacccgctatgaagacctactgacaggtttaattaaatcagaatgtcgatga

SEQ ID NO: 386815 - DNA, 1359 bp, Salmonella enterica
atggaaaacctgtcattcgttctcaagggatgtggattctccgcgcattcagataaaaatattacgtatatcaaacagtcgttattttgtattaataaagcaggctacatcgccagaatcattccgactgacgagccggattacgtcgtctttttaaacgaggccagaaaagccaatattctgcgtgaactaaaacaaggggaatatttgctacccggttttattgatctgcatatccatgcgccacaatggccaaatcttggcaaagcgctggatcgtccgctggaagagtggctacaggagtatacctttcctctggaggcccgctattctgatatggaatatgcccgcgaaaactatcagcatctggttaaaacattactcgccaatggcacaacgaccgccgtctatttcgcgaccattcacagggaggcaagcgttgagttaggccgcatctgcctgcaacagggacaacgtgctctggtaggcaaagtggcgatggatgataaaaacgcctgtccggaaaactatcgcgatgcttcagccttcagcgcaatagaagagacccgacgctttattgacgatatcaaacaactgcccggcaatgataatgcgttgatcctgcccgtcattacgccgcgttttattccttgctgtacaaccgagcttctggaaggtcttggaaagctggcgcaagagactggctgccatattcagacccactgttctgaaagcgactgggaacacaattttgtgctgaaaaaatatagtcagacagatacgcaggcgttaaagcgttttggtctgctttcccgaaaaaccgtgttggcacacagcaatcatataaccgacgaagatatggacattatcaaaggtgttgatgctggaatagcgcactgcccgatttctaatttttactttgcaaacagcgtgttcccgttgagaaaagctatcgacaagcaacttaacgtcggtttaggcagcgatatctcagcgggatttagcccttcgctgtttgatgcctgtcgccatgcggttgtcgccagtaaagcgttgaatgacggcgtagatgcgcgtatttcagcagagcaaagggggtgtcaaagtgcctcgatctcctttgcggaagcattctggctggcgacagcaggcggcggcattgttcttgatttgccgattggtaagctggatacaggctatctttttgatgcgatgatcgttgatacaaacagcgctacttcaaatatttttatttatgaagaccaggataccccacacgatattttgcaaaaaattatctacaatactcaaagaagcgatatatcagtagtatgggttggtggtaaacaagtccgttaa

SEQ ID NO: 386816 - DNA, 291 bp, Salmonella enterica
atgcgggcaaacgtcatcgataaacgcagacctatcgacaaaggcgcgcttgtgccagagacgaaagcgcgcccgggaagtatcagtcaggagcgaaacccggcggaggtcatgagcagtctgaacaccattccgacgcccgccagcaggagcacgctggcacaccatatcgcgaccatccatacgactcgccgcgaccattttttcactttaaccatcagtgatatccctctccatgtcgcacttttccacggaagacgtagtagctccagaaggtataagccagaataa

SEQ ID NO: 386817 - DNA, 801 bp, Salmonella enterica
atggctgtcaggttagtagaagagcgagcacgcttaggttattcacaagtaagctttgcaaatcaactagatatatccagagaagggctaagactttacgaaacaggtcaacgaagtataggtgcggaatttttagccaaagctgccatgttaggtgttgatgtccagtatgttctaacaggagttgaatcacagaacagaaaagatgtatccaagacattgcaagataaagcgctaaacaacgcaccacaaccagtaataaccgtatccccacaaggtacagcaaatgtggttcaatttgctcaggatggttcaacggtaaacattgtttccacccaaaagcatatagtaaacacaaaagcagaagtaaaacctggcgaggaacacataacagaggcccaagcagttaagcttaccgccttagttgcacaagtggttgaactggaagagcgggttaagaaaaaaccagcttcccggcaaagtgtttggggaaaattaaacagccattgtggggttacacgatatcgtttaatccctgttgataaatttgaaaaagctgagaaattcctacgtcagtggattggaaggttaaattctcaacccatggcagccatttcagacaaccatagttggagaattagccgttattcttacattaaaatcaatactaaaggtgaacttgatgaatggaggcaaaactacttatggaaacattttaaggccacaagcttaactgaactatctgatgccgatcttgataaagtttatagagctgtagcctccaaaaggcgcaggaaatag

SEQ ID NO: 386818 - DNA, 231 bp, Salmonella enterica
atgaataaaagtatctcgccgggcgttttgcttttaaatcaagttagagctggatttatttcacgtggttcaacactccatcgctggtgtctcaccaacggtgtgttatatccaaatgcacgtcaagccttgatgggagggtggaacggtcctaaaggggcgctgttgcgagagttaatcatcagggaatcgggcattgttcttggtggagacaaaaaatgtgttgggtga

SEQ ID NO: 386819 - DNA, 2019 bp, Salmonella enterica
atgtgttgggtgactgttttggaattatcgggagtgcatggactcccctcaaccccccgagggattcgaaagttagccaaaaaaagtgggtgggttttccgtaaacgcgcaggctcaaaagcctttgagtaccacatcgactgtctgcctgagcaggcgcgggaaatcgttaagcgccggttccttaatcaggccgtcgcttccgctgaaaactgccagaccagcgttcatgttgctgttaccagcaaggcccgtcaggaactggtgctgatgcagcagtgtccggcgctggccacacgtgaagcgaacaagctgactgagcagcagcgtcggatcgctgatgcacggtgtgtcctggtgcgtgaggttgatcgtctgcgcagtctgggtgaaacccgcgtgggggccgtggcctttatttctgccgagtcccggaaaggttcattgccggagcggttgcagaatgctgtcagcctggccaatgcccgcaaggggaaacgtgctggcgtcagtgtccgcagcctgcaggagtggtattccctgtaccattcaaccagtgatgccacgcagcggctggtgttgctggctcccggacaggtgcagaagctgaaaccggataactgtgcctggtgggtggcgtttaaagcgtattacggcgtgccgaccggtgaatccgcgaaagccgcgtggcgtaagtttaaggtctggtggcaggagcagtaccgcgatcagcctgccgttctggctgccataccctcctacgatgcggtgttgcgtatgctgaaaaaagagccgctgtacaagcgcatgtccgggcgtgtcagtggttcggctaagcgggcgtatgaggtctacagtaagcgcgactggtccgtgatgcccgttaacggggtgtggatttctgacggtaagtcgctggatatgaaggtgttgcacccgatttataaccgtccgttcacgccggaactgacgatggtcatcgatggccgcacgcgcgtggttgtcggctggagtctgtcactggcggagaaccggttcgcggtggcagaggcataccgtcacggcatggagaatttcggcaagcccttatttgtttattccgataacgggggcggtgaaaaaaataaaatgctcgatgacgaagaggtcgggatattttcacgtatgcacgttgaccatatgaccggtattccggggaatccgcaggcacgcggtattattgaacggcttaacggggttatccccattaatctggccagacgatttgccacgtataacgggcggaatgcggaccctgaatttgtgcgggttatgaataaaaaaatggtcagcctgaccaacgccctgcgccaggggaaagaattaaccactgagcagaagcgcacgctgggcctgattccggactggaatacactgacgcaggccgtcgctgaggaaatcgacaattataatcgctcgcatgagcacagcgagttaccaaaggtgaacggtcagcatatgtccccgctggcctatcgccgggccgtgctggaggctgagggggatgatatcgaatatgtgactgcccgtgcactgaatgacatgttcctgccggaagaggttcgtacagcgcggcagggctggattgaactgggcaccaacgactatttcgccaaagaactgattgaggttgaccgtgaaaaagtccgtgtggcgtttaatccacgcgacgcgcaggaagtgtatgtacgcaggatggacggaacgtttgtctgcaccgccatctggaacggtaacaagcgcgcaccagtccccctggccagagtcgaaaaagccatgcaggaacgggccgggcgtcagattaagcgcggtcaggctattatccaggatgcgaaggattcgctgcggccagccattgagcataagtcagaaattgatgtgtccctgctgtctgttcgtccaccagaacctgaacgtaaaaaggtttatttatctgaggctgaatatcagcatgatttaaagaaagccagtaatcactga

SEQ ID NO: 386820 - DNA, 921 bp, Salmonella enterica
atgaacatcaaagaaaaattaatccagttactggaggggaccggctacacccaaaagaaagtcgccactaaaacaggtctgagtactgcggttatttctcagtatctgaaaggtgtttataacggaaatatccggaatgttgaaaacgtactggctgattttattcgtcgtgaagaggaacgagcccggcgtcaggaagtaaaagaaagttttgtgcatacccgtctggctgaccttgcgctggggcttatcagtaatacccatatggacggcgatatcggcgttatttttggccctgccgggatggggaaaagtatggtgctcaggcagtacgccagtaccagtaagggggtgattctgattgaggctgacccgggttataccgcgaaagtgctgctgcaggaactttgtgcccggctgggagtaaaaaagaccggcaatatccatgaactgagcgaggagtgtattcaggagctcaacggtacgggctgggtcatcctggttgatgaggctgaactgctgccctatcgcgcactggaggtattacggcgtatccatgaccgttccggtgtggctcttgttctggccgggatgccccgtctgctgattaacctgaaaggttctcgcggggaatatgcgcagttgtacagtcgcgtggggatggcgctggatattgaggcgcacaaggctgaatcagagaccgatgattttaatatcatcctggccagcctgctggggacggcggtcgggacggattccctgtcatcccccgaggttatcaatgccttcagaaaacactcaaaaggcaattatcgtcgattgttcaaactggcgcggggcgtggtcagggccagtgcgattggtaatcagggaatatcggtgaacctgattgaacgttatgcggaaatgttaattcactga

SEQ ID NO: 386821 - DNA, 297 bp, Salmonella enterica
atggaaatgccaatcagaacactacaggaaatgcctgaaatttacgggcaagcagataaggactggattattcagcagttagaaagactaacaccagctgtacggcagaaagcggttctgcgttatgccgctgtctaccaggaagccttcgatgccgagcctatttcataccgaaaggagaaccgggcaaggcatgaggcaaacacaaggcttcgcctgtttgtgagaaatcagggcagagccttacaggggtataccgccgaacctcccctggcaggatcgcgattgcgatcctga

SEQ ID NO: 386822 - DNA, 249 bp, Salmonella enterica
atgtttacgacaccactacgcaaagctcgactcaatgcaaagatgaccattcaggaggtcgcaacacaaaccaagtgcgacccgggcaatctcagccgcatggagcgaggtattcagcgtccatcactggaactggctgaaaaactagccaagctgttttgtacggaattaacagaaattcagatcctttatccagagaggttctttcctgatggaaatgccaatcagaacactacaggaaatgcctga

SEQ ID NO: 386823 - DNA, 690 bp, Salmonella enterica
gtgaaagtgggacaaaagattcgtgaattacgcaaagcccgaaaaatgactattacgcagttagcagctttgactgactgggatgtaggaaacatttctcgacttgagcgaggcatgcagggctacagtgcgcaaagcatacaaaaaattgcggaagctctccaagtgcctgtatctgagctattttcaactgaaacagatagtgatactgtaaataagtacagtgttctttcactctcacatcagaggagaaatgatgtgtatcgagtcgatgttatggatgtttcagcaagtgcaggcaatggtaattctagccgtgattttatcgaagtaatcagctcgatagagtacgtgacggaagaggcaaaaactcttttcgggcatcggccagccaaccaagtaaaactcatcaacgttcgaggcgatagtatgcaaggtacaattgagcctggtgatctaatttttgttgacattggcgttaactactttgatggtgacggtatctacgtatttgattttagcggggacctgtacgttaaacgcttacagaaaatcaagagccaattgctcgttctgtctgataaccccctctacaaagagtggcaaatcaccaaggaagaaatggaaatgttacatgtttgtggcaaggtgttacttagccaatctcaacaaattcgacgccacgcctaa

SEQ ID NO: 386824 - DNA, 318 bp, Salmonella enterica
atgactatcaaagcaactaccaaaaacttcatccagctcgtagatattaaagacttccgcttcgaaggagattgttcaaatattgattacggcaatatcgctggtgactgcaattcaaaaaccatttctcttctcgaagcgattagccatatcagtttgaacatagcttcgttgagctttggcggtgaagataaaaaagaaaggatcggacaactctctggtgttatttcggatctggctgaattagcaatagcaacgaataaaatatctcagatcgcggcatttctctcaggtgcacaaggtagcaatcatggctga

SEQ ID NO: 386825 - DNA, 168 bp, Salmonella enterica
atggctgatatttctttagaacaagcaaccgaaaaagcatgtcaggtcgaaagtctgttacgaatgttcgaaagctacccggacacgttgagcgaaacggaattatcatctgtaatcactttaatccgtcgcttatctggtgaagtacatacatggcttatcgaatag

SEQ ID NO: 386826 - DNA, 186 bp, Salmonella enterica
atgactatatctttaatctcagccagaaacagggtaaaacaggctgaagctgtgcttgctgcgtggcttgaaagttcaagagatgattacgaagcgacattaatatcagccatcatcactctgatcgagggtgtagaagaatcgattaaagaagcagatacaaaactggatagtttaattaaataa

SEQ ID NO: 386827 - DNA, 210 bp, Salmonella enterica
atgtggaacccggaagaaaatgacaatattgaagacgcggcgatctccgccagaagtcttaatgaactactggatctaatgtacatcagctttaaaaaaatgaaccatctccagactgagagactcctgggtcttgccctcaatatctcatcagatatttctttctggatagacgaagaggagaagcgccgtgaaaaacaacacaattga

SEQ ID NO: 386828 - DNA, 360 bp, Salmonella enterica
gtgaaaaacaacacaattgaaatttaccgtcgtcgcattgcaattgctgcactggagaggatgaagcataagacaggtagcaactgtgtcatcgttaatatgcccgatggtgatattcagaagatagactttgacgaaaattcgattatgaaactgttaatgcgttttgaaagacaggcgtgcagtgaatacggaatttcagaatccacttcttttattcgcagtacgtatatgaacagccttgatattaacgggcatacggaatacctgaccgagacaggaaaacttattgttgatgagttactcggtgaagtcattgcctgggcaaaagagaaatatttcagcggaggaattaactga

SEQ ID NO: 386829 - DNA, 237 bp, Salmonella enterica
atgattttacaacaaaacattgtacacggggatgtgtcaattccattgccagcgttgaatatcgaattatttatctcaccagatttcaccgggcgcgtggttctttatatcgaaaacgggcgtgttatatgcgatcggcaacttctggatgatgaacacgtttgttctctggactcttttatcgaaatagctcgtgaagcaggaatccgttttgaggagatatcaaatgttggataa

SEQ ID NO: 386830 - DNA, 408 bp, Salmonella enterica
atgttggataaccgcacagccagcgcaattgacctggcattacagaagcaccatacgccagtcggcgacctttacgctgctatccggcacgggcgcatgaagcgctgttttagccgggacactgcgatccgctggctggcccactttctgacatcacactctttcacacggtccggctttaagcagcgccaccctgattttctggttgagcaggaccatggcgaacaggtatggcgccgtggcgaaaccaccgacgcataccatcgtgctcaccagcgcaccattcgccgcctgcgcctgattctggcccgtaaacgtgaaatggaaaagtggtgccagaaatgggactcgatgcacaaccgctacgtgaaagagcgggaagaacttcaggccagtaaaccgttttga

SEQ ID NO: 386831 - DNA, 750 bp, Salmonella enterica
atgaacacggtaacgatcaacaacaaacaacttccggcagtcgaatatcacggtcagcgcgttgtgacgctggcgatgattgatgaagtccaccagcgaccggaaggcaccgcgcgtgccgcattcaaccgcaatcgtgagcatttcatcaacggtgtggattatgccgaattaggtgcggacgtaatacgtacggacctcccggaaggaacgttctctaaatttgcaccatcagggattgtacttttcgagtcaggctacctgatgttaacgaagccattcaatgacgatctggcctggcaggttcagcgagagctgatcaatagctacttccgcactcgcgcgccgctgacggaaatcgaaatgatcgcagcaatggccgccgacgccgttcgccagcagaaacgcctgaatcaagtcgaagtacggatcgagacagtaaccgaagccgtcgagaacatcaaacgcggaaatatgcgcgccggatatgtcggctatcgccaagtggtcgccaaaagcggaatgactgacgcgaagtgtcggaatctggttaacgcttaccgcatccccaccgatacgcatgaatttatgacacctgacggccttttgtcccgccgggctatcgttgaacttgagccgttcatggaagcctttcatcagatgatgtcagaagctgaaccacgcggcacacgctggtatcacccgaagatggggctgtttcaggctatcggctgggagggcaaagcatga

SEQ ID NO: 386832 - DNA, 567 bp, Salmonella enterica
atgatcatccagtcaaaactcattcgcgctgctctggtatgtgctgctaaaaacgacgttcgttactatctgaacggtgtgcatatcacgccgaagtacatcgaggccaccaatggtcatgtggcacttcgtatggaacacggcatccggacgaagaaagatatcattgttcagttcgaaggaccggttcccgcaaaagcagaaacgaccgagctggtattcaacaaagaagcgtttgctattcaccgggacgcattcaatcgccgcatttcaatcactggtatcaggcttgtcgatggctgttttcctgatatggagcgcgttatgccgaaaaaagtggatttcagtatcaatccggttatccaggctgaatatctaagttatccggaaaagatgtttggtcgcgagcggaagtttattcccgttcagttacgcccgtccgtcgaacatggcgcggtacgcatccagtttgatccagcgatcaacgccacatacggcaatccggagttcgttgttatgccgtgccgtgatgatgcattcaaaattgttgaggatcacctggcatga

SEQ ID NO: 386833 - DNA, 225 bp, Salmonella enterica
atgaaaatcgaataccaggactacggcgccgtggcaaacattgtgatcaccagcacggtgtttgagttccgcaagcataaccgggtgcttgacgccaccctgctctgcacaccaggaatagttgcaaaccgtagtggaatattcttcatgaagacggttttgtccggcaaatctcgcgatatgttgcgggcttacaaaacaatcctgcgggaggagcaacgatga

SEQ ID NO: 386834 - DNA, 213 bp, Salmonella enterica
atgaagaacggcctgcactacgcctaccccaatccgagcagtgcaactcccggggaaatgacttaccgacaatacctggcttcctgtcttgctccggtaatgctcacgaattttctcagcaatgatgcctggcaggattacgacgacctcgccagcaccctgatgatggcggtcgatgccatcatcgaagccgaacaggaaagcgcaaaatga

SEQ ID NO: 386835 - DNA, 249 bp, Salmonella enterica
atgagcaaaattcaaaaccctgtattacaacgcctggaatcacagactggcgagaaatgggagagagcggttaacgatgtcaccactggtacaccgttgaccatcaccctgccagataccagctcgaaagcattctggagcggtagcggtaaaacggaggtattccatcaggaaatctataaacgccaggtgaaagaagcgatcgagcgggcttgtgttatcgccgggatcggtgtggaggtgaagtaa

SEQ ID NO: 386836 - DNA, 147 bp, Salmonella enterica
atgaacaaagaatttgagatatgggtgctcaggaggtatggaaaccgctatgacctgacgcgggatatcgagggattttactgtcgtgaaatagtgcgacgcatgtttgatgtgtggcgctactgccgtggactgagcgtggtgtga

SEQ ID NO: 386837 - DNA, 243 bp, Salmonella enterica
atgcagacaattatctatcaaatagtccccaatgagtgggtcactgaaaaattattgattgcagctacgggattaaaacccgggacaatactacgcgcccgtaaagagtcgtggttgctcggtcgcgagtacaagcatgtggcccctaacggacatccgaagcccaccagcgagtgtatgtactacattccggagattaatcgctggattaaaaaccagcctgatccgaacttcgatctttga

SEQ ID NO: 386838 - DNA, 1299 bp, Salmonella enterica
atggctaaaccagcctatccaaccggcgttgaaaaccacgggggtaaactccggatctgtttccgctacaaaggaaagcgcgtgcgtgaaaatctgggggtgccagacacccctaaaaatcgcaaaattgcaggtgagttacgaacgtctgtctgttttttgattaagacgggtagctttaactatgcggaacattttcctgactcgccaaacctgaaacagttcggcgtggtaaataaagatatcaccatcgctaaactggcggagaaatggctcaggcttaaggaaatggaaatatcaaaaaatacgatgattcgttatgaatcgattgtgaaaacgagtgtttctttgcttggtgggcaagttcttgcttctgctgtaacacaggaggatttgctcgttttcaggcgggaactgatgactggtcatcaggtgatgagaccaaaccgtgaattaacaccaaagggacgtagcgtggcaacagtaaattcttatatggggattatctgtggaatgttccggtttgcagcaagcaatggctatatttcacagaacccattcagtgaaatatctacgctgaaacgtgcaaaaactgaaccagatccactcacaagggaagagtttacacgactcattgacgcctgccaccaccagcaaatcaaaaatatctggtcacttgcagtttacactggcatgcgacatggagaattgtgcgcactggcgtgggaggacatcgatattaaagcggggactttggttgtcaggagaaactacactcaggctaaagagttcaccctgccaaaaacccaggcaggaaccgacagggtgatacatctgacacaacctgcaattgatacattaaaaaatcaggcatcactcacgaggctgggtaaacagcataaagtcgaagtgaagctacgcgaatttggccggacaagcgcacattcatgtaccttcgtgttcaatcctcagcttaccacacgctcaggaaagtccggaacacattatgcagcaacgtcactaaacaggatatgggaatcggcgatgagacgagccggtttacgatacagaaaagcgtatcagtcccgacacacttatgcctgctggtcactcgctgctggtgccaatccaaactttattgccgcacaaatggggcatgcaaatgctcagatggtctatacagtatatggtgcatggatgtccgataataaccagtcacaggttgatatactgaatcagggactggcggccactgccccaagggtgccccaaataggggtgtcagaaaaattaatttag

SEQ ID NO: 386839 - DNA, 186 bp, Salmonella enterica
atgccagaggcggcttcggtgtgtgtggtcgcatggatgcttgctagtgtgatcatgcaccgctgttgtctgcaagctgaacgaaactttcggcacacacaattaaaatgtatttcgatgctatcacgtttacctgttggtttcggttcgaatgcttcgctgtgtattagctcagacctgatctga

SEQ ID NO: 386840 - DNA, 567 bp, Salmonella enterica
atgcgacaatatggttcattaactatcgccggatttttagcaatgttcttttcttataatatctttgccgatacaaatttttctccggttgtcacattaagaagtatggctggttttgtattcctgaatgctttaccagcatctcgcgggcaggatgaagaaacgcattttatacttgatgaagttggtactttagcaggtttaaataaacaatattctggcggcatcatccagttaagagaaccgccaggaagacgaacatttttagcatgtgttgctgttttaccgaatgcgcaattaacaagatctgctgcctgtaataacgatcagggaacatattttacattacttcccgtcagaaacggaaccgtacagatacagaatctgtcaaccggattgtgcctggttgggaataatgaaggtgagggcattccttcaaccgaaaattgtattgaaacaggttttattgtaccacaatctcatcaatggtttattggtccagcatttggtaatgcatggatatcccctgtcgctattcagtctgaggatactgtaggggacaggtaa

SEQ ID NO: 386841 - DNA, 831 bp, Salmonella enterica
atgaaaaaaataatcaccatatttactgttttcgggatactgttttattcgggagttaaaccggttattgcggcagttactgactacagaattgtcacctggaatttacaggggtcatctgctgcatcagaaagcaaatggaatatcaacgtcagacagcttgtgtccggaagtgacggagctgatatcctgatgatacaggaggctggcagtctcccgttaaccgcggtacagacgccaaggcaggtccagcctgtaggtatcggtatcccaatcaatgaatatacatggaatcttggaacaacacgacgaccggatatacgatatatatattattctcgggtggatgtcggtgcaaaccgggtcaatcttgctatagtgtccaggcaacaggctgataatgtttttgttatccgccctcctacaacaatttcccgtccggtcatcggtatccagattagaaatgatgtatttctgacaacccattctttagccagtggcggccctgattcagcagcaatagtccggagcgtaaatatgttctttaaccagccacggttcaatcatctggaatggttcctggcaggtgacctgaacagatctccttcacgccttgaaaatgatttaatccttgaaggaattgaccgggatgtcacggtagttgctccggcagttgccactcaacggagtggagggattcttgattatggcgttatttcagcaagagctgcatttgcatcagcactaacatgtagtctgtttctccagagaatgcgctcacagttatcttcagatcatttaccagtaggtttttttaaaggagggcagtga

SEQ ID NO: 386842 - DNA, 672 bp, Salmonella enterica
atgaaaaactcaggatattctacatatattataagtacacttacacttttttgcctgattggctgttcttcatcccctcctctttcgcatattacggtacagtcgccctctgtcactgaaatcagtaccgggtctggagtagatccggttcctcccgctcttcctctccccgaaaaggctgacagatcacaacgaattcaggcatccctttttactcaggatcagaaattaccgttgacactgatggcccagaacgggagggtattgacagtatgggcacttgctgtgggtaactggttgtgggcatatggtccttcatcatcagcatcattcggtggaataagaaactggaatattgaaccagccggcgtgccaggaacattcaggtttgtgaataccgtaacgggttcctgtattacggcctataaaaacgggctgatacacgacagatgtaacaataactcacgcacacaggagtttacagttattcctgcaacaaatggaggtttttttataaaaagcctttctcaggggcgatgtgtccgttatgacattataaccagtactgtgtattcaacagtttacatgtcagtatgcccggctccggggatgagtaattatgaccagatatggtatctggccccggcattaacagacagcaccgcggagtga

SEQ ID NO: 386843 - DNA, 285 bp, Salmonella enterica
atgagccatgcagaaaagttgctgaaaaacaaggatatagcaagggtaatggaagcgcctcgtgggcaggatagcagccgcgagtttacgccgaaacatctgcataaatgggcgtatgagtacaacatggcaacgagcctctcccgtcccgtaaaaccgacagataactcgtttattgcatcatttaacgacagtttgtgggacactgcgtctgaatatttatcattaaatgacatgcccccggctgaattcatccaaagtatccagaaagacaaagacctctga

SEQ ID NO: 386844 - DNA, 1785 bp, Salmonella enterica
atgaaaagtctgattaatcggaccggtggctcttacacaaaaaaaatgcgcattttaaattacctgtttacaaacctggccctgatgacctgcgttggtgcacaggcggcaccagtacctcctgcatcagttcctggtgcaggcagtctgggaaaccagttacgtcaggagtcagtgcgtacgccggaggcaccggtcagtgctccgctggtgttgcctgaagaaggcgcggcacgccgatcattgtcggcggataaccataccacagttaaagtaaaggcggtgttatttaccggtaatccaccgggtctgaagggactgagcgaagccgatctgcagcggcatctgtcggatgacctgaatcagccgaagaccttttccggactggaggccatggcgcaaaaaatcactgacctctatcgccagaagggattgctggttgcccgggccattctgccaccgcagacaatgagggacggcagactcaccatccggattattcccggccgttatgataatgcctctattaataatacctcagccgtaaggacctctgtggcgcagcgtctggtgaacaccaccacgccgtcgggggatgtggtgacccgtaagcaactggagcgggaggctctgttgctcagtgaaactccgggcgtaaatgctcaggtgtccatgaaagccggtagccagccgggtaccaccacgccggaaattaccctgacgccgggtcagcaatacggagggtatgtcgggctggataatcagggagacccgacaacaggccgcagccgggtaatggtcggaggctacgcaaacaatctgctggggctgggagaccagttacgtgtggacctgctggatgcatatgaaaaaagtaacctgttcaacggttccctggattacagtctgttggttgggggattcggtacccgtgtcggggcaaactacagccacctgaactatcgttacagcctgaataaactggggtttaagggttactccgataactggggaatgtatgtcactcagccgtggatacggacttcccgggcgcgcgtggatgtgcgactggatggcgggcaacagttccttgcggatacgtacccggatgtgatggggggcgagggtcgtaagcaggtcagcagtggctccctgactgtggttggttcggtggcgggggtgccgggcggtgtgacagggtttggggtgaccggcacgaccggaaacgtggaactgcgtaatgaaacggctcgtttctggaatcagaatgatggtcagttttcccgtctgaattaccagcttaaccatgaccagcaggtgtggggaccgttctcggtctacgccgggctgaaaggacagctgactaaccgtaacctggattcgtcacaaaaattcctgatgggcggaccgtcagcagtgcgtgcctatgatatcggtgatggtatggttgaccagggtacggtggggaccgcagaagtccgcagtcgctgggatattccggtacagaactggctgggggcggcgcctgcactcactgtggcggcgttttacgaccagggctgggggcagcagtatcgtaataataataacagcggacaaccaggggggcgttttactgaccgtaatcacctgaatctggccggtgctggtctgtatgccactgtggctgatgcagggaactatgccctgaccatgacctgggcgcaccgtaccggcaatgcggacccgaacgcggtacatgatgaccacgaccgcttctgggtgtctgcggtaaaaacgttctga

SEQ ID NO: 386845 - DNA, 6075 bp, Salmonella enterica
gtgacggcgaagggcggtgatttaacgctgggcgcgggtaatatcagcgcgaactcaacagtggccctgaattcaggcggtaacatcaccctgaatggcgcaactgttacaggtcatggtgacatcagcctgctgggtgccggtaacagcacggcccgtatccaggtactgaacagcaccaccctggccagcaatggcgggaatatcacactggaccgactcagcacaacggatgctgaaggtaatacagtgactaacccgaacgccatgacggtgaaggtctccaacagcacgctgaatgccacgaatgcgagcagtggtggcactaacggcaatatcagtatccgtgcatataacccgaacgtaaacctgagtatatctgcctacaaaaatacggtacgtaacaatgactcgatgattgaagtcagtggtagcagtaccctgacggggaataatgtcacgctgcactctgaactttcaggcgcaaatgccaagggacttcctgttctgctgaacaataccactattacggctgacaatgatattgccattaccagtaacctgtccggcgtgacaaataagagcatgtcagccattgagcttcgtaataaaaataccctgaacgcaacagcaggaaatatcaccatcagtaatctccgtaccgatacaggtacaggaaaaggtgtgttcctgaacggcagcagtgccggggcagtcagtctgaccgccgggaaggatattattctgaacggtagtgtcggaggaaaaggaggtggtgttcaggtcacgaatgcgacactgaacagtagcgggaatttaaccctgacaggtcattcagccactaccggtacgggggtggccgttaccggcagtaccctgaatgcagcttccgcgaatattaccggtagcagcaaatccggcatcggtttcagtctgaccaacaccaccctgcagggtgatctgtctgacctgatgaacgtcaccctgagctcaaaaggctccggtgcgggggcgaccaacaaacttggcagcagtgtggttaatgactctaaccgcgataccctgctgaacatgacgattgagaacctcacctcagtcgatatgaatggtacggcaatttacaataacgccaccgcatggaacaaatcttacgagacggcggagaatccgaacgctggctggatatttgaaaacaccagtgttaatgccaccagtgcagacctcaaaggggtggggttcattaatgctgctattaatataagcaatggctccctgaacattaccaataatggtgcagcggttctgagaaacagtaccgttaatgtatctgccggtaatatcagcattgtgtccggtgaaggccaggtaaacctgaccagcaccaccctgaacagctctgcgggtgccgttaatgtgacggcgaagggcggtaatttaactctgggcacgggtaacatttcagctgtaaataacatcaccctgaacgccgcagcaggtgtgctcagtatcggggctgcaaatctgacgagtgttaatggcagcatcgacatgcacggtgtggctgccggaagtggtacaggtattgccattaccggctcgtcgtcggataaggcaaacatcagtgccgtgaacggaacggtcagccttaacgggacgtctgtttcaggcagtggcctgaagctggataatgttgaactgaatgcctctaatgccgttttcacgggcagtagcagcaattctggcactggcttcagtctgacgaatgtcaccctgggcggtaacctgactgacctgaagaacgtcaccctgagctcagcgggttccggggcatccgtcaccaacattctggacaatacggtcgttaacgccactaaccgcgatacgttgctgaacatgtcggttgagaacatgactcagattgacatgaacggggatgcggcctttaacggtactgctgcgtgggagaaggactacggtaaagccaataatccgtatagcggctggatattcaataatacgaccatcaatgcgacttctgtgaacttatccggtgtcgggtttgtgaactccgtcctgaacatcagcactggcggactggatattcacaacaacggttcagtaatactgacgaataatactgtcaacgttactgacggtaatgtgaatttaacctcccgtgacgggagcatcacactctccggtggcaatatcactgcttcttccggcaatatcagtattaatggcaatgcgtcggtgtctgtcagtaaaacgaagctgaatggtaaagatattgatatccgtacaccgaacggaacggtcagcataacgggtacggacgctgcaaaccgtgctgtgcttaatgcgacgggtaatatcaccattgacggaaaccagagtactgccggttcagggtatgcggtaatactgaatcaggctaacctgtccagtgctgacggacacgtgactgtcacgggatataacagcggctccggggcgacggggggggtcagcctgactaatgctaatatcacctcaacgaatggttccggtattacggttaatggtacgacaacctcgacgtccggatctgcgctttcaggcattatgaacaatggaggcgtgaatattaccgcgaatgccgaaagtagtaatatttccatgaatgggaacagaaattccaccttatatacttatgattataacgagcatcattatggcggcatgaactggaacggcaataatacggtttccgctgctgatatatatgtgcatggtcatgacaccgttggcggcggcattatgttcggtgactatacggtttatgcttccagaggaggagcccagactaatatcacttttaacggaaatgcaactattaaaggggatggaggagcatatggtattttcatggctaacaggaactcttatgttagcagtccatccagtctgacatttactaatgggaatagtgatctgatcgcaaatggggtcaatggaatttactcccagggggttggggctgcctacggcggaggacaggtgcgctctgcattcagatatatacttaataacgccacgctgaatgtgtcgtccaccagtacgaatgggggatttggtaaatccaatcttaatctgacctttcagggacaggggaatgtcagtatcacaggtaacagctccggctctaatgcgggtattgataccagtatcctgaacaccaacagtcttaatggttcactgagcctgaccggaacttcggccagtggtattggtgtactggttgcgccggacaaaagttacaataatgtgactattacgggaacctcaggtacgggaaatggtgttgttatccagaataatgtgactatttctggaggtcaggttaacggaacatcaggctcagccagtggtggtggagcaggtgttgtggttaatggtcagacccacggatttactaatgttgcgattgtcggtcagtctgctggttccggtcacggtgttgctgtcaacagtatctccggggaaaacgtgacaatctgtggtacatcaacgggttccggcaatggtgtgcaactgaacaacagtgtgatcagcggtgtggatattacgggttctgctgataacggcaacgggatcggtgtcgctggtaacgatgtgacattgtcgggtacgaccctgagtggttcttctgataacggaagtggtgtggtactgaacagcgctgtctctactgataacaatacggtggttacaggaaactccgccagtggtagcggggtggttgtcagcgccggtgtttctggtgctgtcgttaatggtacttcagaggccggttccggtgtggttcttgacggtggtgacgtcagtaatgccattctgcagggggtatccactacggggagtggtgttgagatcgccggcaatgtcagccttgatgacgtatcagctgaagctgtttcgggaacctccacagagggtaacgggctgcttctgagcgacggggccagcgtgggtattaccggattccttacatcggatcctgtcactgccccggttgagttaggtggctcttcagttaacggaagcggtgtggccacctccggtaacgtcagcatcagtggggtggttctgaacggttcagcaaccacggatgagggcgtcggggtcacgcttggtggcaacctgacgattgccgataatatttcgggggttaacgcttccgcgacaggtaacggaacggctctggttctcgataatgccactatcaacgcgagtggctacggcgataatttcagtatcgacgcaaccgtaacaggggatggcactgcaatcagtacgaccggagagaatacccttacctcagttgtcctgaatggtacgggaatcggaaatggctctgctgtcgttattaacggaacgttgtcaacagacaaagagattatcgccacttcacagggagcaaacggtacggggctggagctgagtggcggcacactgaccggaaccgcatcagacggctcaccggtaaatatcactgtcaaggccggcgacacaggtaccgtcgtccatgtgtctgacggtgacagtgaactgagcaatgttaacctgaatgcgggcgtgaataatggtacgactctggatgtgtcgggcaacctgaccagcaatgttgatatcactgtatccacaggtaatggtaccgcgctgaacttcagcggcggcagtattcagggtacagatgaggccatcgtcaacgtgaatgcctccgcgacgggtgatagtggcagtgctgttaaggttgaagagggtcagaccggcgggctgaataacgtgaacctcagtgcttcggcgacagcgggggatgcggtgagtgttgccggcacactgaacacggaagacgcagacatcactacccaggtgagcggaaacggtacggcactgaatgtgaatggcggcacaatccagtctgccggtaacacgacggtgaacgccacagcagccaccggacagtctgtcgtgatgaataatggtacgttgaacggtgacagtgagggcgacctgaccgtcagtgccaccacagaaaccggcgatcctgcggtgaacatcagtggtaacagtgaagtgaccaacagtcagatcagcggtcagaataacggcagtggcagtgccgtcgtgatatcgggggctctgacatcggacggcggtggtgaaatcacagggcagacggttaatggttcagctgttgaagtcatggaaaatacctcggccaccggtattacgctgacaggtaactccacgggcagtggtaccggcgtgacggtcagcggtgagaacaccacgctgactgacaccacggtgaacggcaacacggccgacggcaccggtgtgaaggtgacgggcagcctgaccagtgaaggcagcacgacggtgaacggtaactcaaccggcaccggcagcggcgtggatgtgtcgggtgacgtgacgggcggcagcatcaacggcagcgccacgggcagtggtgccgggatctggtttaacgacacggccgttttgtcgggtacgacagtgtcgggctcctcacaaagtggtgccggtatcagtagcgagggaaatgtgcaactgaataatgttcagctgcaggcgtcatcggtatctggtccggatctcagtatttcaggctccctgtcgtacgatcgcggaacgaaaattgaggcgtcaaccatttccggacgtgaaaacatacagagtgaaaccgcattaccgttaccggcacttcgtcagggcgcggtaaatgcagatatttcgcggatgaaccagcctgagctggacggattccatgatgcggggacacctgcgattccggtaaaagaatatcgggcgttaccgcgtgatgtgaatatcagcgtatgttccggaagtgactgtgagtcattttctctcagcagttctcttttcggaaatacaaagaataagcatgtattaagaatggatgcgtatttatctgatggaggtagcgttaaatgtgagggggaacactgtatttatattcctgcacaatcgtcagaagagaaaaagtag

SEQ ID NO: 386846 - DNA, 2040 bp, Salmonella enterica
atgacttcccgtaataaggcaacaacaggatctgaattaacggataataatgaaaaaggcggatctgttgatacgtctgctgctgcaaataatcattctgatggtgcggcagtgattaatccggatgtgtttaatctggagttgtttgaatatcaggtcactcagagtgatgcagagccggcggccagaatgttgcgtcttttactggcacagcttgatcgtcactacggactgtgggggccggtgttttccgggtatgcccccggggtgtcagcggagggtgtaaaccgtcatgtctgtacccgtattgccggggcgatcaccacgctgttctcccgccctgattttattgtcagtgacagcgggtatgtgcaactgatggatctgcaccgctggctggcactgatttttgccgtcagcagttacagacatgcagaccatattatccggaatattaatgcggccggcggagggaaggttgatcccctgaccctgaatgcccgcaatctgcggttgttctgcctgtgttattttccggattcgcagattgccctgcagcctgaggtgctgtggcagtatgatcgccggacggtggccagactgttcctggcgctgatcagtggtcgggcgttgccgacgccggcagctcacagtaaaagggagcagttgctggcctggctgccggagcatctgggggaactggagtccctggatttcttaccgaccgcggtcctgcatgatgtggtgatgcactgttcgtatgcggatctggcggagaagcatcgtatcaaacaaccactcaatcgtctcattcgccacagcctacaacaagctgattttgcatcatgtctgccggttgatgaacccccttcccgggataaacccctgctggtcatcgtactggagtggtttacctgtcagcacagtatttaccggacgcattccagcacaatgcgggcgttacgcaaacattttcatgtggcgggcatagggctgaccggtgcaacggatgacatcactcaggcggtgtttgatgagtttacagaagttcccgcagaaagtgctgtgcatgacattgttgttcgtctggcagagttacgtccggatgtggtgtattacccgtcgacagggatgtttcccatgacggtttacctgaccaaccttcgtctggcacctgttcagctgatggcgctggggcacccggcgacgacgtattcagactgcattgacgggattctggttgaagaggactaccttggtgatccggcctgtttctcagagcgtgtgtaccccttaccttctgatgccctgccttatctgccgccagagaatgtaaaacgtatcgtcgcatcacgcaggccgtttgcggagcgtcagaaagagttctggccttttgaattaccggtacgaatagcggtgtgtgcttcagtgatgaaggttaacccggggtttctggagacactggcagagatccggagacggagccgtgtcccggtacagttctgtttctacatgggttttgcgcaggggctgacgctggattacttacgcgatgccattcatgccgtgctgccgggtgctgaggtaaatgcccacatgccggtgcaggactatcaggtggcgctgaacagttgtgagctgtttgccaacccgtttccttttggcaataccaacggcttggtggatacggtgcgccaggggctgccgggcgtatgcctgacggggccggaggttcattctcatattgatgagggactgttccggcgtctggggctaccggatgaactcattgcgtctgatcgtgaacgttatatccgggccgtgctacgcctggtggaagagcatgactggcgtgagatgctgcagcatcagctgctggataatgacgtggagcaggtgctgttccggggacatcctgaaaaatttgctgaggtggtatacggcatctgcagggccggtggcagcaaaacagaagccagagataaaggacgtaacaggaggaagcatcatgacaatcagggcaacataccgggcaagtga

SEQ ID NO: 386847 - DNA, 489 bp, Salmonella enterica
atgacaatcagggcaacataccgggcaagtgactttgataatgatggtctgctgaaggccccggttcttttctgggtgggtattgttgtactggcgcgtgcctggtggctggcgggtctggtgtccatgatggatgcgtccggacatgcgtcggtcggggttctctggccggggctggcgtttcagtgccttgcactggccgcaggtgttcccggaatggtgatgctgtttatttacccgttgcgggggcggtggccaggtctttcccgggcaaactatgtgctgatactggctgcactttttgtgatgacggtaacggaactgtcgggactgatctccgtgtctccggggcaatgggaggcaggatggatgtttctctgtctggatgtggcctgtatggtgatgttgtggcctgaccagcggctgcgaacggtatttttcggtgatggtctgtggcaacccgtcaatcacagtgagtacagggaatga

SEQ ID NO: 386848 - DNA, 411 bp, Salmonella enterica
atgatgtgtaacgtgacggagggaaggatagctgaaagtcagtttattcaggaggccagacacagagctggcctcctgttcggaagtttctgtcctggaaaagccctgaaatgggcccggatacagggtaaccgtcagcgtctccggtatctgcaggctgaaacccggaaatacctgtcagctaaccatacacaacaggaagtgagtgacttctggtaccggctggatacttcagcggagataaacgcttttattaactgcctggaatcgggggcacaggtactgagtcagcggggcaaaaagggggatgtttacagtattgcggtacttcactacctggtgtgccattttattcagtattatcttcggggtacacccggaataaaaccggcagcagaggaaaaggattag

SEQ ID NO: 386849 - DNA, 519 bp, Salmonella enterica
atgccgggaaaaccacacgacagcgataaatatcctgtaccgggcgggggaggctccgccgggaagaaaaaaaaggtgaaacagagaaatcacaatatatataccatcccgcccggcatggaggcgtgggccgacgaacctttgtacctggtggtggcgcgctgggggcagcagcagaaacggtggataaaccgcaatgacatcgtgacagtgtttcatatcccggaaaggcaggcttcatttcagctgtcgtatatttcgcgcaaaaaagagcgggtggtatgccggacacgttatgtgacggctgaaaactgcgggcgtcagcggattgaaatttttgttgaccacatcctgccggagccggaagaacggacgctccctgtcccgccgcgcaggcaaaacataccagctaaacaggcaggtgccacatcgcgcagggtggggagtggcatggtcggtaatatcgggttatgggaacagttgctgaagggatgccgggaggagcgtgaagatgagtga

SEQ ID NO: 386850 - DNA, 699 bp, Salmonella enterica
atgagtgaatccgtgataatcttcagtcgggagtggctgatgacgacggctctgacggcattgctgacaccggcatatgtcctttcagccaggccggtgtacggcccggagcaactggtcaggacattgagggaacaccctcgcacgcctctggtgctgggtctgtgtctgcatgaacatgtagcggatttgtaccggttacaaccgttgttaacccgccgggcagtcctgtttgttagtcgtcgtttttactggactgactataaacttccggaatggctgggcctggaacagtacgggttctgttcatgggatgcgatgctggatccgttttcccgacagatgaagttgcgtcgtctctggggactgtctgctgacgggaatgacgataacgtagtcccgttatcaatattttcgtccgtgactgaaatacagctccaggaaagggtgaaccgatggctgcacagggaactctcagtggctggcctgactgaatatgaaattcaggtgctgtcgctaatgaccgaaggtcacagaggggatctcccgccgcgggtacggagtgtgcataaaaataacgggctgaataaactcgggatgacaaaacatgtgatgaacctgtaccgtggtgtaaaggtccgtccggagctgcaggccggattgctgtcaggggccggagaaagcgttacggaaatatga

SEQ ID NO: 386851 - DNA, 327 bp, Salmonella enterica
atgaaagaaggtatttatacggtggtgtttgagagtaaccagcagtcggttggtgaaggcgtggtggtggtaagtaatggtcgggtacatggcggtgacattgcttttaccatcagaggggttatgaaaagaccggtgatggaactggaagttcattattacaaccctgatattccatcggtactggggatggaagaggattactggctggagatgagttattatgaggagggcaaagaccgttataatttcagtggtcatgtgaaaggatatccggaacgtaagctgaaggcatatgcggtatttctgacacctctgctgaaataa

SEQ ID NO: 386852 - DNA, 279 bp, Salmonella enterica
atgaatcgtataaagtttgttatagcatcagtattaatgttgatctctgttggggtttctgccgcagaacaggtatcacagaaagaaattgaacattttaagcttgagtatgtggggaatatcagtgtcagttcaacaaatgagagtgtgacatctccttctgatttgcaggagaaactgtcagaacttgcagataataagggagggaaatactatcatattattgctgcccgtcagcatggtccaaattttcatgctgttgccgaagtattcaaataa

SEQ ID NO: 386853 - DNA, 906 bp, Salmonella enterica
gtgcaacagcctaaaatgactgttgctatggaggcttgcggggcatctcattactgggcccgggaaatcaggaaactcaaccatgatgtaatattgcttccggcacaacatgttaaagcttatcagcggcgtcagaaaaatgattataacgacgcacaggcaatagctgaggcctgccaacatggaactatacgacccgtgccaataaaaactctggagcaacaggacgtccagacttttttgaaaatgcgtcggttggtttcgatggaaaggacacaactgataaatcacgttcgtggacttcttgctgaatacggcattgtgttcagtaaaggcgcaacagaactacaccaaaaattaccggcactacttgagggtgcggaaaacgaactcactgataccatgaggacgttattgcatcggcagtatatacggctgattacactggataatgaactggagtggtatgattctgaacagaaaaaatatgtccggcaagatcctgtgtgcaaacggttgttagctattcctggattcggtcccttggttagtcaggcaataaaaagctggatgggggacggaaaacagtttagacgaggaagggatgcatctgcggctctggggctggttccccgacagttcagtacgggtgggaagcaggttcttctgggcataacaaaatgtggagatcaatatgtcagatctatgctgatacacggtgccagagcggtattattcagagcctcagagaaaactgattcacttagtgtgtgggttaatcgtattcgggaaaagcgtggcttcaaccgggcagttgttgctcttgcaaataaactccttcggattgcctgggtaattatcgcccgcaatgagatgtatttacctgcaacaaaacaaaatcaataa

SEQ ID NO: 386854 - DNA, 150 bp, Salmonella enterica
atgatagtgacaggtttgctttcgtatatccggcctgttcatgaagttattgcttctggccttgatgagacattcgcgcactccgactttatcgcttactcggccttactggcctggctcatcttgcaggttttcggaacgccggtctga

SEQ ID NO: 386855 - DNA, 363 bp, Salmonella enterica
atggaaatcaccacccaagttgcggaagacccactttacccgtcgttgacaccgaaagatgaacacccaatattgcacagccgtcaaggacggcaatatcagatgtcacggtggcaacgatggttaaaggatagtggcatcgtccagagtatgtttcgccggggaaattgtcttgataatgcggttatagagagcttttttggaacattgaaatcagaatgttattacctcaatgaatataaaaatgtggatgacttaaagcgagacatcatcggttacattgattattataaccaattgaggataaaggaaaaacttggcggtcttagcccggtacaatatcgattgagtcagtctgcataa

SEQ ID NO: 386856 - DNA, 417 bp, Salmonella enterica
atgccctggcgaatcatcagaggtgaagaaaattacgcttcccgttttatcagtctgatgtgtgaaaaagaaccggagctgaaaattgcgcagcgactggcactcgagttctaccgtattctgaaaaccaaaaataaatcacagctaagcagctggttcactcgtgtcaatgaaagcggctcagcagaacttcggcgcgtagcggctgggatggaggccgatgcagcggctatatgtgaagccatcagcggccgctggagtaatggtgttgtcgagggccatgtaaatcgtctgaagatgctgaaacggcaaatgtatggccgggccgggttcgagctactgagacgacgggggatgagtcctctggcatggaaatcaccacccaagttgcggaagacccactttacccgtcgttga

SEQ ID NO: 386857 - DNA, 207 bp, Salmonella enterica
atgtgttcagacaccaaaaatccgctcccggcatgcactattacccgttttttttcctccgtggcagaaccccgtccagttgtccctgaacacttcaggctggaagccattatcagtaagtcatgccgcagaaaacgcaggcagacgccacgaatatccgggacaacggcggaaattccctggtactggtcaaaaccggaagactga

SEQ ID NO: 386858 - DNA, 1074 bp, Salmonella enterica
atggccgagcctgtcccttccgtttacgggagaaacgtacgtattcagggagtccttttgaagaaagtcagcataacagatgtagccagacacgcgggggtttcagtctccacggtatcgctggtccttcgtcgaaaaggaaacatatcagaatcgacaaccagaaaggttcatacttctattggtgagctgggctatatccataatgttgccgcagccaatttacgggccagcacatccaatcttattgggctgatcttaccgaattttaatgacagtttttctgtacaggtgatgtccagtatagtccgggaactggaaactcaggggtttatggtttttctcgcacaccctctgaatgaatatgaacatcttgaacactgcttactgtcctttaaacagcaacgggttgcaggtatcatttacctggcatcagatacctgcagtgatacactgccggtgcaaatccgccagtgctccctgcccctggtggtcatttcgcaatcgccgatcagggataactgtaaccgggtgattcgtgataaccagcaggccgcatacctggccacacattacttgctcggacgtggacacaggtatattgcttatattggtggacaggagcatgatcttgttcgccagcaacgtcttgctggttttcataatgccatggctcattccggcattctgtatcgagataatttttcacctgcctgcgacgataatacactggctgcatgtcaggcttcccggctattgctggaaaataaaaacaccattacagcattattatgtcattctctggatgtcatgatcgggtgtctcaatggtatccggcaggtgggacgaacagtgggcaaagatatctttttaacccgtcaggtggcgttgattggttttgaggatacgttgtatgtcaatctgtcttctcccgcgtttacgtatatatcttttgccagtgaggaaacgggacgtcaggctgccaatctgctgattcggaaaatcagagaacccacacaacagacacagtatgtaacaatatctggtcgactgattcttcgggaaacagcctga

SEQ ID NO: 386859 - DNA, 222 bp, Salmonella enterica
atgctgaaccggtattttgcgcaggcaggatttgaacaacatccggacaaaaccttcatcgggcgcgtggaaaaaggctttgactggatgggattctggtttacggataaggggggggcgacggcgtcgcaccccgtgcattacaacattttaaggacagactccgccggctttatgagcgggtccggctgtggcctgaagaccccaggcaccgcaggatag

SEQ ID NO: 386860 - DNA, 5553 bp, Salmonella enterica
atgaacagaaaaaaacattccacacccccggcggagaccctgaacgggtgcgtccgcttcaggcggacactcctgttcgccgccgtactgcaggccatgctgcctgccctgaccgcctgtggcgacaccgtaaccagtgcgcaggccaccccgacagcgcagaaggcacaggccgcacacgcgcctgcacagaaaaacgcccgaccgcgcagtcccttccgggtggaccgggaggcagccccggcccctcaggcggccacggcgtcccgcagcccgttccgggttgaccgggacgcaggcggcatttccccgtcaccggcaccggtcgccgcggatgacctgccgtcactggggactgacccggccggccagaccggcggcggagccggtgatgaactgaaatccgcccgccagtcggtccgcctggcgcaggagcaccgggatgcacagcaggacggggccgccacgctggcctccgccgcctccaccgccggctccctgctgaaagggccgcaccccggccaggccgctgcttccatggcagaaggtatggcccggggtatggcgctgggtaaggcaaaccagaccctgcaggactggttccgtcatctgggtaatgcccgggtacagctgaatgccgacagcgacttctccctgaagaactccgcttttgacctgctgcacccctggtgggaaaccccggacaacatgctcttcagccagggcagcctgcaccggaccgaccatcgcagccaggccaacctgggcttcggctggcgccactggacaaccggcaccgcgccccgcggcctgttccacggcgattacatgaccggcctgaacaccttcctggactacgacctgtcccgggaccatgcccgtatggggattggcgcggaattctggcgcgactacctgaagatggatgccaacctctatcaccgcctgaccaactggaaaaactccccggacctggacgattacgaagagcgcccggccgacggctgggacctgcggatggagggctggctgccgtcttacccgcaactgggagcaaaactggaatatgagcagtactacggtaaccaggtggccctgtttgacaccgaccatctgcagtcgaatccccgtgcagtgacgacagacctgacctggacgccgttcccgctgatgaccgtcagcgccgggcgccgtcaggggcagaacagtcactttgaaacagagttcggggtgaacttcaccctgaacccggacctgacctggcagcagcagaccgacccggctgccgtggcggccatgcgcacactggccggcagccggcatgattttgtggagcgcaacaataacattgtgctggagtaccgtaagaagacagtcattgccattgccctgccggagcgtgtggaaggcaaatccggcatgcagtatccgctcagcgtgaccgtcagcaaggcgaagtacggcctgcaggatatcgtctgggacgatgccgccttcctggcggccggcggtaagctgacctgtaccggcagtacggcctgcaccgtcaccatgccgccgttccacccgggcgcagaaaacacgtacaccgtgggggccgtggcgcatgaccggaaggggaatgaatccgaacgcgcacagaccaccctcgctgtcaccggggtgggcgtcagcgcggcgaactccaccatgaccccggcacaggcgtccctgctggctgacggcgtatcgacggacaccgtcaccgtcgtcctgaagagcggggacaaccagccggtgaccggtctggcggaccagctggctctcagtggcgtcctgaccccggaccaccaggtggttgatgtgaaatccggcatgctggcccgggcctccgcgccggcgtccggcaccccggggctgagcaccctgaaggaagacagcgcgcacccggggacctacacggccaccctgaccgccgggaccacggcagggaaatatgccctgaccctgaacctgaatcatgcgccgctgctgacgacaaacgtcaccctgacggacaccatggcggatatcagccagtccaccctgacggcggacaaaaacaccgtcaccgcgagtgacggcagtgacccggcaaacgtggtgcacttcacggtaaccctgaaggataaagccgggaaaccggtgagcagggaagccggccggctgaagctgaccaccaccacgtccggcgtggacaccgcacggctgaaagtcagcgacctgcgggaagacggcacacaaccgggggtctacaccggcaccctgagcagtacgctggccgtgaaggccctgccggtggtcctgatggtaaacggcaagaacagcggtaaaaccgccaccgtgacggtaacccctgatgccgccagtgcagacccggccctgaccgtcacaaaggacaacgcgcttgccgacggaacggacaggaacacgctggccatcaccgtggcggaccggtacggtaacccggtggggaacccggtggtcggcctgaccgtcacgccggccgaccataccagcatcgcgccacaggtaacggcagatgctgccgggaaggccacggtatccctgacctcaaaactgccgggtgacaaaaccgtgacggccaccgtgaccggcagtggcaaccaccgtgaccagaccgtcacgttccgggctgacccgtccgtcaccgtgaaacatctggacatcacggacaacgggggcaccgccactacagaaaggccggtgggcgtcacggacgacagcacatttaacctgaaagccacggttctggacggacagggcaacgcggtggccggcatgccggtgagctggacgctggaccagagcgcctgtgcggacacgtcgacgaccgcaaaacttgataaaacccagacggacacggatgcgaagggcgtggccagggccacactgaccagcgccgggaagcacgtaacctgtgaccggctgacgataaccgcggccgtacccggcacggccgcaatggccggtcacgtgaagtatattgcggaagcgaagagtgcgatggtgacgaaaaacaccgtcacctccccgtacacggactacctcgcggacgggaaagcgcacgcggactaccgtgcccacgtcaccgaccagtacagcaacccggtgaaaggcatcagtgtcgcctggagcggcgggaagacggcggtcttcaccgcagccggtccggtgacaacggatgaccaggggaatgcgaccaacggactgaccagcaccacggtcctgcaggatgttgcgcccgtcgccaccgtgaactccgcagtgaaaggctccacgacggcaacggcagaccggaaggtgaactttgtggcgaatgccggcacagcgaccctcgacggcattaccgtgaaggacgacgccggtaaaacggtggataccctcccggttggtaccaccgccgccagcgtgttccacgccagcgccaccgtggtggacggcaacgggaatccggttgccggtcagaatgtcacctggtctctggaccaggccgcctgtggtggaacggatgaagcgaaactgagtacagtcaccgccacaacggacagcgctggccattcaacggcgaccgtggcgagcatcagcccgtaccatgtctgcagcggcctgaagctgtcggcggccgtcgggacggccggacacaaaacgacgacgctgaactacatcgcggaggaggcatcagccaacgtgaaaaccgtggcgctgccgggcggggcgaaaaccacctatacggcggacggtaaggacacagccacctggaacgccaccgtggcggaccagtacggtaacgcggtgtcaggcgagacggtgacctggggcggcgtgacgggcgcacagccgaaatacgcagccgcaacgacgacgacggacgcctccggccacacgtcgaacaccatgacgagcacgacggccgcgacgaacgtgaaggccactgccacggtcagcagcacgacccacaccggaaccccggtcacggcgacaacccccgtcacgttcacggcggacgcgtcgaaggcaacgctgaccgtgacggtcaccgggagccggcagccgacggagacggacacgagccatacagccgcgacggcggacggcgccgacctgctgacgcttcactttaaggccgtggacgggaacgggaacccggtaacgtccaccccggtccattacaccacggcggtcacagacgccggcatcgtgaaggacacgctggcctgcacgacgaacacaaacggggaatgcacgtccacggtgaagacgacgaaggcgggtacgtacaacgtgtgggtggcgctggtcccggccggggtaacccagccggtatcgccggtgaaaacggcactggtgttcctcgcaggagacccggtaccatctggtacgagcgtggccaagactcccgctgccccttacgcatattctggcagcgagatcgctttgtcggtgaatgccaaagacgcacatagcaacgttgtgccaggatggttgttaaaaaacgaggttcacgtaactaccagttactccaaagttacggtctcgaaaccagcaaacacccagggcgataccgttacagtgacgctgaccaatactgcggacaacgccgaccttataagcaaggagttacgcacgaacaaagcgatggttaacgtcggatcggctgtcaccatcaatcaagacgcatcctacgtcccctggatgaacttctgtctgaacgaactaggagacaattctacggttatggcacccgacggacatgggaacgcgacggtagggataagcaagtggcagttgtgttatttccgggggaactcgacggggccggatacttcgacggggtacgtcgtaccgagcaacatagttcagcaattccatgcgaatgtgcatggaattacactggtgggtggtgttcccggtgatattctcaccgtcaacaagctaacggccgccagtagcttggtatctggcgtgaccgctaccataactgatcaagagaccggtagaattatcatgaacggagacagtgtgtttgcagaacgaactcatggcactgtatacgaaccgacactacggggaccccatacactatcctacttcgctggtttcaagcaatttgccagttcggacagaaacataaacaacatggtagctgccgggcgggaaacttgcgacgccatagcgagtttggtaggcacgacggtacccgataatcaggattggggacatacgccagcccaggtctccgtagccaacaacctgcgcggaaccgattcggtaatcggcataaccagcgattacagtgtgtacggaggtatgcacaaagcttatgcgtacaacaagcccccgtcatctcgaggcaacgggtactatgtcgcatcgcagtatacattcgggaatgccgtacccgtgttcggcatatggtcatccggtacaaccgcaacaaaggagacgataactaatacatccggagcaggcctaacgcagaacgtcgagggggcatattgctcactcccgtag

SEQ ID NO: 386861 - DNA, 261 bp, Salmonella enterica
gtggccgtccgtcatgacagttaccacaccgccctgaacctgctcgtggtggcgaacctgttcgcctccgggctgctggccggcggctttgtctggctctggctgatgctcccgccgccccccctcccggacacaggcggccccccggcctgccggtgtccgtgctgtaccgcatccggaccgtcccctgaaggggcgcaggatgccgcgtctttatatccgttaacccgtaaaaacaatgacaaaaccataacaccatga

SEQ ID NO: 386862 - DNA, 444 bp, Salmonella enterica
gtggactgtctgcgttcactcacgtttctcagcgagtggctgcgtctgcgccacagcctgctggtcacccgtgccccctgcatcctgtggggacactctccgcttgtccgcagtatgccggagactgccggtttcgccgttattccctggcgggtgtccccggggcggctgcggagcctgattgctgacggcgtggccccccggcgtgcgccgggacgccgccgggcgcacgtcccctgcagggtacggctgaccgcccgggaggtcaccattctccgccacaccctggagggccgttcactggagtggatggccggcgagctgggcgtggccgccaaaaccgtgtgggcgcaccgtcgtcgtgccatggatatcctgggcgtccgccgcctgcacgacctgatgcagttaccgccggaggtgctctgtggccgtccgtcatga

SEQ ID NO: 386863 - DNA, 129 bp, Salmonella enterica
atgagtccccaggagcttactgaagtaagtgactgggtgacaaatctgtctggaacagatttgaacgccgctagcggcggccccgtaggggtgaataacttgaaggcagccaacgaagagccaatttga

SEQ ID NO: 386864 - DNA, 159 bp, Salmonella enterica
atgaagtatattgttttatgctgtgccgccggaatgtccaccagcatgctggtacagcggatgcaagatgctgctcagaaaaaaggtgttgaggttacgatcaaagcggtgcccgttgccgaatttaaagagaaggatatcgttctgctgggtccatag

SEQ ID NO: 386865 - DNA, 315 bp, Salmonella enterica
atggaagagttagaaaccatcatcatggagctgctggtcaacgccggggcggcgcgtagtcaggcgttaactgctttacaactggcacgcaaaggggatttcgccggtgccgagcaggcaatggaagagtcgcgcgattacgttaagctggcgcataaaatccagactcagctgatcggcattgatgaaggtacgggcaagctgccggtcaatctgattaccgtccactctcaggatcacctgatgaacgcgatggtgattcaggatctggctggtgatatgattgagctgtatcgacggttgccgcaggcgtaa

SEQ ID NO: 386866 - DNA, 408 bp, Salmonella enterica
atggcgcaactggctctcggcgatatgtatgctttcggccagggtattcctcagaataaaaaacaggcgatgacattattcctgctggggcgcgttaattttcagctcagcgatgaggaacttcagtttatggcattgcaaggtgatactcaggctcaaatcaaactggcgtcaaaatacggcacaggtggttccgactgctccagaaatgagtcgctggcgctttactggctgcgtgaagccgccacaaacggtgactcgcgggcgcaatttatgctgggcatggggctggctacggatcggcagtatgacgaagccatcacctggcttaaaaaagcgcaatcacaaggcgttgaagaggctggcagtttaattgaacgcatccaggaagagcaaaagcatcattaa

SEQ ID NO: 386867 - DNA, 237 bp, Salmonella enterica
atgatgagaattaaatattgctcaatggtattgggcgctacgcttttgttacctttttcgataaggtctgcggttttacctgatatcgccgggattcagaaagatgctgccgctggaaatgccaatgcgcagttcaatttgggaatggcctatctttttggcgagcgtgaccatacttacgtcggggaaaaaacaggcgcgtcagtggttacaaaaatccgccgatcgagggaataa

SEQ ID NO: 386868 - DNA, 564 bp, Salmonella enterica
atgttatcggaacgccagttaaagctcgtggacatactcgaacagcagccctgctcgctgggcgagctggcgcgacaaactggcgtgtcgagccgcactattctgcgcgatattgattatcttaacttcaccctcagcgataaggcctacattcaggcgggcggcagtgcaggttatcagttggaaatcgtcgacaggcgcagctttttccagctcctgcaacgccatgataatgatgatcggttgctggcgtatttgctgctgaacgccttcacgccacggacacagcttgcctgtacgcttaacctgcctgaagcctgggtggcagaaaggctgttgcgtctgaagctacgttatgagcgcgcattttgcctggccagccgtcccggggctgaccattttattgatgaaccggaagtaaagcgcattatcttgctggcgaatttgcgcccgggaaggcgagaacctggttatcaatcacctcgccatcccccactgctggagcgagcaggaattccatttccgcggatttttcatcaccctggcgaactctgtacaagttaa

SEQ ID NO: 386869 - DNA, 663 bp, Salmonella enterica
ttgaaagccaaacccgacatcacgctctacggcgtcggcagcgtggaagaagaagttggcctgcgcggggcgcaaacctcggcggagcatatcaagcctgacgtggttgtggtgctggatacggcggtggcgggcgacgtacccggcatcgacggcattaaatatccactgaagctgggtaaagggccgggcctgatgctgtttgataaacgttatttccccaatcagcagctggtcgccgcattgaaagcgcgcgcgcaaagcagcggtgcgccattacagttctgcaccatgaaaaccggggcgacggacggcgggcgctataacgtgatgggcggcggtcgtccggtggcggcgctgtgcctgccgacccgctatctgcacgccaatagcgggatgatctcaagggcggattatgacgcgctgtttacgctggcgcgcgaactgctgacctcgctgacgacagagaaagttaaagccttcaccgattttcgccaggtgaacgatacacaaactcattcgagttgcatcaaggcggcaaataaatgcatccctgggagcgtacaaacagtacgtgaccagggtgacaaatctgccgggagcagatttgaacgctgctcgcagcggccccgaaggggcgaggcccaaggacgggccgagtaa

SEQ ID NO: 386870 - DNA, 981 bp, Salmonella enterica
atgaaaatcggtattgtcgttagcggcggggatgtctccggcatgaataattttatatttcagattgccagatttaccaatgcagaaatcacgttgtttaatggtggtattaccggtttgctggagaaagatcaccatgatgtcgcctggcgcgatttggttgatttctctattgccgctattccgattattacatcagggcgtaccagtcgaaaactacagcgcagtgaatatgaaattattgccaaaaaaattaaatcattgcgtatcgatgtgctgattatggcaggcggtgatggcagcctgcagtttctcaatacgctgagcgagtttgatattaattgttttggcgtcgggatgactatcgataatgatgtttacggcagtgattatacgattggtttctctaccgcctgcgagcaaattattaaagaagtttcccgtttaagaaatacaggaagagcattaccgggccgtgtatttatggtcgaaatactaggaggttattgtggagaattaacgttgcaatctgctatcaaatgtaatgccgatattgccctgatcccggaatcgcagatgccgttagaaatgctggccgagcgcgtgaagcagaagctggcaaagcagaatagcgtcgtgattctttgttccgaaggctataccagggagtattcccccggctttcagggggcaatcgataccatgattaaacagctcgaaccgcgcattggcgtgcgcattcgtaagacgataatgggctacggtttacgcagcggcgacccgacctgcgaggagatttatcagggcaccattatggccagcgaagtggttcgttgcattcagtcagggatgaaaaataaagtcattataattaattcaagtaataaacctattccgattgatctcgtcagtatgaaaaaacgtctggtagatatcgaaggacaccattacaaacttgccaaacaactcaatattatttga

SEQ ID NO: 386871 - DNA, 315 bp, Salmonella enterica
atgctgaaaattctttgcgtatgtggctgcggcctcggttcaagctttgccattgaaatgacggcgaaagcggttttaaagaaactggaaatcccggcacatattgaacataccaccgtttccgaagccggggcgtttaaatccgacatgattctgacgcaaaaaacctttgccgatatattaacggcagatgccagcgaagaggaaattaagcgcgtcgtagtgctaaataaactcacagataaagatgagattgaaactaagatcgtcgcattcttaaaagagcgtaatctgaaggtagcagactatgaatag

SEQ ID NO: 386872 - DNA, 1368 bp, Salmonella enterica
atgaatagctttgtagagtttatcgtcaaagatttgctcggtcaggcttcgatattaattgcatttattgcgatgctgggcctgattctgcaaaagaaatcgccgggcaaaacggcagaaggaacgtttaaaacgctgctcggctttttaattatgatggccggaatcaacattattgtcgccacgctgacgttcctcaacgatatcttcacccagggatttggcatgaaaggctacattaccgatgttgccgccattgccggattagccaaccgtgaactgggttccgaagtggcgttgaccttaatggtgatttttgccgtcaacattattatcgcccgcctgacgccgctgaaatatatcttcctgaccggccaggcgctgctgtggatggcgaccattggcgcggtgattggctataaagccgggctgacgggactaccgttgattttgactggcgggattttcggcggcgtgatggcggtattgatgcccgcgctggcgcagccgatcgttaggcgcattactgattctgatgacgtggcgctggggcacttctgtaccattggttatctggtacaggcggcggtggctaaagtggtgggtaaaggttcccgttcaacggaagaccttgaattaccggataactttaagtttctccaggatacctatctcgcgatggcggtggtgatggtgccgatgtacctgattcctgcgattgcggcgggcccggaatatatcgcccagttctccaacggtattaactacctgatgtacgcctttatgcagtctattcagttcgtggcgggcgtatttgttctctacagcggtgtgcgtttattgcttaatgagctggttccggcatttcgcggcattgcgatgcgcattgtcccggacgccaagcccgcgctggattgtccggttctgttcccctatgcgcccaatgcggtgattgtcgggttcctggcgaccaccgtcggttccatcatcggcatgctggtctttccgatgttcggtctggcgatgattctgccgggtctgctcaccaacttctttgctggcggtacggcaggcgtatttggcaatgcgctgggaggtcggcgcggggcgatgatcggcggtgtggttcatggcctgttcatcaccttcctgcctgcgattttagtgccgatgctggaaagctacggctttaccggcgtcaccttcagtgattcggatgtgattagttccggcctggtattaggtcacgccttccagaataacgggttatttgtcgccttattcattgtttttgttgccgcactggcatggttcgtcaacggtaaatcagctaagccaaaaggggaaaatattcatgagtctgtataa

SEQ ID NO: 386873 - DNA, 843 bp, Salmonella enterica
atgagtctgtataacttcaacgatattctgaaaattgcgcaggaaagaaaatttaaagctattggttcatttaatttgcactgcattgaaatgctaccggcattttttaaagcggcgcaaaaaagcaatagcccattaatgattcaaatctccaccgggacggcggaatatcttggttatcgtttactggtggatgccgtttgttcattagcggaaagtgaaaatgtgccgacctgcttgcatctggatcactgctccgatatcagcgctattgaaacggccatggacgccgggttttcttccgtaatgtacgacggttcccatttggggctggaggaaaatataggcaatacgcggatagtggtagagatggcgcgcccacggaatatcacggtagaaggcgaattgggggcgatcggtggatcggaagatggcaaagccgtggctgcggaagatatctgcttcacgacagtggaagatgccaaacgctttgtcgatgagacgcaggttgacatgctggcggtttccgtggggacggtgcacggcctgtataccggcaaggcgcagatccagcaccagcggctgaaagagatcagtgtcgctaccggcgtgcctttagtgcttcatggcggtactggcgtcagtaatgatgacatgcgcctggccgtcactgagggcatcaataaagtaaacgtcggcaccgaaatgaacgtccagtgggtcgaccaatgtaaaacgacctttgaaaaaggcaaagtgaatgacagcgtacgcaagtttttaattccggcgaataacgcggtcactcatgtattaatgcaaaaaatcgccctgtttaaataa

SEQ ID NO: 386874 - DNA, 270 bp, Salmonella enterica
atgtttgaacctttgaaaaggctgtggaaaaaagaaaataacccactgcaggattatgaccaacagtcccgccagctggcggaggaaataaccaggctggaaggtgaattacagggcaaccctggtaatggcgacgtgcagaaagcgttaatgctgatttataaccgggcgctgtcggtgtatgccaaaagtaaaactcaccgccaggaaatagatgcgctttttgttcgcattgatgagttacgtaatgttattcgccgtaatatttag

SEQ ID NO: 386875 - DNA, 438 bp, Salmonella enterica
atgacgataaaagaattacttattgaggccgatgcgattcaggtcggcgtcacggagtcagactggcagaaggtgattcacctggccgccagtccgctggcggcaaaagggtatatctcgacagaatacggccaggcggtgattgataataccctgcaccatggtgcgtattacgtttttgatgaaggcgtagcgatcccccatgccagacctgaatgcggcgtaaagcgtaactgttttagcctggtggtgctgaacaaaccgattcagtttgccgatagcgagaaggcggatattgtcattatgttcggcgcgcaggacagcaatgcccatattgaagaggggatccgcgcgattatcgcattactcgataataacgagacgatgactaagctgcgggccgccagcagccgggaggaggtcgtcgcgctgttatga

SEQ ID NO: 386876 - DNA, 558 bp, Salmonella enterica
atgaacagatatctcaccccaggctgtaaaacggtgattttaattaacggcattcctgcatcgggtaaaagcaccgtcacccggcagctatcgacaacatttaatctgccgctgctcaccatcgacggtattaaggagccatttatggcgcgctttactgacattgatcgtcctttcaaccggcagttgggctgcgccgcctatgaggtcatatggtcgattgttggccagtcgtcggcaggctgcgtctggttaattgacgcctggtttggttttcagccgcgcgaaatgttgcagcagttgctgcaacaagcgggagtggaaaaggtccttgaagtctggaatcagatctcgccggagctggcggtatcgcgctacgccagtcggttgcaggcccgtaaaccggggcatccgggcgaagagtatctcccggagctggcccaattggcgcagcgggcgcaaccaatgcgcctggggccggtgtttacggtagatcaacagcagcagccgctggatattgcatccgttatccgttggatcgaagcgcaaatacagtaa

SEQ ID NO: 386877 - DNA, 849 bp, Salmonella enterica
gtggcaaatcagttactccttttgaaaaaagatttttttactgatgagcagcaggccgttacggttgccgatcgctatccacaggatgtttttgcggaacatacgcatgagttttgtgaactggtgatggtctggcgaggcaatggcttacacgttctcaatgaccgtccatacagaattacccgcggcgatctgttttatattcgcgctgaagacaaacactcctatacttccgttaacgatctggtgctgcaaaatatcatttattgcccggagcgtttgaaactcaatgtaaattggcaggcgatgattcccggctttcagggagggcagtggcatcctcactggcggctgagcagtatgggaatgaatcaggcgcggcaggtcattaaccagcttgaacatgagaataatgggcgcgatccgctggcgaatgagatggcggaattgctgtttggtcaactggtgatgacgttaaaacggcatcgttacgcgaccgacgatcttccggcaacctccagagaaaccctgctggataaattaattaccgctttggctaatagccttgagcatccctttgcgctggatgcgttttgccagcaggaacaatgcagcgaacgggtactgcggcagcagtttcgcacccagaccgggatgacgattaatcaatatttacgccaggtccgtatttgccacgcgcagtatctgcttcagcatagcccgctgatgattagcgaaatctcaatgcagtgcggctttgaagatagtaactatttttcagtggtgttcacgcgggaaaccgggatgacgccgagtcaatggcgtcatctcagtaatcaaagcgattag

SEQ ID NO: 386878 - DNA, 186 bp, Salmonella enterica
atgggcgactgcaccttgcttttgagagacgctcgccttgatgaaaagaagagagacattcagagaggctataaaagtgatcccatcatcataataaaacatcatttcaatataattgtattattgcttcacttttattttgatcaaaaaaacccccacaaacatcgcttgcaggggcgttattaa

SEQ ID NO: 386879 - DNA, 345 bp, Salmonella enterica
atgcagatcaaacgtactatagagaaaatcccggacggtatgatgttggtgccactttttctgggcgcgctatgtcacatcttttcacccgacgccgggaaatacttcggctcatttaccaacggtatgatcaccggtacggtgcccattctggcggtctggttcttttacatgggggcatcgatcaaacgcagcgctaccagcaccgtgctgcgtaaatccggcacgttagtaataaccaagattctggtggcgtgggtggttgcggcaattgcctcgcacattctaccggagcatgggggggaagccggattcttcgccgggttgtccacgccgctgcaatag

SEQ ID NO: 386880 - DNA, 402 bp, Salmonella enterica
gtgactggtcaatcgcaatttgctggcgtctggtggccttccattacgccaatggacaatgacggcaggctcgatctcaacggtctgagccaacatctcaaacgccttaccgaggccaaaattgacgtgattttgctgatgggcagcatcggggaatttgcctcctttacgttcgaagagagactgcatctgatccgcaaagtccgcgctatgagctcgctgaagatggtcgccaacgtctcatccaccagccagaatgatattctgttgatggcgaaggaagcatttaagcagagcgacctggcggcgcttcgcgatattcaggaccagattggcacctacatgtccctctacgccatcggcgaagattttgtcaccactatcaaatatggtatcgcgtaa

SEQ ID NO: 386881 - DNA, 675 bp, Salmonella enterica
atgcgatattctgtcgatgtttttacaggcaaaattcaggattacgcgggaagccgccccagcgctatcgcgaaagtgcaggttgatggcggactgatgctgacggacctgggtctggtaggcgatgagcaggcggagaaaaaaattcacggtgggcccgatcgcgcgctgtgccactatccgcgtgaacactatcagtactggagacaagcgtttggggagcaggctgagttatttatcgcccccgcttttggtgagaacctctctactgaggggttgactgaggaaaatgtctatattggcgatatttttcgctggggagaggcgctcattcaggtgacgcagccgcgttcgccgtgctataagctcaattaccattttgcgattagcgacatggccagccagatgcaaaacgtgggtaaaaccggctggctctacggcgtgatagcgccaggcagggtcgagacagatgcgccgctggagttggtttcccgcgtgagcgatgtcagcgtgcaggaggcgatagccattgcctggcatatgccatttgatgattcgcagtatcaccgtttactgtcggcagcaggcttatcgaaaagctggaccagaacgatgcagaagcgtcgtataaacggtaagatcgaagacaattctcgccgtttgtggggaaaataa

SEQ ID NO: 386882 - DNA, 255 bp, Salmonella enterica
ttggatgagttttccgggcaacatcctattcatggactgctgccactgctggaagccaacccggaaatgacgtttctggagaaatcagaaatcgagaagctgttaagcgttttagttggtgatgacttgctggtcgcgctttcgtgcctgagcactggcggaagatgccacactgaaaccagcacagataataagctgcagggttacctttttgaaaaccaaaaacggcaaaaagccaaccgtgccgatttctga

SEQ ID NO: 386883 - DNA, 426 bp, Salmonella enterica
atgacaaaacaaaataatcacgagggacgttatctcccggagggtatggagatctatgctaactggccattttttatcatcgtagctttatggtgtcttcacagaaatacatgggtgaacaggaatgatattgccagagcttttaaactgagtgacaggaaggcctcgtttcagctgtcatatcttatgaataaaaagcatattattgatagtgaaatccgtaagacccgaagtgaaggttcgctgacaacctgctatgaggttcggattattaatgtccgcctgccgcaatcatcttcacaaaaataccgttcttttgtacgtatcgcaggaaacagacggcaccaggttggaaatgcatcgcacgaggagagggtattgctgcgggaactatggccggttaaatccagaaaggtgaaagcatga

SEQ ID NO: 386884 - DNA, 720 bp, Salmonella enterica
atgaaacacattattatttatggcgatttctgggcagactgcagggctgtaatagccataatccagaaccgatactctggcatcaataccacgctgtgcagtaatattactgaactgatagtgtttttatcccgataccctgacgctgggctggttttatgtctgcgtccccatgagcatgtttttttattttatcatctgcagccctggctgacgagccggaaagtgctgaatgtagtggatcgattatattttacagaccggtgtgtcatgcaatatttcaggctgacagattatctacagcgggataggcttacgccacttattcagcctggagggcatttgagtggtgaacctgaagcatggtatcgcttcaggaaaacggacagcgtagcgtgccgatttcctgtgggagcggctggttctgagagactgttgttgacgctaaagcagtatatgtggcatcagctgcctgttggcgtgtccatagaaaaatatgcgctgttagttttactctctacaggtctttccggtacttctgttgcaagacaatggcggctcagtgaaaatgcggtcagcctgtactggaggcaggccatgaagggattggatatgccactttcacgtgtggcattatatagagggatttgtctgcgtgatgaattgcaacggacagcaataagcttatcggatgattcttctctgaagaatgtcatctga

SEQ ID NO: 386885 - DNA, 342 bp, Salmonella enterica
atgacgcaggcagttatgttgcaggggacggcatccgatgccggcaaaagtatgttggcggcgggtttatgccgtattttttatcaggatggactgcgtaccgcgccatttaaatcgcaaaatatggcgcttaattctggcataacgccggatggcaaagagatggagcgggcgcagatttttcaggcggaagccgcgggaatcacaccagatgagcgtatgaatccggtactgctcaaaccgacgagcgatcataaagcgcaggtcgtgctgatgggcaaagtggcgactaatatggatgcggtcagttaccatgactataggccacgtttgcgtgagtaa

SEQ ID NO: 386886 - DNA, 261 bp, Salmonella enterica
gtgcaagaagcctgtataacgcaaaatccgtttcgaccaggtgaagcgaccacgcttagcgctatcgccaaccagatgcttttatctaagccggggtttgacaccctgctgtcactggtcgaagagtgcgaattatacggattgaacgtggcgcatagcggtagcgtggtggatctgatgctggatcgaaaacgtcatgacatagcacgcctgaaaggaaagctggcagagaagaaacttaccgtatactggtcaaaataa

SEQ ID NO: 386887 - DNA, 486 bp, Salmonella enterica
atgaataaaaatagcgaaattttctcattgctaaaagtggaagagggagttagacataacccttatattgatagtctcggttatcctactgttggcgttggatttaagctaggtccacaaggtgctaatctgaaaaactatacattttatttaacagataatgttatcaatgtctggcttcaggaaaacattgaaatagtttacagaagtatgcaacaaaatgagaaaatcaaccaggcattattatacagcaatgtagttcgtacagatatcctgatatcaatggcatatcagatgggggttaatggccttgctggttttaataatatgctcgcggcgataactgagcaggattggaataatgcagcaaatgaaatgagaaggagtatttgggcaaagcagacaccaaaacgggccgaaagacatgctgcagttatagagtcaggacaatgggcgccagtatatgattttgttattaatcaatag

SEQ ID NO: 386888 - DNA, 2889 bp, Salmonella enterica
atgacgctatcaaccgcaacaccggtgattaccagctgcgataaccgcggcattaccgtacgcacgcttaactggaatcgtgaatccgaccagcatccgttgcgccttttgctatctcattctcaactggaggtatccagccgaaccaccctggaccgcgatccccgccgctttattgcctggcagaaaaacaatacggcagtgccgaacctgcacaacaggctgtcactggcaggccagatactaaagcgcgacagcaccgatagcggctggcaagtgatgctctttaatgctgaaggcggcgtcgcatggggcattgacgctcgcggtactatccagactcatgcctgggacgcgctgggccgtccagtttcaggtactgaacaggctgccggtgatacactccgtaccacctggcgtaaagagtatggcgatgctgttgcctcctctgaggatgcttaccgtaacaatctgcgtggtgtctgtgtacgccagtatgatgatggcgggctactttccatcaatgcgattgcccttagcggtgccgttttacagcaaacaaaacgctttctcaacgatgctgaaggtaagcctgactggccggaaaataacaccgcctgtgacgccttactggaagccggcggctttgtctccacgactgtggcgaatgctgccggcgcccccattagctgcacagatgcgcagaacaacatagcggcggcattttatgacgtcagcggcaatatctgtcgccagaccctgaaactggccggacaaactacctcgctcactctgctggaacgcattacctgtaaccccgtagggctgatcgctgaagaaatcatcggaaacggtctgacaacgacctacagttatgaaccagagactttacgtctgcataatcttcatgctgtccgtagcgatagcagcgtgcttcaggatttgacgtatggttatgatcgagtagggaatagaacatccatcaccgacagtactgtcagtacacgttactaccaaaaccagtctacctctggcgaccgaatatttacctatgacgcgctgtatcagcttatctctgcctgcggacgcgagaatgccagtaatacgcaagtcccgtacgctgagctacccacgctcattcccactgacagtaaccagactcttagctatacccgctcataccagtacgatgacagcggcaacctgagctcattctcccaccttggtgccgccagctttacccggacaatggtgataagcacgcagtccaaccgcagcttattgcaaaacggcagcaactccctgactgcggatgatacggatgcggggttcgacccttgtggcaaccttcgcgggttaccaacgtctgccacgacgactgacaatatgcgttgggataatagcaaccatctgcaggcagtgattcttcttgaccgcaaaggtgacattcaacaaagcgaccgtgaaatctaccagtacagcgccggggtacgtgtacgtaaacagacccgtatcctgacgaaaaccgacagcaatctgtggacggtggacgaagtgcgctatctgccgggccttgagctgcggcggcactggcaggaaacggtcaacggcgatgccattacgccacaagcggctaccgaagcattgcatgtcatcacaacccaggccggacgcgccaacatccgggtgttgcactgggaatcgggaaaacctgccagtattaacaatgatcaggtgcgctggagtgtagatgacagtagcggcgcggcctcactggagttggatgctcaggggcagattatcagccacgaagaatattatcccttcggcggcacagcggtgtgggcggcgcgtagtgaactggaagccagttataaagtgatccgctattccggcaaagagcgtgacggcacgggcttatattactacggctatcgttattacgctccctggctgtgccgctggacagcagccgatccgggccaggaaatcgacgggctgaatttgtaccgcatggtgagaaataatccgctcacgctgacggatgttgatggattaatgcctaaattagtgttgacgaaggaggagatcgcagaatttgagcatttatatgacagtgcgctgaaaagtggaaaatatagaagaaatactcctgacatgaaacgcttcgttctcaccaaccattcacgcgccagtacatattccttaaaaagcgaaagcgttatagatattctttttcacgtcatgtatcaacagtcaaaatatgtccttccacctgaatcttggcagaaagccatgagtgcaaataaagcagcacaagctcaagcagcccaggcagctgccgtgaatgggaaaaaagcaatactctatgtttgggcagcacaatcccacttgatacaaaacgcctcccccaaagagagactgaacgctgacaaagtggttaaacatataagaaaattaaacagagacccgaatgcaagcagagaccggcatgatttttttgagcaaaacgcacataaaggcgtggcgaacggcatctatgaacttgatggtaaaactggcgaagaacttgccaaacttcttgatgagtatattaagaataacgccacattaataaataaaacactctatcggggaaccacgacgttgccatcagttcggcccggtagattcactgcaacatcagaaagtcagaatattgccagtttgtttggtaaatatatcgagaccttcaaaggaggatacggagtacgggtacccaatatttattacaatagagatgaaaaagaatacttattctcccggatcgccccacccaagccggttcactctaccactcctcgccaaaaaccattagatcctggcgctggttgtagtaaagccgcttga

SEQ ID NO: 386889 - DNA, 4926 bp, Salmonella enterica
atgagtataacagccactttatctctcaaaaagttagaggaacattttcaaatacaagatcagttatccaaccgaggatattactctatatttgatatcctgaagctatcaaaaagtgaatttactcgcaagcaccagggcctctttggtgctaaagccggtaaaatctacgataccgcctccggttacgcaacgcagattatactgttgtttcgcaaaaataaccttgctcaggcggtacagacgtcggtttattccactcaattacaggatagcgattctgcagtgctcacaaagggtgctccgacatggcaaaccctatttgctgatgactggcgtgaatattgtcagaatagcgcaccggaggccgttgactctccggtcgcttatctctcctggctatataatcaagccacgaattttgaatcacaggtggggagcgataatattatcccgctggctgtccgccgccctgatttagcagatcttatgctggataatgacgcggttaatcaagtgattccttccttacaactggtcaataacgtacttgagcagtccgtcacgccatacgttaataacgtcactccaaataccagcgttagcgaaacgctagccgccacccgttatccaactctcctgccttatcattacccgcatcagcaaacgctgctttctctggaggccagtgacgaatcgctacagaatatgattaagaaaaccgataccgcatggccttattttgtgaagcaagacctgcgtatgggaaaagcggaaacggcatggcaattggggagcgatctggcgcctgagcagcagaacattattattgaagaattagctgattctacaaccgaattaactaatttctaccatcagagtctgggattgaattccagtaattttgaaccgctcataaatagcgatgttttctgccagcaactcggcattaccagggaggaaatgcaaaacgtaaccgcttcaaccagcaacgagtctacagtttctatttccaataattaccaaccggcttatcgggcatccggttctgatttgtatggtgccagttatattaataactatcttgacgaccctgcattgttacaggaccgaagtgtggtaaaaaatgaagggactaacccgacgccgatgtatatcagcccgcaaggggttacttttgtaactggcaagtttggttcagctttaaaaattgatgcgacaaaaaatgctgaagtctatttcaaatcaaatattgccactgacggctcccaactcattccttttacattatcattctggtgtaatatcccagataatatacaatcagacactctggtggtgacaaataaaacagatcattatgtttcaactgcaaaaggaattaccgttaaggcattccctggcgcgaatggtaattgcagtcttgaattaagcgcgtcagatggcgaaaccaccccactgaccatatcacgtacatttcctacgaatacctggattttcgtgtgtattgaatactcactcgacactaatctttaccttataactaatgtaaatggttctggttccacctattatgactccataaaaatagactccccagaaagcatcgccttagaagaagagtactggggatttaatggaaattatggcaacaaatattatcaagatcatagtagtcgccgctcagttatttcatatgacgacattgcagtctggaatgattctataaccagtagcgagattaatgattatcttctaaaaggcaccacagcgccagcgttaaatactccaattcattattattcctgtgacgccgctggcgtatctatcaccaatgaaacaccggcaaaaatagaagtttcacaatcgcaaagtgaattttatccagagctactctccgataaatatggtgaatattacaaactctgcgcaacaaaaaataattatatccgtctgaacgatgccatttgtaatcagttcgatggtaatcagaatttttcattcggtttttggtttaaatgctccaaatatccaacaaacagaaccccggtagccatgaatatatatccacaaaatggtgaacatgggttttccattgagctttattcaagcggcaaacttcacctcgttgtacaaaatgatctcaactaccaatactttgaaaccgctgcattaactacagacacgtggtattacgttgctctcgtatggtgcacatcgactatggttgccactctatatttggtggaagaaggttcaagtgatatcaacgcttatgcaagcgctgcggttaccgcaggttcatttactcaaaacggtgaattctgctggacactcaacgaaagtggaaatgttagccgaacatggtacaccaaggacactgattcttcagtagcactctgtttttctgagcctgcattctggtctggcctcatcaacaaaaatgatgtcgcgcttattgcctcattacaaagttcattgaataacaagtattcgggactcagtttagatccagcgtgttatttcgacttcaattcttgcccgacgctcatgcatctgagcgatgtacgtatgcagcgcatcaatcgcatgatccgtttacaacgctggcttgacctctcctttgaagaggtagatttattgctcaatgcctgtattcgcggtcagggtagccaaaatagcgataactcccttaacgcgcaaacgctgcgtatgttgggcgttttccgccactggcagcaagcgtatcaggtcacagcgttccagtttgccgctatcctgtatcaaatgacaccttacgcgatttcccctgctgttccttttctggatcaggtatttaataccgcctccgcttttgaagaaccattcaaaattaccgatcgggcgtttaactataccgcgctgaccggtgaagatggccagattgttaagcagatttgcgccggtcttaatatcacccgaactcagttcctggtactggcgaaacaggtcagcagcgcgcagagctgcggcgcgaatacgctaatctgctcgttagatgttatcactgcgctctaccgtctggtgatggcgccgcgctggttgggcctgagctttgaggatggcgtagcattattgatgctggtagaagaaggtaatgcgctgacacgacttgccagtattccggtttatacggcagtagagaatagcgctagcgatcttctggataccctaatgacgctgtctgacgccgcacagtggcttgctgataataatctgacggcgaccagcgtactggcaatgctacaaaccggagaaatggtgcttcccgctaccacggctgaactgaatttcatcacgggtattaatcaacaattaccttcaacactattaaatgataattctttttcttctctcccggaggatatcatttcagattcagtttattttccaaatggtttagatgtggctagctcacataatggtactaccagttatgaactcaactcaacgaaagggcagtatgcctgcctgagcgataaagctaacagtatactaaacctagattcatatatgtcaagctcactgggtatgtggtgctatattaaaaatggcgcaagtgtaggaacccctcttattgcctcagccactatcgggagtgatggtaatataggcgctgggcttgctatcacccttggtgatagttataaatttaatatgaagttgtatgatgtaaatggaaaatcagcaacggtttctgcaaattcggctcaatgggggaaaaatgagagctggttctacctatccatcagaatacccggcaataacctggtgctcctggatatttatttagataatggcacaaaaaagtaccagtcagccttagattacagtgagatggcaagctgtaaggatgtggggaattgttggtccataaatgaagatggatcacaacaatactattcgacacagcaaaaagcaaaaaacgatattatcataagcgatcttaccgtatggcaagataatgtattagaggaggactttaaaaatattataacatcaaatcgtccagccagcgaaacagtacccggaggtttgacattttatgaaaccacctggatggaatcgttagataatatcattgacagcagtggccttgtattacctgttgcaactgactatcaaacgattagcagtatcgttcataacgatatctgctatggtactaacgaatcgcaactggatgaaatctcaaatatcatttatcaagcaaaactcgcgcaacagaatattgccgacagcgcgctggcaaaagcctttgatattgatcactcatatccgccatacctgctctcctgggccgcatcatctgaatacgatctgctcagccagagtctggcgttaaacggcatcacgacgccagatgccatcccggataagtaccaacaatatctgtatcagattgcccgccgcgcagggttatgtaatacctttaacctgacgccagccacgctttccgcgctgctggccaacccaggctggttcggcgtagccgatactacgattgattttaacttgttgtatctgttcagtcgctataatgactggatgaaactggccgataaagaggacgccatgctggcttacctgcgcaaggcaaacggcgcctcgtcgctcactccggaacaggctgcctcctggctggcgttgctcaccgactgggaaagcgatgaagtcttacaggtcgccgcgtatgccaaccccgccacgagcatcgccgctacgctggcgcatattgacgtcgtaatgcgcctgaaaacgttgtgtacccgtaccggtacctccattgaaaccatgctgaataccggcgaccttaccaccgcctccacttatcaggagtggcaatctgtcggagagtcattagtcgccgcgcaaagtaatcactaa

SEQ ID NO: 386890 - DNA, 570 bp, Salmonella enterica
atgacatatgcggctttactgggacatctgctcccgccagtcagctatgaccccaacgcaccccggctcagcgcagaactgcacgccgaaggcgcacaatttacccgcgtggaacaaagtgccggcagcgttaccggtggcattacgccgctgtttgcgcaggcgttgctgtcagactgggagcgtgttgtcgggctgtcacctggtgaaaatgacacctaccagcagcgtctggcagcggtgctggcgaagctggctgaaaccggcggactgagccgtgattattttatccggctggcggcgaacctcggttacaccattaccatcgaagaacccgatgtttttcgtgccggagtgaaccgtgcaggcgacagtattaattccccggacgttatctgggtctggcgggtcaatatattcagttcaaaaattcagaattaccgttttcgtgcgggctgttcagccgccggcgaacgtctctcatatttcgctgattcggtaattgaatctgtatttaacgatttaaaacccgcgcacaccttttgttattttacttatcaggaaaaataa

SEQ ID NO: 386891 - DNA, 1059 bp, Salmonella enterica
atggcgtttatcacgaaagacctggcaaccatccgcgacgacctgctccgtgacctgaaaaatcagttaccggatgcggacatcagcgaggacagtgatttttatgcccgcgcgtcttccgttgccagcgtggcggaaggactgtaccagcaccagagctggatagtccgccagatattccccgacacggcggattctgaatacctgcttctccatgcccgcacacggggactgagcaaacgggctgccaccacggcggaaggcatggctctcatcaccggcaccaccggcagtaaacttcccgccggcagcagcattcagagtgacgcggtttcatgtgtcacgctggacgatatcacgctgaccgccaccaccagcaccgtcagggtgcaggcttccctgagcggaacggcgggtaatctcagtaccccggtcgccgcagaactgatttctgccccggcaggcattaacagccgggtaaccattcagtcgctgaccgggggcactgacggggagactgacgccagcctgctggagcgtctgcttgaccttatccggcgtccgcctgcgggcggcaacaaatacgactaccgccgctgggcgctggaatgtgacggcgtgacgggcgcgtatgtttaccccctgcgccgtggactgggcaccgtggatattgccatcacgtctgccggcagtctgccgtctgaatcggtacgcaaggccacacaggcgcatattgatgatttgcgcccggtgaccgcccgcgattcactggtactggccccgacacaaaagacggtcgatttcgacgtgattattacccccgacggaatattaccggatgctgccagacaggaagttatcgccacaataaaaaatgcggtggcccggattgaacccggccagccattaattaaaagtcagattgaaatgctgatttcattaattacgggaatcgcagaccgaaaaattattacccctgctgataatgttgaagccctggtggataaaacccatctcgaatggctggtctgcggcaatattaacgtgaggctgtcatga

SEQ ID NO: 386892 - DNA, 351 bp, Salmonella enterica
atggacaggcaattatcccccgacaccggcgattacaccggctcacgtacacagacgctggaaaatgcggcttacctgcggcttaaaacgccgctggggtcgtggtgggccgctccgtcactgggttcccgccttcacgaactggagcgcgagaaagaccgccagcgcgtatatgtgctggcccggcagtatgcacagcaggcgctacagccactgactgatgatggccgcgccacgtctgtaacggtgacgtcaacccgttataaatccggctggctgtatctgcatgtggaaatcatgacggctgcgggggaaaaggttgtctttaaacacccggtaaaggtgatttaa

SEQ ID NO: 386893 - DNA, 657 bp, Salmonella enterica
atgatgtggaacgctgtcaaccaacgcattaaccgggcgctggcccgtatccggctggccttccgtactgtactgaccacaaccgacagcgccggcaaggtgcagacggttcaggctaaagggctggggccggaggtggcgcaggggaatgaactgttccagcactacggctttacctccgtaccactccccggtacgatggcggtgtttctgccactgggtggtgtcaccacccacagtatcgtgattgcaactgaacatggtgcgtaccgcctgaaatccctgaaacccggcgaggtggcgctctataccgatgagggggctaaaattgtcctgaaacgcggtaaactcatcgagaccgactgcgacaccttccgggtcaactgtaaaacgtgggaagtgaacgccgaagaaaaggctgattttaataccccgatgctgacagccagcgagcaactgaccgcacagcagaccatccacggtaacggcgggatggcaattcagggtggcgacggtgccacctttacggggaatgtgaaacagaccggcggcgactatgaaactgacggcaacgtcattacaccggttgccgatatgaacacccatcagcacccgaacggccacgacggccagccaaccggcacccccatgaagtaa

SEQ ID NO: 386894 - DNA, 1236 bp, Salmonella enterica
atgcttacagccggtaatgtcaccaccactgacgataaaatcacgctgctgctggcgggcggtgcccgcagtgactggcagcgctaccgcattgattcggactttctgaaaccggcggacgcatggagcctgtcactcggtttacccgataatgttttcccgtctcaggcggtacgtggtgcgccagtccagctgcaggtcggcggtgaaaccgttctgaccgggcggattgacagcgtgcagcgccgtatcgcccgtcagggccagatgaccctgacgctgaacgggcgggatgccacggccattctggtggactgtgccgctccgatattcagtgcccggcagttaacccttgatgccgccattgcggcgattgtcaggccgctggggataaagcgtatccgcattcaggctgacggtgtgacccgcaatgacagtattcacatcgaacccggcgaacgggcgtgggacgcgctggttcgtgtggcggcgggccggggattgtggccgtggtgtgacccggacgggacgctggtgattggtggcccggattattcccgtccgccggtcgccacgctggtactgaaaccctccaccggtgaggtgaatgtgctttccctggaggataccagcagcattaacggctgttattccgaactgacggtactggcccagagccacgcctcacaggcggacaatctggccgtgctggatttgagcgacacacctgacgcccccggtcagaacgccggtgaaaccggcagcgacagtgatgatgacgatgatgacagcggttgtggcgaaagcggtcattacagccgcagccggacgataaaagacccggatgtgccgtattaccgtccgcaggttctggttgtgggcgacgtggacaacccggaacaggtgcagttccgcgcccgcaaggcgatggcggatgcgcacctttcgggatatgacctgcaaatcgacgttcccggacaccggacacccggcgggcaactgtggacgccgggccagcgggtgcatgtcatcagtgagccgcacgacatcgatgacacgtattttctgatggggcggagcttcagcgggggacggcccggcggtcagaccaccaccctgcgcctgaaagaagatggcatctggatccccgatgcatacccgaaagcccggcacaaacaccggcacaaaaagaaaaaaacagagctggccgttatacctgtatgggacatgaaatga

SEQ ID NO: 386895 - DNA, 1419 bp, Salmonella enterica
gtgagctggcaggataaccgccttgaggccagtttccggggcgtaacatttgaagtcctgcgggcacaggaaagcgtcagccgcgaccatgcagatcatgagtacccgaatattgatggcgcggatgttcacgacctcggacgtaaagcccgtacttttcgtctgacggccctcattcggggtgaggattatgatacccggttgaataatttcctcgttgagctggacaagccgggccggggggaactggtacacccggtctatggttcagtccccgcagtgcagttaacggaataccaggtcagccatgaggcggacaaccttgataactgtacggtggaaatgacgtttctggagtcggtcaccggcacgaattttattaccgtcacgccggagcagcactggtgggatgctattttcaatgccctggacgacctcaatgacaaactggcgtctttatatgatgccgtatttggcccttacgaacgtttaaaggggcttttaaacaagggtaaagcggcattatccgccctgcaaaacacgctcattatcatgcgcggcagcgccgtcggtactgtcgatgatgtgcaggattttctgagttatccgggccgttacattaatgagctgggcgacattctggatacccgttcactggtggcccgcgtgacgggcctcagcgtttcccgtcagactccggcacaggtggccgtaacgttcaccccacagggcagcgcagtcacacccacagcgagtctgctgaataccggcacgaacgcgaccacatccacgtcgccgcagttgcagaccatcgcgccggcattaagcgcgtggaaagcggacatggcaacgatggcgacgctgaaaaccctgcccggcgcacttgttgaagggacgcagaccccggttctccccatgccggcaacggccactgtggcagatgttgccgatgtgaccgccctgcacacgggcattgctgccatgaaagcggcagaacgtgccacggacatgctgtcctcaccggatatcacggatgcgctgtctccggacgatatcgtgatgataaccgggaccgtcagaacgcatattcagcaggccattacggcaatccgtaccgcataccagccgacggttgtaaccctcagttcggacgcctgcgcggtcgggttactgtggctgccggtggtggagcagttgcgtaatatcgcgctgggtgtgcaggttctggctgaacaggtcatcgcccgtcgcccgccgctgaccacccgtaccgcagagcaggatacctgtctgcacctgctggcgcatcagtggtacggcgaccacacccgcgccggcgagttgctgcgtctcaatccggggctgcgcaatccgaacgtcatcagaaagggagaccgcctccatgcttacagccggtaa

SEQ ID NO: 386896 - DNA, 2262 bp, Salmonella enterica
atggcccgtgattttaagctgtcgatgtcgttaaacctcaaggacaacgcctcaaagctgctcgccagcctgttaaaagaagggacgaaacaggcatccgaagcggaaaaagccacaaagcgccagagcgaggagcagcagaaatccaccaaagcggccatcagtctggagcgtacccgcgccgccgagctgcggcgcaatgccagagcacgggaggcgctgggcatcagcagcgagcagaccatccgccgccagatagaccagaccattgccgcctataaccgcctgacccgcgccggcgtgatgtctgccacagaacagagccgcgcctttaaccagatgcgcagccgcgtggccgcgctgcgaagtgaattgcagggcgtgacccggctggagcgtgcccgccagaccggcagaaacgtgatgactgtcgccggcggcgtggcagcagccggggcggcgctcgtgcagcccatccgtaaacagatgagctacagcgaacggctgacggagatgaccaacaccgccttcagcgaccaggatattgccggacgaacggcgggaatgcagcgccttgacaagctgatccgtcagaacgtccagtccagtggactgagtaaagaaggcgtgatggatgcagctaatgccctgtttgccagcgggctgaaagaggatgccgtcagcaaactactacccaccattacccgttatgcctcagcggccaaagcgaatccggtggagctggcaaacgttgccatcaaagccaaaagaaactttggcatcagtgacgaacagatgccaaccgcactcaatatggctatcgccgccggacaggccggtaactttgaactggcggacatggcgaagtggctggggccacagatggctgccgctcacggtgcgggtatgtccggtctgaatgatttaaaaaaattgctgacgcttaacgaactgtcctccctgactgcgggtagtaatgacgaggcgggtaacaacgtggtggatctgcttgggaaactgaccagtgtcgatacggccagagcggctgcacgtatcaaagtgaatggcaaggggattgatcttcccaataccatggctggtgcacgggaaaaaggactggatcaaattgaagccctgtcacgggtaattgataccgtggtggcaaaaaataaaaactatcagaaattacaggcccgcctgcaggcgctgggtaaggatgacaaggacgggatgcgggatacgctgactgccatgtccaccattctggagggggccggtgtgggtaaaattattgccgatcgcagagcgctgatggctatgattgcctaccgcaacggcaaaggctacaaagctgaaatcgattcaaaaatcaacgcgcagcagcatctgaaaccaggggaatcaggcgcgggcgacctgaactttgaattcaactcgcagcagccttggtacaaagcagaccaggcaaagaacgcctgggattttgcccagatggatgcggttaaagggccggcgcatctggtgggcacctttgccggcgggctggctgatgccgccgaaaaattccccggactggcaaccgccgttgccggcgcgacaaccgccattcaggccatgacgcaggcggcgctggcctttgccggactgaagttcctgacggaagggctgggcgcgctaacaggtaagccgggggcaaaaattccttcccgtacgccggacggccccttaccgggtaagaatggttctctcatcggtggactggccgggttactgaatatcgggatggctgtaaccgcaacggccaccgccaccaccccggaagaagacgaggccgttaacggcagcgaggagcgctggaaacggatccgcgcaaaatacccgcaaaaggttattgatgctgcccgaaaacgttaccagccgtggtatcagtttggcgaggggtattccacggagaacgaacgctggatcgcgcagtatctggctgatgaagccgccgggaaaatccacgatgatacggttaatccgggtcaggtgccatcacccgcccgcgataccataaatcccggtcaggtcatgaccgccacagttccgggacgcaacttttctggttcaggcggtaatcagtacccggcgagaccgcaacccattgaggtgaatcataaaaccgtactggaggtggacggacagacgctggccgaagtggtcaaccgttacaacgtacaggatgccgcacgtggtacaggcgcaggaggtggacagtga

SEQ ID NO: 386897 - DNA, 390 bp, Salmonella enterica
atgacggacaaacagaccctgaccgtggccggtgaactggaatacggcgtggcctttaacggtgaactgcattacgactttgagatgggcctgtccacgatggagcagacctatcaggcgctggatgccaccgaagccgcctgcggcaccaccgaaggcgcgaaagccgacctgtattaccgtatggcactgatggcgcgcacgttgcgtcgtcttggcaccattccgccggacgccctcacgccggaactgctgctggccgaactgacagcggaggactatgaccggctgctggatgcgaccattgcggttaaaaaaaagcggcagcgcgtgaagagcgatacgccggactccgccttgccatcctcgccctcggcccccacggcataa

SEQ ID NO: 386898 - DNA, 375 bp, Salmonella enterica
atgttagatgaatacgtgggcgcgattgtgctggaagtggacggggaagagttcgaatgctccgacctcgacgtccagatcagcaccgggcgcaaactggtgaaaaccatgaacaagaccgggcgtgccaaaggctttacgcgtggcattgcgacctatgaactgagcctgtcggtggttattccgctgtccggcgacaaggactgggccggcatggagggggtgaaggtcactcagtacccggtcagtggttccggcgggaagcgcacgtcctatctggactgctttgtgacggacgtcggggccaaatataccgtggatggtgaagccaaacgcgatatcaaaatgtcttccttacgtgaggtgatcgaatga

SEQ ID NO: 386899 - DNA, 1437 bp, Salmonella enterica
atgaccatcgattttgacaccatccccggcagcatccgcaagccgggggtgtatatggagttcaacacccggatggccgtcaacacgctaccgggtaacgagcagaccctgctgattatcgcgccgatgttgccggcaggcaccacgcccccgctggaagcggtgaatgtgttttcggatgatgaggcggcgacgctgtttggtgaggggtcgctggcgcacctgatggcgaaagcggccatcaatgccaacccgtacctgcaacttcaggtcatcggtcaggaagacgaccccgccggcgtcgccgcaacggggacgctctcactgaccggcccggccaccggcagcggcacgctgtccctgtgggtgggcaacacctgcgttaaggtggcggtgtccaccggcgatacggcagatgcgttgtatcacgccctggctgatgccgtgaatgcgacccgcgcgctgccggttacggcgtccgtgaccgtgacaggcacagcccccaacgaagtgaccatgctgaccctgacggcgcgcagtaagggggcgtggggcaatgatattgtcctgcgggcgaccagtaccgcaggcggggtgacgctgaccctgacggccatgtcggcgggtgccaacaatccggatattcagccggcgctggatgcggtctttgccgccgggcataacattattgccattccgtggacagaccaggccaccctgcagaccctgcgggaacacctgaaaaacaccgggaacgcaatggagcagcgcggcgcggtgggcgtggcgggctggccgggaagtctggcgaccggcaccacgcttgccggccacagtaacgacggacgcaccaccatcggctggtatctggggtcggtctgcctgccgggcattctggctgccacttatgccgccgtgattgcctccgaggaagacccggcacgcccgctgaatacactgccactggccgggctggatattaccgcgctgtccgaccgggcgggacgaacggagcaggagaacgccctgcacaacggcctgaccccgtttgaggtgggcaccggggataccgttcagattgtccgcgccgtgaccacctacacgaagaacgccgccggcgtggacgacccggccctgcttgacctgaccaccatccgcacactggactacacgcgcaaggcgtgccggcagcgtattgccctgcggttcccgcgtgagaagctgcgcgaccgtacccgcggcaaagtacgctcagagctgctggatgtgctgctgaaacttgacgacctggacattctggagaacgtcgaggccaacaaggacaagctgcgcgtggagcgtaacgggcaggatgtgagccgtatggatgcggccattccggcggatgtggtgaacgggctgcacgtgttcgcgggccggattgatttatacctgtaa

SEQ ID NO: 386900 - DNA, 213 bp, Salmonella enterica
atgaaacaactgaccgtcagagcggcggacgggctgcatgttccgctggaagacaacccgcgccgccatattggcgcagagccggtcacggtccccgaccgggcctattaccgtcgtctgctgcgtgccggcgacctgctcgatgccacggcgacaccgacagagaccgtcaccccgaccgagactaaaaagaaacgtgaggcccgcaaatga

SEQ ID NO: 386901 - DNA, 654 bp, Salmonella enterica
ttgatcagcataattgagcaggccatctgtgaccgtctggcacagggtctggggaaaatgcagaccagcgtgaccacctacggcggcgaactggatgatgacctggggaaaattgttcgccgtctgccggcggtctgggtcacgttcggcggcatcaccggcaccgaaccgtacagtctgtcgaagcgccagtggcgaaccaccggcagctttgcggttatcgccggagattacagcacccgcgacgagcagacctcccggcagggcgggccacgctataacgaagtgggcacctataacctgatttacgccatccgccggctgctgaccgggcaggatctggggctgaaaatgaatcccctgaaaccgacccgcgtgcgcacgttgttcaacacccggctggaagcaagagcggtgtccgtgttctcgctggagtttgagaccgtgtggctggaagaggcgctgccctgcggggcatggccggaaccctgcgacgataccggcaactgcgaacacctgttcacaaaataccggggccgcctggctgaaccggctcccgaccttctgtgcgtggggctgcgttataaccgtaccggcgtggatcctgctgatgcgccggaagacctggtaaaactgagggacaaaacaccatga

SEQ ID NO: 386902 - DNA, 429 bp, Salmonella enterica
atgtacgcgacaccggaagatatgctgctggccttcggggaggatgaatgtgccgccctgtgcgaccctgactgtgtggggttacctgatatccccgttatgcagggggcgctggaacgcgccagcgcggagattgacggctatctggtggcgcgttaccccaccccgtggacggacacgccacgcattctggtcggacggtgctgcgatattgcccgttatcacctggcaaccgcgcggcgcgttctcagcgatgaaatccgcatccgctatgaagatgcgatccggtttctggagaaggttgccgccgggaaaatcgggctgggccggacggcagacggtgagccggtgaaagccggttcacagatgcggtttatttccggcacccgccagttcggacgggatgccacccgtggaggtgcattttga

SEQ ID NO: 386903 - DNA, 399 bp, Salmonella enterica
atgatttacatcacctcaaaacgcgacggcttctggcgctgtggtgtgtctcacagtgaggccaccaccgcttacccggatgaccgtttcaccccggacgaactggcgcggctggaagcagagccgatgctgattgtgtcccgtgacgcccccggcgatgacggtgcccgcacgcaggttcaggcgctgaaatccgcgttacagaaagcggaagccgatgtggatcacttgtccgggcaggtgctgacgttgcagaaacaggtcagcgacctcacggaacaactggctgaaacgcaggatgcgcgcgacagtctgacggcaaaactgaccgccatgacgaaagagcgtgatgcgctgaaggcatcagccaaaggcgacaagccggcggcaaaaaaataa

SEQ ID NO: 386904 - DNA, 912 bp, Salmonella enterica
atgattattaacaaaaagaatatccaggtcttttttgtcggcctgaaaaagatttttaacgacgcgttaaaacgcagtgaaggccagtggcagaaagtcgccatgaaggtgccgtccaacacctcgacggaagattacacctggcttgacgacttcccgcgtatgcgtaagtggatcggcgacaagttcgttaaggcgctggcagcgttcaaatacagcatcaccaacgatgactgggaaaccaccatcgaggtcgatcgcaatcaccttgacgatgaccagaccggccagtatgccctgaaagccaaaagcgccggtcgtgcggcggcagatctgcccagcgacattgtgtttgaactggtcaataacgcctttaaaaacacctgttacgacggtcagtatttctttgatgacgaccatccgcaggcaaacggcaccgcgtccaataagggcaaaaaagctctgtcctgcgccagtctggcaaaagccaaagcctcttttggcgcggctaaacagcagatgcgccgctttacggacagcgaaggccgcccgctggatatccgcccgacggtgctgctggttccgccggaactggaagacaccgcccgcgccctggtgacggtggaacgcttcgaggacggcaccaccaacatctaccgcaactcagtggaagtggtggtggagccgcgcctgacgtctccgaccgcgtggttcctgctggacaccacccgcgaggtgatgccattcatctaccaggagcgtaaagccccgacgctggttgaacagactgacccggaagcggatgacgtcttcatgcgccgtaaatacaaatttggtgcagaagcccgcgcggcaggtggctacggcttctggcaactggccttcggctccaccggtgaggaggcagcataa

SEQ ID NO: 386905 - DNA, 399 bp, Salmonella enterica
atggacagaaatacagcattcacggacggcgaactgttcggcgtgccgtgtgaagccggcgcggtgattgatgccggtcatgtggtctgcgtcaacgccgccggctttgcgattgccggtgcgccggcggcggacaataccgttatcggtgtctcggatgatgtcgccgataacaccggcggcgcacagggggcgtgtcgggtgatggtgcgtcgcaataaggcgttcgcgctggataacgacacggcggccccggtgacgcaggcgcttgtgggtaaggactgctacctgcttgacagccacaccgtcaccagtaccgacaacacgaaggcaaatccggtcgccgggaaagtgctggctgtctccccggaagacggggttctggtgctgattgggtaa

SEQ ID NO: 386906 - DNA, 1161 bp, Salmonella enterica
atgaaacccttatttgctgccttatcgcttgaacttcctgccggcgtcacgccgtccgggcgggttcgtctctttcccgccggaacattccgggggctggacggacgcccgaaagagtgcgccacgtgggtgatgaacgccgtctgtgcgcagcgtctgattaaccaggtcaacaaccagaaaaccgagctgtgttttgactatgagcaccagaccctgcgggccatgcagaacggcaaacccgccccggcgtccggctggtttaaatcgctggaatgggtcgaaggtgacggtctgtacgccaccgatgtgcgctggacagatgccgccagcgccatgatttgcgcccgtgaataccgctacatctccccgtggttccggtactccgccaccaccggcgaggtgctttccctggtcaacgtcgcgctgaccaatattcccgccctggacgatctggatgaggtggcacaggccgccgcctgccgtctggcggcgttatcgcaaaccccatccgaacaggagacctccccgatggatgaagaacagatcagcaatctgctggcgaatctgcgctggatttttaatctgccggagaccgccaccgctgaggacattaaagctgaaattgacaaggtgatcaccgccatgagcggcggtcaggggacggcggccaccagtcagggactgatgccgtggattgaagccaaagacaaccagctgaccgaacagaccaccgcgatggcggccctgtctgcgatcgcttatgacccggcgaagcatgtcccgattgaagccctgaacgatgccctgcagcgtctggcgcaggctgaacgtgcgaatgccgggcatcaggtcaatgacgtggtgcaggcggcgctgtctgacgggcgtttgctgccgtcaatggaagactgggcgcgccagctgggacagaaagacatgactgccctgcagacgtatctcgataacgccacgccgctggcagcgctgagtcagttacagaccggcggcgcggccccgtccggcgcggtcaccacaaagcaacaacaggacaccggcgttacggcgctggacgatgagacacaggccatctgttcctcgctcggtctggatccacaggacatggcgcaggaaatcgccgccattacgggaggtcactaa

SEQ ID NO: 386907 - DNA, 552 bp, Salmonella enterica
atgtacactattgagattgacaccaccggctttgaaaagtcccttgaccgcctgattaaagggctgacacagcgcaaacccctgatgcagacgctggcgatgcatatgctgtttgcggtggaaaaaaactttcagcaacagggtcgtccggcgtgggcaggctggtcgccgcgttacgcacgtgaggcccgcaggcgcgggcagaccaacattctgcaacgttccgggcggctggcggccagtatcaccccggtcagcgataacgacactgcccgcgtcggcaccaacgtgaaatacgccgccattcaccaggaaggcgggcagatccacattgccgcccgcagccagcaggcgtattaccgccagtacaaaaacggcagcgtgggaaaccggttcgttaaaaaggggcgcagcaactacagcgaatggcacaccctgccggagtacaacatcacgatgccggcgcgcccgttcctgtcgcttgatgacagcgattcggcggatatggaggacagcgtgcagaagtatctgcgcggcctgaccggaggataa

SEQ ID NO: 386908 - DNA, 1173 bp, Salmonella enterica
atgccggcgaatgaaggggttgatctggcgtgggcgatggggctggccccggcagaagcggtggaatacttcgaaagcaagggctacgccatcggactgcactggcatgatgtggaagctgccgcacaggcgaaagccttcaccgtggcgggcgtgctgaaactggatattctggccgacatcaaaaccgccacgggggacatactgaagaacggtggcaccctgcgggattttgaacggcagttaacccctgttctggagcgtaagggctggctgggcaaaggtctggtggtggatgaagagaccggcgagctgcacggcaaacgcctgatgccccgccggctggagaccatcttccgcaccaacatgcagtcggcgtatatggccgggcgctggcgtcagcagatggagacggtcggcacgcacccgtacctgcaatatgtggcggtgatggacatgcgaacccgtccgtcccatgcggccctcaacgggcgtattttccgttacgacgatccgggctgggccgccttttatcccccgaacggttacaactgtcgttgccgggtttgtgccctgacgcccgaacaggctgccgctgatcccgtggggccggagtccaccgacgggcggctggaggaaatcgaccaggaatacggcattcccggccagacccgcagggccaccggctttcgtgacccgaaaaccggcgagctgtttgtgccggatccgggctttggcatcaatcccggccaggtggcatggcagccggagctggacaaatacgagacccgccccgcccgccagtacatcaccgccagcctgaccggcccggcctttgcgcgggggtatgcgcaggcgaaggccggaaaggcgcagaacgcgcagtctttcccggttgccatgacggacggcgcgccgggcgagcgccggatgatttccctgatgcaggccgacatggctgaacaggcgcaacgggacgtcccggtcacgctgccggattatctgctggcacaacaggctattgaatccccgacccgcgttattgatgtgccgcccctgcgctgttatgccctcgaatggcaggacggctgggtcgtgtctgtcgtccgggatcacaggctgaccgacgtccggcgcggcccggtactggacgacctgctcccggaggcgtga

SEQ ID NO: 386909 - DNA, 1569 bp, Salmonella enterica
atgccacaaatcgttgatcagtacggcaacccgctgaaacgggatgccctcaaaaccccccagaccgtcaggctggcggagatgtaccgccagtatccggtgcatccgtcatcggggatgaccattcgccggttgccccgcctgttacgggcggctgaacagggcgacctcggcgcgcaggcggccctgttcgccgatatggaggaacgcgacggccatatttttgcagaaatggagaagcgtaaaaatgtcctgctgacgcttgatcgcactattgcaccgcccctgaacgcgaccgccgccgagaaaagcgctgtcgccgccgtgacggagtggttcagcggcataatggatattgaagatgtgatccttaacggtatgagcgccatcggacacgggttcagttgtcaggagatccagtgggccacggtggaaaaaatccttatcccgcagaatctttacctgcgcccgcattactggttccgttccctgcccgaacagggcgaccagttgcggctgaacagtgacgcgcctgacggggatgcactgtggccgttcggctggctggttcaccggcacaatgcccgcagcggttttgtcgccagcagcgggctgttccgggtgctggtctggccgtatctgttcaaaaactactctctgcgtgattttgcggaatttctggagatttacggcctgccggcgcgtatcgcctattatgcgcccggcacgtcagacgaagacctcgacaaactgctgatgagtctggtgcgtctcggtcacgatgcggtcgccaccatcccccaggggaacgaaatcagatttgagaatgcggccaccggtggcggtgatactttcatgaagatgattgagtgggctgaacgcactgaatccaaagtgatcctcggcggcaccctgaccaccgaagccggggaacggggcgcgcgttcactgggggaagtccacaacgaagtccgtcatgacctgatggtctcggatgcccgccagactgaaggtatgttccgctcgctgatccagatgatgctggcggtgaacggttacgatatcccgctgcaccgccagccccgcatggtgtttgatacccgcaaggatgtggacatgaccgactttaccggcggtgtggcggcgctggtcgctgccggcgacagtgccatcccggtaagctgggtgcataaaaaactgggcatcccggccgttcagggcaatgagccgacccttcagccccccgcgccgtcagtgcctgcggtggcattaagccagacgccggcggcacaggcggcgctgagccagacccccacggatgatggcgatgtggatcccccgcagcaggcactggataccacgccgtcaccggcggatgccgtcaatgcggccatctcgcaactgctggccccgatggtgaccgccattaaacagggaatggatgccgatgcggccatgtcgctggtcgccgacagctacccgcaactggatgacacgcagttacgggaactgctcacccgtgccatttttgtggctgacctgtggggacagtgccatgccggcgaatga

SEQ ID NO: 386910 - DNA, 1638 bp, Salmonella enterica
gtggctaagaaatttgatcgcagggcatttcgtgaacaactggcagaatacattgccagcctgcgccagaccattgaggcggaatgtcttgattttgacgttgatccggcagcccgtgaagcacgccgccggcaggtctgcgatccgctgacgggctacgatttcttcacgaacacctattttccgcactatatccgcaatccggcccgtagccagttgcacaactacctgttttcccggctgccccggattgtcgcctcgccggacagtgaggatgacgccatcgccgcgccacgtggcgaagccaaatcaacgctggtcagccagttgttcaccctgtggtgcatcatccgggggatcaaacattacccggtcatcattatggacagtattgaccaggcttacccgatgctggaggctatcaaggctgaactgacctttaacccccgtttaaaacacgattttcctgacatctgtcagcagggccgggtctggcagatgggcaccatcattaccgccaacaacattaaagtgacggtggccggttccggtaaaaagctgcgcggcctgcgccacgggccgtatcgccccgacctgattattcttgatgatatcgagaacgacgagaacgtccgcagcccggagcagcgcgacaagctgcactactggctgaaaaaaacggtgatgcccctgggggaagccggcggcaaaacggacattatctatatcggcaccatcctgcattacgattcggtgctggcccgcacgctggataaccccctgtggcgcaccgcgcgatttaaagcggtgatccggatgcccgacaatatgtcgctgtgggatgagtgggagacgatgctggccgaaaagcggctggatgatgcggagcggttttatcaggagaatgaaccggccatgctggccggggcggtggtgtcatgggcggcccgttcgctgcttgatctgatgaaaatccgctttcgtgacggtcacagcacgtttgacagcgaataccagaacgacccgaccagcggcgaggatgccatctttgccggctgtatccatttctgggttaaccggctgaacgaatggctgttctatggtgccgttgaccccagtctgggcaagttcggcaacaaccgccgcgacccgtcggccattctggtgggcggttttaaccgctttaccggcattcttgatgtggtggtggccgatatccgccgccggctgcccgacaaaattatctccgacaccattgagctgcaacgtcagtaccactgtctggcgtgggcctttgagtcggtacagttccaggagttcctgcgcaccgaactggtgaagcgttctgcacagctgggcgtgccggtgccggccattccggtcatgccctccgccgacaagctgctgcgtatcgaatccctgcaaccccacatgcagaacaaccttatccgcttctgtaaggacgggatgcagaccctgcttgatcagctaaaacattttcccaaagccgaccacgatgacggcccagacgccctgcatatgctgtggtcgctggccgtttcccgggcggcgggcgttcaggttaaaacagcctcccggcatggcgaaggcgatcgctttggccgtggggcatggtga

SEQ ID NO: 386911 - DNA, 147 bp, Salmonella enterica
atgaatcagaaaaagcaggagcatgacgacggtcagcgtgaggctaccggtcatcaactggaacacctggatgatgaaaaaacatcctgggcaccattacatgctctccataaaccattactgcccgatcccgacgaaaaggattaa

SEQ ID NO: 386912 - DNA, 462 bp, Salmonella enterica
atgtctcagccatcccgtgaacaggtttttactctctgttactcccactacctggaagcgatgacagaaacgttaaaccggcgttgtgaacgcatgatctgtttctttcagttcctgctcggtagcgcggttttcgcccaaagttcgctggggtggctctttggagccaccgttgctgtctgtgctgcgctccagtattcctggaatccgggaaaactcgccgcaaatgcccgcaaacaatcattccgttaccagcaattgcgtaacaatctggacaatctgaccgcaaagacgctggcgcaggaaatgcagattgttgagcgtgacgatagcctggtaacaaatgcgctactgaatcctgcccgctgccgtgcatatatcgcactgggatggccgcaggtggaaaaactaacccgttgggagcgcatcgtggcgtttctggctggcggtatcccgcaatag

SEQ ID NO: 386913 - DNA, 174 bp, Salmonella enterica
atggaagccgtaacgttaaatgtggagcaaatccgtgaactggcgacgttcgtcggtctgagcgttgaggtgccggacggtctggagaccgacacccgatggaacatcaccccggctgtattccgggttttgagacggacaccggagagaactttccgggttacaacggactga

SEQ ID NO: 386914 - DNA, 219 bp, Salmonella enterica
atgacttcggctgagaaacaggaattcgccacgctgctgtatctgttccgtggcatggccgcctccgccaccggcgaagagcgtgcggccattgatgccgcagaagcagaatcccgtgcgtttattgaaaaactgcgcgcagatcatccggatggcagcggtctggtcggtggcctgattgcggtactggatacgattgttaacagtgacattgtgtaa

SEQ ID NO: 386915 - DNA, 501 bp, Salmonella enterica
atggcgtattccagggacatccgcgacaaactgcgccggctgtacatctataaccagtggtcgctggagattgtggcgtcccagacgggcgtggcgttttccaccgccgcccgctggaagaaagaagcacaggacagcggcgacgactgggacaaaatgcgcgccgccaacctgatggccggtggcggcatggaggacgccgggcgggcggtgctgatgagtcttgtcacgcaatgtcaggcggcaacggaggccatcaacaccgaagcaaacctgccggcagaaaaacgcgtggaactgctcgccagtctggcggacgccttcaataaagcgacggcggccagcaaaaaaatcctgcctgaaaccaaccggctggctattgctattgaggtggtgcaggcgctgggtgaacacattaaccggaaatttcccgcgcagaaactggcgtttgtggaaatcctcgaatccttcagtgaggtaattgaagatgacttcggctga

SEQ ID NO: 386916 - DNA, 237 bp, Salmonella enterica
gtgaaaccacgtcagcgcaataagcgacgtatgcataacgtgcgtcagtgcgatcccgtactggccgacattaacgccagtctgcaacaccttgatcagcaactggacgatatccgggacgccgccacgcaggccgccattaaacggggcgcggtggccggtgcgatggcgggcggcgttgccagtctggtggtcactaccgccgtcattctgatccgggcgcggatgggctgctga

SEQ ID NO: 386917 - DNA, 558 bp, Salmonella enterica
gtgtttacaacactgaaccgtattaccctggcgggcggcgtctgtctgctgggattactgatctggtttcatcaccgctatacggaagatgagaccgccataggtcaactgacccggaaggtgtcaacgctgaccaccgaacgggatgacgcccgcagggcacaggcattgcaggtatttcattttaaccgtatgaaccgtattaccggggaggctcaacgtgcaaaccagcagaccgcagaccaggcagaacagcttcgccatgaggtgcataacagtatttcgtcacagtcctgtagtgctgtgttgctgcctgccgttgattctgaccggctgctcggctatgtcacaaagctgcgtcaggccgcccttcacccggataccgccgcagatactggcccccaccgttccggctctgccacccggcgactgacatggggacaggcggtggaatggcttcccctgctgctggggaatattcagtcatgcaatcaggataaagcggcagcccgccgcattgatgaggagcgaacccgtgaaaccacgtcagcgcaataa

SEQ ID NO: 386918 - DNA, 537 bp, Salmonella enterica
atgaccctcaacaccggcagcaaactctctgccgtggtctgttctgtcatggtgattatcgcgctggcggcggtcaggcatccggggcagttgcgcacgtcgcggcggggacagttgtttattgccggcgcggaaggctgccggcgtgcaccctaccggtgtttggccgggcggcccactgtcggcatcggcagtaccgggcacgtcatcatgaaccgccggtataccgataacgaaatcgccgaccgctggttctctgatatgtacaccgctgaaacctgcattaaccggtattttaacgggcgtttaatgccgcagttccccttcgaggcaatgacctcggcggcgctgaatgtcgggtgtaccgacctgcggtggaacccaaaacatcaccatgtgacgcagatttaccgggaagcgcaggcgcagcactggccggcgatgtgccaccgtctgccggattttcgttattctgccggtaagcccgttctgctggcgcgccggctccgggaggaggcgtggtgtttacaacactga

SEQ ID NO: 386919 - DNA, 753 bp, Salmonella enterica
atgaaaaaacgcattatcggcaatgccacgctgtactgcggagatgcgctgaccatcctggctcaactggcgcaggagatgcccggcggcattgatgccctcattaccgacccgccctacagcagcggagctactcataaagccggacgtaccacgcaggccccttccgaaaaatactgcaaggacgtcgactatgccgactttgccggcgagaacatggaccagcgctcgtggcagttctggtcgcagcagtggcttggccttgcctgtcgtctggttcgccctgaaggttacgcgatggtgttcagtgactggcggcagttgcctgcactgaccgatgtttttcaggcgggtggcttcgtctggcgtgggattgtgccgtggaacaaaaccctgtcatcacgtgcgccgcataccggctatttccggcaccagtgcgaatacgtggtctggggcagtcatggcggtctggcaaaaaatcctcatggtggcccgtggccgggcatgttcacctgccgggtcaggccggcagaaaagcgccatatgaccgccaagccgttacccctgatggcggagctggttaagccggtcatgccgggcggggtcattctcgatccgttcatggggtctggcaccacagggctggcagcgctggcgcatggctgccgtttcatcgggatcgaagtcagcgaacactattttgatgtggcctgcgaacggctggacgcagcagttaacggagggaatgtatga

SEQ ID NO: 386920 - DNA, 198 bp, Salmonella enterica
atgaacccgcaacattccacactgtccgtttacatcacctcgctggcgacatttttgatcagcctgatgccgcttgagcagtggatggtggtcgggctggtcgtgggtattgccgccacggtgattacgtgtgtgaccaacgtcctttttcgtgtcctgtcgtaccgggtgcaaatccggcgctggaggcacaaatga

SEQ ID NO: 386921 - DNA, 288 bp, Salmonella enterica
atgacagactttacacaatacggggtgtttacggcgtaccgtgagcaggcttatgatgctgcgtattgtcgctatgccctgcttcaccatctcagccgctggctgatgcggctgagatgcccggatgatacgatgtttccggttgaagaccttcaccgggcagtggatgaaatcgttctcgccgaccgtgaaatgcgcgccgcgctggcgcaggcgaatgaggctgctgcgttatgtggtaaaccgccgttacaccttcatgacctgacccgcgcccgtaaggggtaa

SEQ ID NO: 386922 - DNA, 468 bp, Salmonella enterica
atgcagaccatcggggacgttgagctggaacgcgtgcagcgcctgctgccggattctgccctgcaactggttgatgtgctgggctggcccgcgaccgcacgcttaatcagcgcattcggcggagccacgctgtcgggtaagtccggcgtccgcgctgaacggtctggcggtgtacataagctgctgcgcagtgtactgaccgaagatgagagcaaggcactaacccgatatctgggcggtgcgccgttttatattccccgttgcgatcaggcgctccgtgccctgcgcaatgcccgcttcctgtcggagctgcatcagcaacaggacacggggcattccatccgccagtcgctggcgctgctgtgcccccgatacggtatatcagaccgctatgcatggcgtctcatacgggaacgatacaattcgcaactgctgaaaagccccactcaggtggggctttttgattaa

SEQ ID NO: 386923 - DNA, 477 bp, Salmonella enterica
atgatgaaaaaatttttgttattaatggggatcctttttacctttcaggctatggctcaaccggatgccgaaacacagaaggaaatcaaacgataccatgcgcttaaaccacaggttgaaaaactactgaaaaccagtaattcgctttactatgatatgcccgatgcggcctatgattatcatcaggggaagccagaagcatggcgagaaatgtttaatcgtctgaaaaaactggatactgaaacgcacaaggcgttaggcaatgacccgttggagcctgtttatggtcgctgtgttgcaatggaaaacatacttacatcatactggcaggatgtaatcagcggggatgcaaaaatttctcaggctcagtacaaagaaaaccgactggattgtctggaaagttacgtgtttggtctggatcggataaatgaaaataaagacctcgcagtcgtcccggtctgggatatgccggactaa

SEQ ID NO: 386924 - DNA, 459 bp, Salmonella enterica
atggtgcgttggcgttcggtgcggtatctgttgggggatggtgcgatgaattcacctgtcgcaaaacgccttattggcgcagttaaggccggccagtcttttctgggctgggatgatgtgacttaccgtagtgttatcgcccgtttaacgggcggtaaaaccagcgcaaaagcctgttccatacgggagttgtccgacatcaaagagtatatgcaccgtcagggattcccgcgtaaagcccctgctggcaaaggtcgtcgccctaatgttgccatgaaccgtaaggcgatgttgtcaaagattgaggcgctgcttgctgatgccgggcgttcgtggacgtatgccgaagggctggcggcacatatgtataagcaatatgtgatcgagtggcttagcgatgaccagcttttcggtgttatggtggcgctcgtcaaagattcaaggaaacgaaataaatga

SEQ ID NO: 386925 - DNA, 501 bp, Salmonella enterica
atgagcagccacaaaaatgacggaagtattgccccgaaggaaagagtcaacatccgctataagcctgctgtaggggatcagacagccgaagttgaacttccgcttaatttgttgattaccggaaatctgcggggaacctcagatgataccccgctggatgaacgccagccacttgctattaaccgtaacaattttaacgcggtgctggagcaatccggcattgagcgggacttctctatcccctccatactgggcgactcgccagatgcccggatgaacgtgaatctgaaagtgaaatcgctggccgatctggctccggataacatcgccgcccaggtgccggaacttaaaaagttgctggagttacgcgaagcactggttgcgttgaaaggcccgatgggcaacctgcccgctttccgcgcccagattaaggcactgctggataacgaagaaagtcgtgaacaactgatcgcggaactgggcctcgctggccggaaataa

SEQ ID NO: 386926 - DNA, 1491 bp, Salmonella enterica
atgtcagataccgatattgcattgcaggaagagattgctcctgcttcctccgtagcgatgccctccctgctggataacgttatggcgcagacccgttttcaacctgcgtctgaaagttacgatatcacccgtcagggcgtgactgcgtttattgcggccatgctggaaagcaataatgacgaagaacctgttgatattctggcggtaaacgccatgattgccgacattgacgaccgcatgggccgccagatggatcttcttgttcactccccggagtttcaggaactggagtcatttctgctgtcgctgaagctgctggttgatcgcgccgatccgcgggaaaacatcaaaatccatgtactgcacgccaccaaagaagaattgctggacgattttgagtttgcgcctgagatcacgcagtccgccttctacaggcatgtttactccagcgggtttggtcagtttggcggtgaaccggtggcggccatcatcggcaactacgcctttaaaaattccacggcggatatgaagctgctgaaatacatcagcgcagtcagtgcaatggcgcacagtccgtttctttcctcggtatccccgaccttcttcgggctggagtcgttcaccgaactgcctggcatcaaagatgtcgctgccatttttgaaggcccggcctatacaaaatggcgtgcgttacgtgaggcggaagacagtaaatatctggggcttaccgcaccgcgtttcctgttacgccacccttacgcaccggatgaaaacccggttaaaagctttaattatcgcgaagatgtcagccagaaccacgaaaactacttatggggcaataccgcgttcctgctggcgtcaaatatcgctgaaagctttgcccggttcaggtgggcgccgaatattatcgggccgcagagcggtggggcagtgaaagatctgccggtacatctctatgaggccatggggcagcttcaggcgaaaatcccgaccgaaatcctcatcactgatcgccgtgaatatgaactggctgaggaaggcttcatcaccctgaccatgcgtaagggcagcgacaatgctgcgtttttctcggcaaactccgtacagaaaccgaaaaccttcccgaacacggcggaaggcaaagctgctgaaaccaattacaagctgggtacgcaattaccctatctctttgttattacacgattagcgcactatatcaaagtgcttcagcgcgagcagattggctcctggaaagagaggggtgacctggagcgcgaactcaatacgtggatacgccagttcgtggcggaccaggaaaacccgcctgccgatgtacgcagccgcaagccgctgcgccaggcgaaaattgaggtgtcggatgtggaaggtgaaccgggttggtataaggtctcgctctccgtaagacctcattttaagtacatgggtgcaagttttgacctgtctctggtcggacgtctggacagggagtaa

SEQ ID NO: 386927 - DNA, 429 bp, Salmonella enterica
atgccagaggagcgggtagccggaggaagtctgtttgagcgcatccgggaggcggcgaaaccgtctgtacgcaggaaaccggaagaggcgctgttgcgctccatccagagcaacctgcgaaatgtgctcaatacccgctccggcagttgctatggttcaccggaactggggatatctgatctcaatgacgaatcgttggcgtctcaaaatatcaggaatgccacggccagaatgatcaaggagtgcatccggcgctatgagccacgggtttcctgcgtcatggtgacaaccgggacgcaggatgaatatgcgccgctggaactgcgctttcatatcgtggcttatgtgggtttttgtgatacccggaatattctggagtttgacattctgctggataaccatcagcactggtcagtagaggtacagtga

SEQ ID NO: 386928 - DNA, 1836 bp, Salmonella enterica
atgccatttgaagaacgatattaccgggaagaactggattatttgcgtcagcttggcaaattattggcgcgggaaaaaccgcatctggcccgctttctggctgaaaaggaaggcgatccggatgtggagcgtctgatggaagggtttgcctttctttccggtagtctgaggcaaaagctggaggatgagtttcctgaattttctcatggtctgatcaatatgctgtgggcgaactatctgcgcccggtgccagccatgaccatcattgaatacaagccgtttaccgcgcagctttccgcccccgccagagtttgccgtgatgaactcatctgctctggcgttgttcgggtggaatctgctggacggaaaaaagtgctggctgacgataacgctgagtcccctcctgtgtgccactttacgctggcgcgcgatacctggttacagcccctccatattcgtaatgtccgtgatgtcagtagtctgaaaaaaggcattattgagattgattttttcacggagggcaatatttcagcccggtcgctggatctgaataaactcacattctggctgggtaatgaggacgattatacccgacaccagctttacctgtggttcagtgaacgcctgatggacgccgaactggttgccggtgacagacggttacccctgccggatttatggctggaggccgccgggtttgaacgcgaagatgcgctgttgccatggccgaaaaacgttcataacggctatcgcacgcttcaggagtatttctgctacccggagagttttttcttctttcatctgcgcgatgtggctacattaccgaaggattttccggtacgtgactttacgttacgcctccagtttaatcagccgttgccggtcgatattaaactgcggcagcattcactgcgcctgtactgcaccccggcggttaatctgttccggcattatgctgaacctgtcaccccggacggcagcgcaccacagtatccactgagtgccagtcataactacccggattattatgacattttccaggtcaaatccgtatccagtaaagtcacggcctctaaagatacaccgggtccatcagagcgcgtgcgcctgtggcctgaatttgaaagctttcagcatcagattgagtacagccgccggcgcgaagtggtttactggcaccaccggacaaaaacctccctgtttcatcaggggctggagcacgccattgcatttgttcatgccgatggcagccagcccgcgccttctcaactgagcagggaggccatcacggcttcactcatctgtaccaaccggatgttacctgcgttattacacactggtgatatctgtgttgcggtcgataaaaacccggcagtagccgctttcagcaacgtcacgcgcccgacgcgcccgctctacccggtcacggacggcgatatgcactggtcgctgctctccagcatgaacctgaattacctctccctgcttgatcgtgaggcgctgattcaggtgatgcgcaccttcgatctgccggggattcatcatccgcaacaggcgcgcctttccagtcagaaactggatgcgattgaaaaactcgatacccgcccggtggaccgcctgtttaaaggcgtaccggtccgggggctgtccaccacgctgtggataaacccggccccctttatctgtgagggtgaaatctatttgctgggtactgtgctctcgcacttcttcgccctctacgccagcattaattcctttcactgcctcaaaatcatcaacacggacagtctggaggcctgggaatggcagcacaacggccagcacgccctgatgtaa

SEQ ID NO: 386929 - DNA, 1047 bp, Salmonella enterica
atggcagcacaacggccagcacgccctgatgtaaacgaggctgcaccttttccggcagacgtgcgcgggatgaatttttatgctctgatggactcgctgtaccgccggtacggcgaacccggtcaggagccatccctgcgtaccgagccgggcgatgagatggcattgttcaaatccgacgccagcattgcttttccgggcagcgacctgacgtcgctgacgcgcaacgacgcaggccagttcacgctgaccaccaaattcctgggtttctccggcagccagtcgccgctgcccggctattacctcgaccgtatggctcgggaatccgcacagaatgaagaagggctggcggcctttctcgatctgttcagccatcgctggacgcagtttgcttaccatgcctggcgtaaataccgctactacatctgttttcgcaacggtggtacggatgttttttcacagcgtctgtacgcgctggtcgggctgggcagccagagcgtgcgcgacaaactcgccatcaaccacagcaagatgctggcttacgccggtattctggcctctcccggacgttcacccgatgtggtgtgcaacctggtgtcccactgctttgatttgccggatgtcacgattgaaagctggcagttacgcaaagtcgccatcgaaccatcacaacaaaaccgcttaggtgtgcgtaatccaaaacagaagaccgccggacatgtcgccgggcggtcggttgttggcgttaattttacccttggtcgccgggttcccgatcgcagtggcaaatttttgttgcgactgagcaatctgtctatggcgcgttatctctcatttttacccgatggcgatcaccatgaagcgctaaaaatgtttgtttcttttttgctgcgcgaccagttcgcctgggatttacggctggatctggcaccggagcaggcgcagggtatgcgactgggcgaccgttccagttcgtgtctcaaacgcacggcgtttattagtaagccgaaaatgccgccgtccatcactctccacatcagggactaa

SEQ ID NO: 386930 - DNA, 1302 bp, Salmonella enterica
atggaaccgcatatggctgaggaaaaaccgcagtcttccacactatcgctgacattacaggtgatgaacggcaacgagctggaaagcggacgcgccgcaaaatgcctgttttccgccgaaggcggggatatcggccacgccccggcgtgccgctggccggtacaggatcgggcaggttctgttgccggtcgcgcctgccaggtaatcctgcatgacggggcattttgcctgcgcagcctgatgccggggctgatgataaacctcgccccggtttccgtggatgccgggctggtacgcctgcgccagggggacgagattggcctcggcgcgctggcgctgaaagtgtttattcatgaaggcaagctggtcagctacagcgaacagatggccgcgccggaaacgattgtcaccaaccgtgaccgcctggcggataccctgctgaccactgacggccagcctgcttatccgggaatgccccaccgccaccagcttgccgacacggtggtcaatggcttttccaccgatccgttgcaggcgctgcgggccgaaagcctgaccacaacgggcgatctgctttccggtggagtgtcgtcagcgccggtatctgatcctgtaaaagataacgagatcaacacgccgtttatggatctgccgccgctgtatgccgatccgcagggcagtaacgacaacgacacctctccggctgaaatggcgcagcgccatcttgctgccacgccgctgttacgcgggctgggcagttcactgaccgtgcgtaattctcaggatgccgatgattttctggaagaagccggacgaacattgcaggcggccattaaagggctgctcgagctgcaacagcgccagagcagcctgtcagacaaacacctgcgcccgctggaggataacccgctgcgcctgaatatggactacgccaccgcgctgaatgtgatgtttgccgaagggaaaagcccggtacatcttgccgcgcctgcggcggtcagtgaaagcctgcgcaatgtccgccaccacgaagaggcgaaccgggccgcgattgtggagtcactgcggattttgctggatgccttctcgccgcagagcctgatgcgacgcttcatccagtaccgccgcagccatgaactgcgccagccgctggatgacgccggtgcctggcagatgtacagccactattacgatgagctggcctccgatcgccagcagggttttgagctgctgtttaatgaagtctatgcccaggtttacgaccgggtgctgcgtgaaaaacagcgggagccggaagcatga

SEQ ID NO: 386931 - DNA, 534 bp, Salmonella enterica
atgacagggcgtttttttcgtgcctgtctggtgatggtgttatgtgccgtcgtcctgacaggctgcgaaacagccaaaaagctcggacaggtgatcagcaacccggatattcaggtgggtgatttgaaatcacagccatcggaaatgaccatcacgctgctgaccgagccggacattaatcttaatgccgatggcgaagccgcgccggtggacgtgcaactgatttacctgaccgacgactcaaaactccaggccgccgattatgaccagatagccagtacgccgctaccggatgcgctggggaaaaactatctcgatcaccaggatttcagcctgctgcctgacgtgatgaaaacgctgccgccagtgaagctggacgaaaaaacgcagtttatcggcgtggtggcgtacttttccgacgaccaggccaccgaatggaagcaaatcgagccggtggaagggacaggtcacagttaccgcctgctggtgcatgtacgacagagcagcatcgaaatgaaaaaagaggacaactga

SEQ ID NO: 386932 - DNA, 1344 bp, Salmonella enterica
atggcgaccatgaaaaacaaggtgatctggcaggagggactgtttgcccttccacagcattttcagcaacaacagcgcaatcacgaataccatctgaaccagcgcatgaccgcgcagggggattttgcctggggcttcacatcgctgatgctgaatacggaactgctggcccaggggaaaatcatgatcgaccgcgcatcgggctgtatgccggacggcacggtattcagtatccctgagcaggataatcttccttcaccttttcagccgatcgatttttccagacccggcagccaggatatttacctggcactgccggtggtgagcgatattacctgcgaaatcagcggtcgccagagcgcaggacagggaacggaacgttacagcccggcccgcgtggacgcccgcgatctgcactctgacgacggcgacgtccagcagatcgaggtcgccagcctggcgccccggatcgtcagtggcgcagaggatctcagcgccatggtcacgctgccgttgtgtcgtatccgcaacacgcaggccaccggtgccctggtgctggatgacagcttcatcccgacgtgccaggccatccgggtcagcagcgtgctggccgggtttgccggtgacgtacagggacttatccagaaccgggccagcgagctggctaaacggattggctcgccggaacagagtggtatcgctgatgtcgcggagttcatgatgttgcaaatgctcaaccgcaaccacatgcacttcacccaccgttcgcacctgcacaccctgcacccggaggctttttacctggatctggtccggttgctgggcgagctgatgacctttaccgaaaacaaccgtctgccctgtgaggtagaggtctacaaccaccgcgatctcacacagtcatttaaaacggtgatcccggaactgcgccgctcactcaacacggtgctgatgccgcgtgcacagaacctgccgctgatatttgcagacggtgtttatctcgccaccatcaacgatccggcgctgttacagtccggctcctttgtgctggccgtccgtgacaggatgccgagcaaccagattattctccagttcacccagcagtcgaaaatcgccgccaccgacaagatccgcaatgtggtcagcgtccaggtgccaggcgtcccgctgcgttcgctgactgccgccccgcgccagttaccttatcacgacggatatgtctatttcgaactggaaaagggcgctgcggcctggcaggacgtggtgaaagccggtgcgctggcgctgcatatttccggaaccttcccggatctggatatgcaactctgggcgataagaggctga

SEQ ID NO: 386933 - DNA, 813 bp, Salmonella enterica
atgaccgaacagaccgttctttcttcgggtggaagcggctacccggcagagggttttcttcaggacagtacggcgctgcctgagcatgacggggaaagcgcctgccgtcagtatcgtctcacgcttcgcggcaacagtctgaacccgatgatcgacgcggccacgccgctgctgggcatggtgatgcgggtatcggatatgaacagcaacgccatgccggagcacctgtttactcaggtggtgacggacgtacaggcggtggagcagctacttcaggaacagggctacgagccgggcgtgatcgtctcgtttcgctacatcctctgcacctttattgatgaggcggcgctgggtaacggctggtcgaacaaaaacgaatggattaagcagtcgctgctggtgcatttccacaatgaagcatggggtggtgagaaggtctttatcctgctggagcggctgatacgcgaacccgcgcgctatcagcatctgctggagtttctgtatatctgcttttcgcttggttttcgcgggcgctacaaagtcgccgtacaaaaccaggatgaatttgaacaaatctaccgccgtctgcaccacgttctgcacaagctgcgcggcgatgcgcctttcccgctgctgcaccaggataaaaaaaaccagggcgggcgctatcagctaatcagacggctgaccgtaaaacatgtgctgctgggcagcgtcgtggtgctggcgctgttttatctgttttacctgctgcgactggaaaaccagacgcaggatattctccatcagttaaaccggctgcttgccaggtaa

SEQ ID NO: 386934 - DNA, 2751 bp, Salmonella enterica
atgatccagattgatttaaccacgctggtaaaacggcttaacccgttctcaaaacaggcgctggagatggcggcgtcagagtgtatgagccagcaggcagcggaaatcaacgttgcccatgttttaattcagatgctgaccattccacgcagcgacctgcgggttattgctgaacacgctgacatcagcggggatgagttacgtcagacgctgacggtggaaaattataccaccagccgttccgcagacagctatccggccttttccccgatgctggtcgagtggctgaaagagtcctggctgctggcctccgccgaaatgcagcaaactgaactgcgcggcggcgttttactgctcgccctgctgcataccccgctgcgctacgtgccgcccgccgctgcccggctgttgacgaatatcaaccgcgaccagctacaacaggattttgccggatggacgaaagcctctgcggaatccgtggtgctcacagacggacaatccggccagcacgccactgtcgccggagaggaaacgctgctggcccgctacgcgaaaaacatgaccgaagatgcccgcaacggcaaactcgatccggtgctgtgccgcgataacgaaatcgacctgatgatcgacattctctgccgccgccgtaaaaacaacccggtagtggtcggcgaagcgggcgtcggcaagagcgcgttaattgaagggctggcgctgcgtatcgtcgcaggccaggtgccggacaaactgcgcgataccaatatcatgaccctggacctgggcgcattgcaggcgggagcctccgttaaaggtgagttcgaaaaacgctttaaaggtctgatggcggaagtcatccagtcgccaaagcaggtcattttgtttatcgatgaagcccacacgctgattggcgcgggcaaccagcagggcgggctggatatctctaacctgctaaaaccggcactggcgcgcggcgagctgaaaaccatcgccgccaccacctggagcgagtacaaaaaatacttcgaaaaagatgccgccctgtcgcgtcgcttccagttagtgaaagtcagcgagccgaatgccgccgaggccaccattatcctgcgcggcctgtcggcagtgtatgagcagtcccacggcgtgctgattgacgacgaagccttacaggccgcagccaccttaagcgagcgttacctctccgggcgtcagttgccggacaaggccatcgacgtgctggacaccgcctgcgcccgcgtggcgattaatctctcctcgccgccaaagcagatttcggcgctgaccaccctgagccatcagtgtgaagcggagatgcgccagcttgagcgcgagatccgcatcggcctgcgcacagacacctcgcggctgaccgacgtcattgtgcagtatgacgaaacgctgacggcgctggatgagctgaacgccgcctggcagcagcaacaggcgctggtacaggagattattgcgctgcgtaagggtctgctggaagaacccaaaataccgccagcagaagaaaatacgtctgatgctgaaaactctggcgatattacgccgcaggatgaaacagagacatccggacaggaaggtgaaacagaaccgcaattatccccggctgaacgcctgtcgcaactgaccgctgaacttgatgccctgcacgacacgcagttgctggtttccccgcatgtcgataaaaaacagattgccgccgtgattgctgaatggacgggcgtgccgcttaaccgcctgtcacaaaatgagatgtcggttatcaccgacctgccacagtggctgggcgataccatcaagggccagaatttagccattaagcacctgcataaacacctgctcaccgcacgcgcggatttgcgccgtccgggcagacctctgggcgcattcctgctggccggtcccagcggtgtgggcaaaaccgaaaccgtgctgcaactggccgaactcctttatggcggtcgccagtacctgaccaccatcaacatgtcggagttccaggaaaagcataccgtctcgcggctgattggttccccgccgggctacgtcggctacggcgaggggggcgtgctgacggaagccattcgccagaaaccctactccgttgttttgctggatgaagtcgaaaaagcccacccggacgtgctcaatctgttctatcaggcattcgacaaaggcgagatggctgacggtgaaggccgtctgattgactgcaaaaatattgttttcttcctcacctccaacctgggctatcaggtgattgtcgaatacgccgacaatccggaagcgatgaaggaagcgctgtacccggtgctgtcagatttcttcaaacccgccctgctggcgcgtatggaagtggtgccgtacctgccgctgtcacgcgacacactcgccaccattatttccgggaagctggcgcgcctcgataacgtgctgcgctcgcgctttaacgcggaggtggtgattgcgccagcagtcaccgacgaaatcatgcagcgcgtcacccgcgcggaaaacggcgcgcgcatgctggaatcggtgattgatggcgaaatgctgccgccactgtcgcttctgctgttgcagaagatggcagcgaacgcggtgattacgcgcatcagcctcggcgtaacaaacggcgcgtttaccgccgatattgaagaagagatggccgtcagcgatgacacgccggagccggaaacggtggaggatgccgccctgtga

SEQ ID NO: 386935 - DNA, 762 bp, Salmonella enterica
gtgagccacgcgcacgttttccggtacttcgccctgctggccgcactggccgccagcgccgcacaggccacggttcagcaggaacagcctgttcccggcatcgccctggcagccgctgcggcgacggcagcggacatacgggccattaccggtgcggatgcgcaggccacgctgaacgccatgaccgcctgccggaaagagcctgcggcgctggagcgactggactgctacgaccacatccttgccccggaacaaccggaaggcttcgcgggtgcgctggcgaaagcccgttatgaaggcgaagcctggaaacgggcgtttgagcaggaaaagcagcgcccggataactccaccgcactgatgataacccaaactcctggcgaacgcccgacggtgattatcaccaccccggccatcggcaatgtgccgccgcgcccggtgctgatgttcagttgcgtggacaacatcacccggatgcaggtggcgctggtccatgccatgacgcccaacgatatcgacatcacgctgaccactgacaccgggcgttttcagtcgcactggtttatccgcgagaacggcaccctgctggaatccagccggggtttatccggcattgatgaaattaagcaactgttcggcgcaaaaacgctgacgattgataccggcaccggcagtgccgccggaaagctgacctttaacattgacgggctggcgaaaaccatcgccccgttgcgcgacgcctgtcactgggcgggagaataa

SEQ ID NO: 386936 - DNA, 1404 bp, Salmonella enterica
gtggatttacgtaacccggatacctggatttcacacctgctggaaaatctgccggaggacaggcttgcctgtgcgctgagcgatgacaacccggactgggagtatatcgacggcgagatcgttaaactcggctcgcttgcccacagccagattgatatcccgacgctccagcgccgggggctggtgcttctggcctccgaaagcaaagacttccgcttgctggcgcacctgctgcgcaccctgcaacacgccggtgatccgctgctggcactgcgcctgctggcactgtacgtggagcactactggacggtggccgcaccgcagaatgccacgcataaaaaacgcttcgcgttccaggtggtgaaacgttttgaagcgggtattgccggttttgccaaccgcgccggtacggcacagcgcgatcagttactgggcgagctggcgaaactggcgcaatgctggcaacagcaggaggcaccggaactggcacaggccgctgatgaactcttttcgcaatatcagcgggcttttcgggacagtatgcccgacacctctccggttacgcagtccctccctgtcgccacggcgtccgcgccggctgccacacctcccgcagcggtaccggcgccggttgtgaatatcgacagccatgacgataaagcctggcgcgacacactgctgaaagtcgccgccattctctgcgagcggcagccggattcgccgcagggctaccgtctgcgccgccatgcgttgtggcagaacatcaccagcctgccgcaggccgaaagcgacggacgcacgccgctggcggcggtttccgccgacatggtggcggattaccaggcacggctggctggcgcggatatgacgctctggcaacaggtggaaaaaagcctgctgctggcaccgtactggctggacggccactacctgtcggcacagaccgcacagcgcctggggtataccgatgtggcggaggctatccgcgatgaagtcacccgtttcctggcgcggctgccccggcttgccgccctgctgtttaatgaccatacgccatttatcagcgaaccaaccaggcagtggctgaccgccacgccgggaggctacagcgagacggcaccggctgtacagaccaacgaggagcaccggactgcccgcgagcattttacagagcaggggctggaagccgcgctgcattacctggaaacgctgcccgaaggctctccccgcgaccagttttaccgccaatatctcggcgctcagttgatggaagaggccggaatggaaaaactggcgcaacagcagtaccggacgctgttcaggctggggtcgcagatgaggctggccgactgggagccatccctgctggaagcacttgaaagcaaattcacggcagaacagtaa

SEQ ID NO: 386937 - DNA, 3525 bp, Salmonella enterica
gtgttcagactaccgacaccccgattattcagcggattacgctctgccctccgccccgccatgccccggtttaaggtttcagccttctggctgctgatactggcgtggatttttctgctggtgtggatctggtggaaaggcccggcctggtcgctgtacgacgagcactggctgaaaccgctggcaaaccggtggctggcaactgccgcctggggactgattgccctggcctggcttaccgtcagggtcatgaagcgcctgcaacaactggaacgacagcagaagcaacagcgcgaggaaacccttgatccgatcagcgtggcgctgaacgcccagcaacgccacctcgaccggtggctgctgcgcctgcaacgccatctcgacagccgccgctacctgtggcaactgccgtggtatatggttatcggccctgccggaagcggtaaaactgcgctgctacgcgaagggttcccatccgacattatttacacgccggacgcggtgcggggaacggaacagcgcctgtatatcacgccgcatgtcgggcagcaggcgatcatttttgacgccgatggcattctctgcgaaccggcggaaacggatgtgctcccccaccgcctgtgggagcactggcttgactggctggtacaaaagcgcgcccgccagccgctcaacgggctgatcctgacgctggacttgcccgatctgctgaccgccgacaaacgccgtcgcgaacacctggtacagatgctgcgcagccggttacaggatatccgccagcatcttcactgccagcttccggtctatgtggtactgacccggctggatttactgcacggctttgccgccctgttccggtcactggacaaacgcgggcgtgacgctatcctcggtgtgaccttcacccgccatgcccatgaaaatgatgactggcgcagcgaactgagcgccttctggctgtcatggggcgaacagcttaatcatgccctgccggatctgatgctcacacagggccacagccgcagcgccctgttcagttttgtccgccagatacagggcagccatgacatgctggccacgttgctcgacagtctgctggacggtgaaaatatggacgtgatgctgcgcggcgtctacctcacctcctccctgcaacgcggccagatggacgacatttttatgcagtccgccgcccgccagtaccggctgggcagcagcccgctggtcgcctggcccctggtggataccgcgccgtatttcacccgcaacctgttcccacaggcgctgctggctgaacctaacctgtcaggcgaaaacagcgtatggctgggcaacgcccgccgccggatgatggcgttcagcgccgccagcgcggtactggtcgttctggcagccggtggctggcaccattattacaacaccaactggaacgccggtgtcagagtgctggaacaggccagagcctttatggccgtcccgccgccgcagggcacagacgactacggtaatctgcaactcccgctgctgaacccggtacgcgacgccacgctggcctacggtgactggggcgaccgcagccgtttcgccgacttcgggctgtaccagggtcgaaacatcggcccgtatgtggagcagacttacctgcaactgctggagcaacgctacctcccgtcgctctcgaacgggttaatgaaagacctggcggcagcgccgccaggcagcgaagaaaagctcgcggtactgcgcgtgataaggatgctggaggacaagagcgggcgcaatgatgaagtggtgaaacagtatatggcgaaacgctggagcgaacagttccacggcaagcgtgatattcaggcacaactgatgtcccatctggactacgcgctgaaacacaccgactggcacgcagagcgtcaggcaggtgacggcgacgccatcagccgctggacgccgtatgacaaacccgtcactgacgcacagaaagaactgagtaagctgccggtttaccagcgtgtctaccagagcctgaaaacgcgggcgctgggtgtcctgcctgccgacctgaacctgcgcgaccaggtcggtcccacctttgaccaggtgtttacctccgctgacgacagccggttgattgtaccgcagttcctgacccgctacgggctacaaagctattttgtgaagcaacgcgatgaactggtggaactgaccgcgatggactcctgggtgctgaacctcacgcgcagcgtgcattacagcgacgccgaccgggcagaaattcagcgccagttgaccgagcagtatcttggcgactacaccgccacctggcgcgccgggatggataatcttaacgtgcgtgactacgaatccattgcacaactgaccggcgcactggagcaaatcatcagcggcgaccagccgctccagcgggcgctgaccgcgctgcgtgacaacactcattccatcgtactttcagaaaaactggatgaccgggagcgcgaggaagcccgcagcgcgccggactatcagcttctgacgaggctggggcatgagttcgccccggaaaacagtacgctggaggtgcagaaggacaaagagagcaccatgcaggcagtctaccggcaactgaccgaactgcaccgttacctgctggcgatacagaatgcgcccgtaccggggaaatcagcgctgaaagcggtgcagctacggctggatcagaacagcagcgatccgatttttgccacccgccagatggcgaaaaccctgcctgcgccactcaaccgctgggtgggcaaactggcagaccaagcctggcatgtggtgatggtggaggccgttcactatatggaagtggactggcgcgacaacgtggtgaaaccgttcaatgaacaactggccaacaactatccgtttaacccgcgttcgtcacaggatgcgtcactggatgccttcgagcgattctttaaaccggatggtgtgctggataccttctaccagcagaacctgaaactgtttatagagaacgacctgagtctggatgacggcgataacaacgtcattatccgcgaagatatccgtgaacaactggagactgcacaaaaaatccgcgacatcttcttcagtaaacagaacggtctgggtacgcagtttgccgtggaaaccgtgtcgctttccggcaacaaacggcgcagcgtactgaacctggacggccagcttgttgactacagccagggacgtaactacaccgcccacctggtgtggccgaacaatatgcgcgaaggcaacgaaagcaagctgacgcttatcggcactggcggcaatgcgccgcgtagcgtcggtttcagcgggccgtgggcgcaattcaggctgtttgccgcggggcagttaaccggcgtcagcgatggcactttcagcgtgcgctttaacgtggatggcggcgcaatggtgtaccgcgtgcataccgacaccgaagataacccgttcagcggcgggctgttcagccagttccgcttgccggataccctgtactga

SEQ ID NO: 386938 - DNA, 1350 bp, Salmonella enterica
atgagtcacgacgcactcacgcagacgattgttaccggcagcgacccgcgcgccctgccggagttcagcgccatccgcgaagaaattaacaaggccagccacccgtcacagccggagctgaactggagactggtggaatcgctggcgctggcggttttcaaatcgaatggcgtggatctgcacaccgccacttactacaccctggcgcgaacccgcacgcaggggttgccgggtttctgcgaaggcacggagttgctggcggcaatgattagccatgagtgggataccttctggccgcagggcgggactgcgcgtaccgaaatgctcgactggttcaacacccgcaccggcaatatcctgcgccagcaattgtcctttgcagaaagcgaccttccgttgctgtaccgcactgaacgggcgttacagcttatctgcgacaagctccagcaggtggaactgaaacgggcaccgcgcgtggaaaacctgctgtattttgtgcagaacacgcgaaaacggctggagccacagcccggtgtccgcgaggatacgcaggcaaaaactacggtcagaacgctggtctatgcgccggaaggcgctcccgcaacggcggaagttgctccgccccttccagacctgccggacatgaaggtggaagttcaccacagcgcaatagcaaacggcgtggcgggaacgccaccgggtggcaggctcaaaagctttgcggctggtgtcgcctgtaccgctgtcgttgctgccgcactctggtggtggcagatgtacccggtgcagcagcaactggcacaggtcagggataccgcacagggagccgccacggcctggctggcctccccgaatctggagggctacggtcaacgactgcaacagcttctggatgcgtcgccattgcagccgctaaataccggcgcacagatggcccgtactgccgacaacctctggccggagagcctgcaacaacagcaggcgagcgctaaatggaatgaggcgctgaaaacccgcgcgcagaacagcccgcagatgaaaggctgggagcaggcacgccagaatctgcgggagtttgctgacctgatgatgctgcgggaaactgagcaaaagggcttcacactgtcgtacatcaaaaccgtgacctggcaggccgagcggttactcaatcaggaagcgccgctggaatatctgctgacgcagtaccaggatgcccgcatgaagggacagaacacagatgcgctggaaaaagagattaatgaacggctggatggcgtgttaagccgctggctgctgctgaaaaataacgtgatgccgaatgcggcagccggaacaacatccgggaaataa

SEQ ID NO: 386939 - DNA, 480 bp, Salmonella enterica
atggcaaatcctgtttatctgacgctaaacggcgacctccagggtctcatctccgctggctgctgctccctggtctccattggcaataaggcgcagattgcgcatatggatcagattatagtgctgggtctgtcccatggactgacccgcgcacagaacgttaatcatcaaatgctggtgatcgagaagccagtggataaatcttctccgttactgactaaagccattagcgaaaatgaatgtctgacctgcgattttgagtattaccgtaccaaccgctttggcattaatgaactgtattacaaagtgaaactcattaacgcccgtatcgccagtattgcacatcatgtgccacacactattaccaacagccaggggcaaccagaagagtcagtatcactcacatatgaaagtattacccaggaacactgtactgcaggtaccagtgcgtacagtctgtgggaggagcgacttttttag

SEQ ID NO: 386940 - DNA, 864 bp, Salmonella enterica
atgagattgagaattagtagggcggttggggttaatcagccaaataacattgttgatgtcaagaaaattcagatgttactgaatagagccattcgtgacgacaatattgaatccctgaaagaagacggcttatggggacctaaaacttttgccagattagtgtactttcaggaaaaatttgttcatctttttcacgctgacgcggtagttaatcgatatggtccaaccctaagaaggttaaatcaggctaacggtgcggcccataatgaaacttcaccacaccagaaacagactgcgttagtaccggatagtaatcagattaaacaattagcacaacgtgcatcattacccttgcctgcaattaagtctgaatggattaacagggcattacctgcagctattaatgttaaacgtaactggggagtgctgatagcagtgactattgcccagggggctctggaatcggggtggggacttaaagcaaaagggaatgcatattttggtgtaaaaggaaagtctcctgaaggtgactccataacgtttacgacacatgaaaattatgatggtcaatcggtaaagattaaggatagttttcgatcttatgattcgttggaacaatcagcagatgattatggtcgatttcttagcgttaacaaacgttacgccacagcgttttcttacccgaatgaccctgataaatttatacatgagatagctaaagctggatatgcaacaaatcctgattatgagaagcatataattaatattattaggactaccggcataaaagattacgatgttgtgggtgtttctacatccatgtgttatattaatcccttgcattattttagcttgctggactaa

SEQ ID NO: 386941 - DNA, 339 bp, Salmonella enterica
atgaaaaaattagtttatataacgttgcttggttatgcgactttcacggcgaatgcattctcaactgaactacctccgattgttcaactggtcaaaaaaacactggagcagagaaaactcctcgtatctccggaatgtactgattatctttatattccagataatgaacctggaatagatgtggttaatgttgtggaaaaacatggcggaaattgtcctggtgatccacaaacacagcccaggttattcagtgtatctgtcgataaaagaacacataaaatgcagtcagatattaatgaccctgaggatggcactctttcccctcttacggaaaagtga

SEQ ID NO: 386942 - DNA, 237 bp, Salmonella enterica
atggatgagttgaataaagtcattgtcattcaccctgctcaaattaatctgctcaggaagtttgaatatgtatcggcgctgctggaaaaagttgacgatatcatcaaaaccgatgatgaaatcacccgcgtcacagacgggcaacatgtgcgcgcacatctgcgacgcggtcactggcacggtttctgttcggggaaaagagatgagccggatgcacagaaatttgcgtactgctga

SEQ ID NO: 386943 - DNA, 858 bp, Salmonella enterica
atgaataccaggtcagggttattactgcttcttgtttcaggcgcctttctgttaaccgggtgtgccaggacatcctccattgatgccaggaaaacaaaaacaggtgcatctcaccaggagcaaatcgcttccacatcgcagctaaccgatcaggatgttttcgggaatgagctgacgctggagatcaccgaagaggatattcagaatgccgtggaggaggctcaggggcagtttacggtccccctgaactctgccgttgtgctggtaaaatcaggctctcgcgcaccggatatgatgatgcagcaggaaatgcagcgttactatcgggtatccacattctccggtattccggttgtgaagaaaaaacgccctgttcagcctgtcacaccggtaaaggaaacccaggctgacgcagccacggctgacgatttttcagcgaaccggaacagtgttgttaatgccaactatatgcaggcgatgagatatattgcagcaaagggcagacagaaagccatcgtggtttactgggatgagctggaagccggagaatataattctgcgacaaaagaagtggactggaaaaaatatgccggtgagaaactgtcaggagcatcactgcgctatttgatccggtttgcgctggtggatgtcgctaccggagaatgggcaacatattcccctgccaatatggaatcagtggctgttccgttgatcgtaaacacggataaaaaagcaaaaacagatacaaaaacgaatgaaaaagcgaatgtgacagagcagcaaattatcagtctggaacaaagaacctgtcagatggtggtcagggacctggtaaaccggtacagcaataaaatctga

SEQ ID NO: 386944 - DNA, 129 bp, Salmonella enterica
atgaccattacccgccgcctgctgactgccaccgcagtgcaaaaagcaaaacccgctgataaagattacgacatgcctgacggacatgggctgacgttggctgtcagaacgaccggtaaaaaaatttag

SEQ ID NO: 386945 - DNA, 591 bp, Salmonella enterica
atgaatgcagacgattaccgtgacgttctggcgctgttattgccccccgtcagttacgacagtaacggcccccggcttggtgctgaactgcaggctgaagcggcattactgagccggtcagaacgggccatcagacgccttctgacggccatcacactgacaacatcggtggatttcctgccggactgggaacggctttacgccctgacaccgtcgccggacgataccctgcaacaacgctgccagcgcgtgctggccaaaataagcgaaaccggcggattaagtcgtgaatattttattcaactggctaaaacgctgggatatgacattgccattactgagccggaaccttttcgctgtggcagaaaccgctgcggtgaacgtctgtggatacgcgaaattatctgggtctggatagtgacaataaattccgggaataaagtgccggtttatcatttccgctgcggacgttcagcaaccggtgagcgactgttgtcattcggctataacgcacttgaacatatttttagcgaattaaaaccggcgcacacgcaggtagtgtttgattattcggagaataaaaaagaatga

SEQ ID NO: 386946 - DNA, 1089 bp, Salmonella enterica
atgccccagaatattccttcgcaacaggcgttgttggaccagtatctggaaacgcttgccaaccagcttcccgacgtggatgagacagaagacagtgattccgtcatcaggggcaacgccacagccagtctggtgcatggcctgtatcagtacacagcctgggttctccgtcagatgttcgcggacactgccgacagcgagtggctggaaatacacgccgcccagcggggactgcgcaggaaacagcctaccgcagccagcggcaccgtcatactgacagggacgcccggacagacattcagtcgcggactgacattccgcgtcagggggaaaagtacactgtaccggattacggacgacggcgtcactgacgccagcggtcaggccacggtcagcgcccgggccgtcgataccggcacagccggtaatcttcaggacggacagaccggaacgctgaccaccacaccaccgggactggatccggaggtcaccattgtcaggctgacgggcgggacggatgttgaaaaagacgcggccctgctggcccgtctcctcgatgtgctgcgcaaacccgccgccggaggcaatgcgcacgattacaaagtgtgggccatgagcgtggatggtgtgggggaagcctgggtctatcccctgcgccggggtatcggcaccgtggatgtgattatcacgggcactgacgggctgccgtcagatgaaaccctgaaggcggttcagacctttattgaccgggtgcgcccggtgacggcaaaaaactttctggtgctggcaccgaccctccagcccgaagacgtgacggtggaaatcgccgttgctgacagtaccacgctggcggcggtaactgccggggtgaaatcagccatcaccgggtactttgcctcactgctgccggggcagatggcgatacgcagccagatgggcgcactgattacggaagtggcgggcgtcacggattacgtcattcagttaccggcaaccaatatcgcgccggttgttgataaaacgcaggttggctggctgcgggcgggaaccatcacaatcacgccagtaaaggaggctgacaccgtatga

SEQ ID NO: 386947 - DNA, 348 bp, Salmonella enterica
atggacagaaaaatcaacccggccaccggggattataccggcacccgcacagtcagtattgaaaatgctgtctggatacgtctggccacgccgctggggagttacccggcaaacacggcgatagggtcgcgtctgcataaactaccccgcaaggataccgctgaggtgcgcgcactggccgaacagtacgcatggcaggcactgaaaccgctcattgatgacgggcgggcacagtccattcaggttactgctgtccgcaaacgggtgggatgggtggacctgtccatccgcgtggaactggcctgcggtgaagtggccacgtttgaacatcctgtaaaggtggtttaa

SEQ ID NO: 386948 - DNA, 693 bp, Salmonella enterica
atgctggacggactggagagatatcagataatggatattgtcactctgattaaccgccgtatagcggctgcgctgaacagtatccgacgtccgttccgggcggtactgacccgcacccggtctgatggcaacgtaatgatgacgcaactcggtggactggaaggtgaaaatctgcccgggattgaggtgttccagcagtttggcctgacatccgttccccccgccggaactatggcggtggtggttccggttggcgggcgaaccagtcacggcgtggtgattgccaccgagcacggccagtaccgtatccggtcactgaaacccggggaggtgtcgctttacaacgaggatggtgcgtcggtcaccctgaagaaagggcaaatcattgatgttcagtgcatcgagtacaatgtgaactgccggaaatacagcgtcacggccagcgactcggcccggtttgagacgccggaagtaaccgccacgaagaagctgaccgcgctgggattgctgacaggttcggggggtatgaccatatccggcgataacggctcaggcgtgacggccacgctgagtggcgatatcacccatataaatggtacagtcacctctgttgcggtgaccatcaatggcgtgaaaatcggcccgcatattcacgatacaccgcacggaccgtccggtccggccagaaactga

SEQ ID NO: 386949 - DNA, 1092 bp, Salmonella enterica
atgcttacgcccgatgaacgcctgaccctgaccgtgggcggtgtctcacacagtgactggatgaccgtcatggctgatgcgtcatttctgacgcctgccggagcctgggaagtgatggcgggtatcgaaaaccggacgctgcccgctgaggttcatgagggcgcgagggtgatactccgggccgggcaggatgttctgatgaccggtctgatagatgacgttactgaagtggtgacgtgtggccagcacctgctgacactttccgggcgggataatgcagcggcgctggttgactgctcagccccggtgttcacctcgcaggcgatgacgctcgctgaggttatgaaccagattgtccgtccgctgggaataacccggacggtcatccgggccggtaaatccacggcccccgaaaagttttcagttgaccccggagaaaccgcctgggatgccctgctgaaaattgcggaaagcaatggtctctggccgtgggtggagccggacggcacgctggttatcggtggcccggattacaccacgccaccggtcgccacgctggcgcttcaccgtgacgggacggggaatattctcagcctgactcaccaccgcagcatcgccgggcgttattcggaagtcaccgtccttgcgcaggggcacgggactgacgaacaggatgcggttcacaaccgccggggaaccgcccgggatgccggtttttccctgtaccgcccgctggttcgccagatgggtgacactgattcagatgcagaagccactgcccgcgcccgcaagctgctgacagattcccggctgaaggggctgaccataaccgccattgtcagggggatacggacgccggacggaacgccgtgggcacccgggcagcgggtggtcctgcgcagtgacagcccggccatcagcggcactttttttctgatggcccgccacattcagggcggtcgggggcgggaactgacgaccaccctgacgctgaaagaggacggcatctggatccccgacgcttaccctcaccgcaaacacaaagggaagaagcaggatcaatgctggacggactggagagatatcagataa

SEQ ID NO: 386950 - DNA, 1338 bp, Salmonella enterica
atgagtgacattctcacccaactggcggagctggcaggcatcgacacactgatgaaagcctcctttcgtggtgtggagtttgaatgcctgtacacccgtgacacgctggcacgcgatacggtcagctatgccttcccgtaccacgacggcgcaaccgtggaagaccaggggctgaaagccctgaacttccgcctgtccgcactgctgtttggtcatgactggaaacagcagttaaaagcgcttttaacggcattaaaagacggtggccccggagagctgattcacccggtttacggctccattccccgggcgcagtttctggaagccggggtggaaaaacgggttgaaccgcttgatgccgtaacggttgaactggtgttcattgagtccggcgaggagcaggcgctgttcagcaccgcgtccggtgaacaggctactgacagtatttccaccaccggggacagcctgctggataaagccgcctccgcctttaaagacgcgatggaccttcttcacgacgttcaggacggagcggaacgcatcaacaatattgtggctgaaggcgaataccttctgcagtccacgctggacgaagtccggggcgcgggagccagcctgagcaatttacttgacacgccaacggccctcgtcagtgacctgaacagcattctggataccttcagcgatacgttaacgctggaaggcagcggcgtggcgacggcgtggcagtctgcgctgcatctggccgataaagtgaccagctttccggctgaatttgcttcctcactggcccttaccgtggtcagcaaacccttttccctgccgctgggccggacgatggggatacgcccggaggataccgccctgctgacccggacagcccggctggtaaccaccacagaactgctggaaattgcctccaccattctggcgaacgaggcaaaaaccccgacgctgaccagtacccggatagaacagataaccggcgatgcccgtgaagcggtcgtacaggcgctgagtgagcaacggggcgcaatggaggccagtatcaccgccggtctggccgccaacgtcacggcggatacgcggacgtacagcgccatcatccgggatttacagtcaatggcatatgccctgcagaatcaggctgcggcactgataaaggcccgccctccgctgatcacgcgggaagtgatccgcaggggaacgctgggtctggtcgcgcatgactggtacggagactaccgccgcgccgacgaactgctgcgccttaacccccgcatcagcaacccgaacgacatccggcccggggaggttctgtatgcttacgcccgatga

SEQ ID NO: 386951 - DNA, 2310 bp, Salmonella enterica
atggctggacatttcgatacccaaatcggcattggcgttaaggataacgcctccgtcccccttcagcgcatccgcaatgaaaccgtgcggatgcagcaggcccgtgagcgtgtcggtatccacagtgagcatacccttcagcgtgaaatagcccgcaccgaagcggcttacaaccggctggagcgttcgggaaaactctcggctaccgagctggcccgtgcccacgaaaaaacggtggccacagtggcccgcctgcgccgggaaatggaggaaacggaaaagcagcaggagcgcctgcgccgtaatccgctgggcgacgcgcgcgaacggctgggcatccgtagtgagcagaccatccggcgcgaaatggcactcaccgaagcggcttacaaccggctggaacgctcaggagaactctcggcagccgaactggcccgcgcctatgcccgtacaactgacaccatcagtaagctgcgtcgtgagctgggtgaaaccgaacggacgcaaagccgactggcgacaggactgaaaaccaccctgaaaatcggtgcgggtgcggcagccctgaccacgggcgtggctgccgcgctggccgatcctgttcgccggcagatggattacgacagcacgctgcgccggacatcgaactttatgtaccggaatggtgacgtaaaaacacgccttcagggtataaaaacgattgatgctgcggtgcgcaatgctaaccgctcaggcggtggccgtaaggaagatggtctggtggcagccgagacgatgggacgttccggtatggccacggatgaagtcttcagtgcattaccggaaatcatgaaaatccacaccgccacgggggcggatgcacgaagtcttgcccttatgcgaaatgccgctttcaactatggcctgaaaggcaaacttggtaatgctgcactggacgccatgacaaccgcttcgcaacatggacaggttgatgtcccgcttctggcaaaagcgatgcccgtcggtctggaactggccagaagtgccggttttgttggcacaaaaggcttttcggatgtggcggcactttatgaggtcagcgcagcgctggccggagccgatgaaggggttgttaataccaataacctgatgatgaccctgtcgtcacagaccatttctgacaatgcccgaaccgttaagtttcacggtaaaaaagtggactggcaggccatgcgccggaaagattcggtacaggggcatgatgcactttatacgttacatcatctgatccagcgtattgatgattcagatgaaacaattgtgaatgcccggaagaaacgcgatcaggcaaaaaccgccacagaaagggaaaaatgggaaggcgtcatcaactctgcgcacggtgccaatgtggggcgtttcctgcgggatcagcaatccctgaaaggttatctggcgtatgaaaaatatcaggatcagtaccaggacatttcagccgacgttaacaaacagttcagcctgccggaaaatcagcgcgcaacagaccttgattttgctgtcatgaaggacagcaataaattcaaaagtgatcaactggctaatgaaaaagattttgccacgatggatatggcaagtggcccggccaatctctggggggtcattgctgagaagtctgccgaactggccaaagaatttccggtgctggctgaagcagtatccggcgtttcgtcagtgttttcatctgtctggcagcaactgggcggcgtgggaaccacgctggccacgatagctggtgtgaagctgggggcaaagttgcttaaggggcgcacgggtaaacctcccgtccccggtgaaccaggagtcgcagccgaagcaggggcggaaactgcggcagaaggcaaatccggctggctgcgcgcagtccgggaatggatgataaaaaaagggaaaaccggcatcaaagccggagggcgggtattaaaaaacggtgccatccgggaaggtctgctggatattccgggtgtggatttggtcacgggcgtgctgtggccatcagatacggtcagcggtgaagatgaacgcaatgaactggcccgcctgaaaacccgcaaccgtcgccggaatggaatccctgatgctgctgacgccctgcaacggctacagaactggaaccggcagacctccggtaatggtgcccggggcgcgcctgttatcacattacccgaacttcccgccccgaaggtaagcgttcgtgttttgctcgacagtcacgatatcgcatctgttattgaagtcctgcaggggaaaaacagccggagatatggcgcatga

SEQ ID NO: 386952 - DNA, 375 bp, Salmonella enterica
atggataaggcactgaccattaaaggcacactggctgtcggcgtggagtacaacggcgagtttcaccgtgattttgagctgcgtctgagtacggtcggggacgaaatcgacgcgtcagaaatgggcattcctgacagcggttattatgtcgggctgatggcgttgtgtctggaatcgctgggcaccattcccagagaggccattacctacgatttactgcgaaccatgaccagcccggattattccctgctggtacaggcccgtgacaccctgaaaaaaaagatgcagcccgggaagagcgacagcgggaataccgacttgcctgcgtccggctccgccagtacggataccgcgacgcagacatccgacagttaa

SEQ ID NO: 386953 - DNA, 372 bp, Salmonella enterica
atggcggatacgtatgtcggccccattgttcttgaggttaacggcactgagattgaagtcacccgggtcagcccgtcaatggacaccgggcgcaaactggtgaagaccatgaactccaccgggcgcgcccggggtcatgtcaacggtatcgcaacgtacaacctgacactggaggcggtgaaacccaaagggcgcaccattgtctgggacaatattgtggatgcaaaactgaccctgtacccactggaaggtggggacaaaaccatcacttaccagaactttaccgtgcagacggtcggggatgaatacagcgtggataatgaagcccgcgtcagcattaccggctttgcactcaaccgtgtggaggcgtaa

SEQ ID NO: 386954 - DNA, 1440 bp, Salmonella enterica
atgagcacggtaatttccgcctcaacccgcgtccccgggacgtatgtgggctttgacttttcccgcgccggtcgggcgctggctgctgacgggcagtcagtggtcattcttggccagcgactggcgggaacggttgccgcactgactcccacggatgtgttcagtggcaatgaggcagcacagtattttggccgggggtctcaggtccaccggatggtgatgcgggccattgatgccaacagcaatattcagttatccgtctgcgcgctggatgatgacccggcgggcgtcgcggccaccgggtccgtgatgctgtccgggacagcatccgggacgggacaggttcgcctgcaggtggcggggacaaccgtggccatcgccgtggccaccggggataaggcagaagacctgacaccccggctggcggcagcgttcagcgctttcccggacctgccggtgaccgctgcggcagaagatgtcgtgacgggaaaagatgccggcggcaatgacgtcaccgcgccgggcgtggtgctgacggcccggaataagggggcctgcggtaatcaggtggggctgacgctgacggtgaccgccgaagggctgaccggaacgctgtcccccctgaccggggggcagggtgacccggatattgcaccggcgctggcagccattttcagcgccggtcacacccttatcgttacgccgtattccaccgatgaggccctgcggacactggccactcatctggataacgtatcaggcccgacggaacagcgagccgctttcggtgtactgggctggcgcgattcactgtccaccggcatcaccctgacaggcaacgccaatgcaaaacgcctgaccgtgggctggcacaaccactccgttctgccggacggcgaactggccgccgtttatgcggccagaattgtcagtgaggatgacccgtccgaaccgctggataatctcagcctgccggggctggatatcacgccccgggaatactggcccatgcgaaccgaggaagaaaaagcgctgcataacgggctgacgccgttccgggttcagggcagtacggtacaggtggttcgtgccatcagcacatacgtgaagaatgccgccggtattaacgatgccaccctgctggatatcaccacgctccgcacgctggattatgtccgtgtggcatggcgtacccggatggcgcagcggtttccgaacggcggcaaactgacagaccaccggctgcgccaggtgaaatctgaaacgcttgatgtgttgtaccagttggaatcgctggagatggtggaaaaggtccagcagtaccaggaccaggttatggtgctgcccaataagcaggatgacacccgcgccgatgtcagtattccggcgtctgtggtacgcggcctgcacatcctgaccggcaccatttatctgtattaa

SEQ ID NO: 386955 - DNA, 246 bp, Salmonella enterica
atgattaatgtgattgcccgagagggtgtcagggtgccgctggaacagcattcccggcagtacatcactgaagaaacgcctgtggcagttgatgaacagtcagcgtattacctgcgccgcctgcgtgatggcgatctgttactggctccggccagtaccgggccggacacccctgccgtacctgatgcgccggaagaaaaaaacatccggcccgcccctgaaaaacagaaaaaggagccgcaatga

SEQ ID NO: 386956 - DNA, 642 bp, Salmonella enterica
atgatgatcgccgatattgaaaacgcactgtgtgaccgcctgcagcgggggctgggcgtggcggtgtcagacgtggtgccgtgggacgtcatgacgacggatatcgggcgcattctggactgtctccccggcgcgttcgtcaccttcaccggcattaccgatacccgtccgcacgatacccgccggacccgctttcgcgtgtccgcacggttttctgttttcgtggcggattacagcctgcggggcgcggatgccgcccgccagggagatgtccgcgaggatgaggccgggtgttaccggttgatccacgcggtacgccgtctgctgtccgggcaggatatggggctggatatcggcaacctgatgcccgggccggtgcgccgggtgaccgggcctgcgctggccgggaaaggctttgccctgtatgagtgcgtgtttgatacctgctggtatgaggatgcgcttgcctgtggtgcctggccggaacccaccgaacgccaggatgacccggattatgtcttcacgctgtgggagggccagcgggaaacctgtccggcccacaacagcacgcacgccggatggctgatgaatggtgaggtggtggcggaagacaccaccggaacggagaaacagaatgattaa

SEQ ID NO: 386957 - DNA, 441 bp, Salmonella enterica
atgagctacgccacgcctgaagactatatcgcgtactttaccgagcgggacgccaccggcgtctcggctccgcgcggacggggtgtccctgacggccagcggattgcccgccatcttgagtcggccagtaaccgtatcgatgcgtatatcggccagcggtatgttctccccctgcgggacgttccgcccgcgctgcgggattattgctgcgatattgcccgttacctgatgaccggtacggagcgcccgtgtacggatgaggtccgcgaacggtacggggacgccatcggctggctgaaactggttgccgccggaaaggtgggtatcggcagcaatccggagaacggcaccgtggcagaaaccggtggtgcgaccaccacctttttcagtggcgggacggacctgtggagccgggaacggaccggtggagggtgttactga

SEQ ID NO: 386958 - DNA, 927 bp, Salmonella enterica
atgattttaaatacccgaaatgtcaccgccctgtttgtggcgctgaaaaccaccttcagtaaggcgtttgatgccacggaatcaaagtgggacaaggtggccacgctggtgccatccaccacccgccagaacgattacacctggctggatcgttttccgcgcctgcgtaagtgggttggcgataaggtggtgaaatccctgacccagcacaattacaccctggttaacgatgatttcgaagccacggtggaagtggaccgcagcgaccttgaggatgatcaactgggcatttacgccccgcaggcgcaggaagcggggttcagcgcgaaacagtggccggatgaactggtatttgaagtgctgaataaggccttcaccgacaaatgctatgacggccagccgtttatttccgacagccacccgaacggaaaggacgagaacggcaaggttattacggtcagcaacaaagggaataaaccgctgtcagcggcgtcgctggctgacgcgcaggcgtcttacggcgcggcccgtaccgccctgcgcaacatgaaagataccgaaggccgtccgctgaacgtcaccccgatgctgctggttgttccgcctgcgctggaagacacggcgaatgccctgatgacggcggaacgtctggatgacgggaagaccaacatctacaaaggtacggcaacggtactggttgtgccctggctgaccagcgacacgcgctggttcctgatggataccacccgcgccatcaagccgctgattttccagcagcgtaaaaaggcgctgttcgtctcccagcaggatctgaataacccggatgtgttcatgcgcaagaaactgaagttcggtgcggaagcgcgcggcgcagccggttacggtctgtggcagatgatttacggctccaccggcgacgggaaataa

SEQ ID NO: 386959 - DNA, 414 bp, Salmonella enterica
atggcactgaatgatgatctgaaaaccgattttgacgcgccgtaccgtgacggggaactgctgccggtgccggttgccgccggggaatttatcccggcaggcactatcgtctgtattaatgccaaaggcctggcggtgggcggcagcgaaacggcggacctgacttatgcgggccgcgcggaaacgtttgtggataacaccggcggtaaggatggcgatgccaccgtgctggtccgccgcaaaaaagttttccgctggctgaatgacggcaccatcacacaggacatgctgcttaaacccgtgtacatcctgaacaaccgcacactgacgggggcggatggcgcaacggcgggaagccgttcgaaggcgggcgtgctggttgcgctcgacggcgacggtgtatggattgaataa

SEQ ID NO: 386960 - DNA, 1122 bp, Salmonella enterica
atgcccatgtggaaacgtgccaccgcctcgctggccagtatcgacaaacagaaccttcaccgcgtccagttgttcccggcgggctggttcggaccggaagacgggtcgatgcgctggtatctggatgccacgctggcgcaggtactggttacggcggcgcagcagcgcgtcaatgactacgaatttgattatgaacaccagtccctgaatgcccacaaaggcagcggcccggtgcctgcggcgggctggtttaaatccctgtactgggttgacggcgaaggcctgtttgcggatgtgacgtggaccgcccgcgccacagaattaatccgggcggacgaataccgctatgtttcgcccaccttctattacgacaaccggggctgtgtccggggactcgtcaacgcggcgctgaccaatatgcccgtcatcgacgggatgcagcaggtcgccgcttctctcatgttttatgacgacaatggaggatcctccgtggatgaaatccttgagcagttacgctggatgctgaacctgccgctgagtgcaacggtggaagaggtgaaagccgaactgcagaaactgattgaccgcctgtccggtggtgagggactggctgcggccagcatcagcctcggcaacattctggctgaaaaagaccaggccctgcaggacagggacaaccagattgcggccctgtctgtggcgcagcgaaccggcgcgccggacccgacgaagtttgtgccggtggcggtggtggatgaactgcgcaccacgctggcagcgctgtcctcacaggttaacgatgaccgggtgggcacgctgctgacagccgcgctcagcgacgggcgtgtgatggcgggggcggacgcggacaacctgcgtgagctggggaaaaaggatttcgccctgatggaaaaaatgatcgccgcccgccagccgattcaggcgctgtcacagacacagaccggcgcacgcggtctgtccctgaatgacaggggcgagccggtggcagaccggggcgtgctcgccgtctgcagccagtttgccgactttaccggcatggatgaaaaagaaattgtcagagccgtacaccaggaaatgggagggacttatggcactgaatga

SEQ ID NO: 386961 - DNA, 492 bp, Salmonella enterica
atggagccggacatcatactggacattccgccggaccttgaacactggctggatgaactggcggcgcgggtaaaacggcgcggcccgctgatggaaaccattgcagggattatgctgaatgccgtggatgaaaacttcattcagggcggacgcccgacatgggagccgctgaaataccgggacgggaagcccctgcagttgtccgggcggttacatgcgtccgttcagccgtggagtgacaacgaccaggccattgtcgggaccaacgtgatttacgcggggatccagaacaatggcggaaaaacaaaggcgcatgaaatccggccccgccggaagaaagccctgtatttcaacggacgttacgcgaagaaggtgaaccaccccggctcggacattccggcccgtccgttcctgtcgctgaccgacgatgattatgcggaaatccggcaggccatcgtcgactatatcgccggaaatacgtcgggcgaataa

SEQ ID NO: 386962 - DNA, 1248 bp, Salmonella enterica
atgcctgatctgaatgccgccctgacactgtcgccggacgccgcgattgcgtactttaccgccaaaggttttacccccacgcagggctggaaagacctgcaggatgaggttcacgccgtgcagtttgcggtggcgggtatcacaaagctggatgtgctgaacgatatccaccagggactggcgggggcgctgaagaacgggaccacgctgtcgcagtttcaggacgaactggaacccaccctgcggcgtaagggctggctgggcagcggactggtggcaaacgacgacggcgagctgctggggaagcaactgatgccgtaccggctggagaccatcttccggaccaacgtccagtcagcgtatgccgccgggcgttaccggtggatgatgtccacggtaaaagagcgcccttactggcagtatatcgcggtgatggacgaccggacccgcccggcgcacgcagccctgaacgggcgcatttttcgctgggatgatccgatatggcagacgctgttcccgccaaacggctataactgccggtgttatgtccgggcgctcacgcaggcgcaggtggacgcgcatccggtcggggtggaatcgtctgaggggtatctggttaccgtgcagcagccttacggcactgacggtgaaatgcgtccggtgaaagccttccgggatccgaaaagcggccagttactgaccccggacgccgggtttcatctgaatgccggtcgcagttatctggccggtctggggcagaccctgctggagaaaggcaccactgccgcgccggaactggcgtcggtggctgtccgggaaaccctcagtaacaaccggctggcgtctgccatgaaccgcgatttgcaccagtggacgcagggactggatgaacatcacgccggggactttcgccgcatcggggcactgtctccccgggtgcagtccctgctgcaggctgacggcgcaccggttgcgccggtgatcaccctgcctgctgaaaccgtcctggcctgccgggaacccggggccagcctgtggccgcgcctggtctcggcgatgctttacccgctggctgttctgttacgtgacgaccggctgtgtctgctgacgcaggagaacggggacgcccgggcggtggtgctggcccggtgcggggatggctggcaggtggccggtattcatccgtggacgtcagacgatgccgcaaatgcggagatcctggacgggcaactgccggaggtgagctga

SEQ ID NO: 386963 - DNA, 1533 bp, Salmonella enterica
atggatattaaaactgcatttaaacgcttatttacccgcgataaaacccagccgatccagagcgacggcgaggatgatttactgtacgccggggcactcacccacccgtccaccgggctggatatcaaccggatttaccgcctgttccgggcggcggaagacggcgatattgaggcccagagcgacctgtttaccgacatggaggagcgcgacggccatctgttttctgagctgtccaaacgcaagcgcgcgctgctgacgctaccgttctccgtgataccgcctgcggatgccaccgaagcggaaaagaaaattgcagcagaagccgacgggtggatccgtcatctgccgggactccgtgaactgctgatggatatgctggacgccatcggccacggtttttcctgtacggaaatcgaatgggccagaaaaggcgatatctggctgcctgcccggtttcacaaacgcccggcccggtatttcaccatgccgcagcatgatccggacgatatccggctgaataccggcgtcgcagacggcgagccgctgtgggaactgggctggattgtgcaccgccataaatccaaatccggtccggcggcacagagcgggcttttccgtgtactggtctggacctacctgttcaagaacctctccgcccgggactgggcgcagttcctgaatctgtatggcctgccgttccgtatcggtaaatatgacgcgtcaatgggggacgacgaacggaaaagcctgttacgggggatccggatgctggcccgcgagggcggcggcattatgccaaataatgcgcagattgaactggtgtctccggcagcaggccagagcgccccgttctttgccatggtggactggtgtgaaaaggtacagtcaaaagtgatcctcggcggtacgctcaccagccaggccgacggcaaaacctccaccaatgcgctgggcaacattcacaacgaagtccgtcatgacctgctggtcggggatgcgcacatggtggcggaaaccctgacgcaacagttgctgtggcccgttctggccctgaacggacggtatgacccggcacgtgcgccctgtttccggtttgatgtacatgaaccggttgacctggcaaaactgtttgagatggtgaaagccgcccaggaaaccggctttgacattacccgcgaatggctgtcagagaaaagcggtatccccttaccgcaggattcacagcatattctgatgccaccgaagaacaccgccccggaaacggcggcgctgtcccttgcggcgctgtcatcgtccgtacaggcgcagtcatcgctggataccattccgcacctgctggccgcgcaggccagcacggcggcggacacgctgttgcagcccctgattgaacaggtcaaagcggcccggacgccggaggcggtgtatgacctgctggccgccagttacacgtccctcaatgagaatgccctgcgggagctggtcgggcaggccattctggtggcggaagtgagcggggaatatcatgcctga

SEQ ID NO: 386964 - DNA, 1677 bp, Salmonella enterica
gtggcgtcgaaagcatcccttaaaaccttccgcgagaagatagctgtcatccaggcggaactgcgggaccgcatcgaaagcgcgtcctgtggcctcgacagcagcccggaggcgattaaacaacgccgggaacaggtctgcgatccggtgaccgggtttcgttttttcgccagtacctactttaaacatcaccttcagcacccggaaaccagcgagctgcatgagtatctgtatgagcgcctgccgcagattgtcgccagtccggaatctgaaaacgatgtgatcgccgccccgcgtggtgaggccaaaaccacgcttgcccagcagttgtttgacctgtggtgtattgtccgcgaactgaaaaaattcatcatcattgcctttgacaccgccgcgcaggcggcggaatcactggaagtgattaaagcagaattgctgtacaacgcggggctgtccatggattttccggaagcctgcgggcagggccgcgtgtggcgtattggctgcattctgaccgcctcggggatcaagattgaagccgccggtcagggacaaagcctgcgtggacgcaaacatggcgcataccgtccggacctggtgcatcttgatgacctggagaacgacgagaacgttgtgacgccaaaacagcgggacaagctggaaaaatggctcaacagtaccgtcctgccgctgggcggtgcgggcgtcaagctggatgtgatctacgtcggatccattctgcactatgattccgtgctggcccgcaccatgaaaaacccgttatggaatgcgaaacgctttcaggccattgtccggtggccggttaaccgggatttgtgggaccagtgggaagggatcctgcgtgataaggggaaaaaagccgcgcaggcattttaccggcgcaatgaaaaggccatgctgaaaggctcccgggtctcctggtcggcccgtccgttactggccctgatgttgatccgcgtccgcgttggttcccgggcctttgatgccgaataccagaatgaccccgtcagcggggagaatgccattttccacggctgtatccacgactggacggaactggagccggaccttatctattttggtgcggtggatccgtcgctggggaaacacaacagcaggggcaatgaccccagcgcactgctggtcggcggctggcaccgcattaaacgggtgctcaaggtggtggtggccgatatccgtatccgcaagccaaagaaaatcatcaccgatgtgattgcgctgcagcgccggtatggctgtattgcctgggcgtttgagtccgtccagtttcaggatttcctgcgcgagaccctgatagaagaatccctgaaggcgggtgtcccggttccggcccgggcggtcattcccaccaccgacaaatacgggcgtatcgaatccctgcagccgttcatggagaacgagcgcattctgattggtcgcctgctggccaccctgcgcgaacagcttgagcattttccgatggccgaccacgatgacggcccggatgcgctgcatatgctgttcgccattgcctccaccagtgtggggaactatgaatttattcccgtcagtgactacacggaagatggttcacaccgttttcatgatgaagatgacgccggttccggcgacggcttcggttccggaggatggtaa

SEQ ID NO: 386965 - DNA, 384 bp, Salmonella enterica
atgaatgatccaatgattaaccttgatgacagactgaccgtccggaggacgcagattgtggcgctggaattatcaccgctttacccgtcagtgttcgtccatttgtgcagtggtcaacattttgagctgacggaaaccagatatgaagatgccgtcgcactgtataagcgcctgcagtccctgattcaaccggccccgaaaagaagctgcctgtttccgttgaccaccccggcgtcaggcaagtccacaaatgccctgacccgtagctacagcccgtttacaggtgagtttaaaacacggctgaaaacgcttgttgataatgagcgttttgatgaactgaagcgggcacttgactgcgtccgtaacagtttcggtcggtgttaa

SEQ ID NO: 386966 - DNA, 240 bp, Salmonella enterica
ttgaagcagcgctggctgcgagggttatttccggcggttcagatgattattaaatataccgataaagatatattactgatgcgacagcaacgcgtacaacgcatcgtggattttattgcacaggagtacaccgctgacgagataaatcaggccggagaggcgctatggctgacaatgcaactgatatgcggcccggaccaggccgccagtattgtcagacaatcaacatcggtgtcttaa

SEQ ID NO: 386967 - DNA, 270 bp, Salmonella enterica
atggctagtcctgttaaaccgccggtgatacccgctgcaccggttaagcagtttatttcactcagcgaccgcaatgcggtgcgggccgataccatcgttcgtgtatacgtgcaaagcgattatctgatggtacagactgaagatggtgagattcaccaggcagacggcctttatggccggacggtgtgggatgctaaatctcagttactggagcaaattgaagcagcgctggctgcgagggttatttccggcggttcagatgattattaa

SEQ ID NO: 386968 - DNA, 519 bp, Salmonella enterica
atggcgcacccaagaagcgtaaaagacgccgttcgccgggattacatcacccagggtattccgccggaagttctcggtcccatgcatggcgtgagtgtggcatcagtggtccgctggcgtcgtgaagcccgggagaacggcgacgactgggacaaacagcgggctgcccgacggttatcgtccggcgtaccggaagatatcacccgcgacctgttgctggagttcctggagcatcatcagcacgcgatggaacaactgcgtcaggcccgtgaaggaacggacggtaagcctatgcctgctgaagactacgccagcctgctggcgaagctgcaggacggctttaacaaaatgatggctgccagccgtcgcattctgccggagactgaccgcctgattgtggcggcgggtgtggtggaagatttggcggcgttcctcagcgacagacatcccgcgctgatggcggggttcctggatgtgttacctgagtttcagcagatagtggagaaaaaatatggctag

SEQ ID NO: 386969 - DNA, 270 bp, Salmonella enterica
atggaactgtcacatgaagttgttcaggggttaatcacctttttcttttcggttatttcggcggggctggggatctggttgcgccacctgaccttaacactcgacaagctgcgggatgaacagggccggatgcgcgaactgtttcagcttaaaacggatgccgtgcgcgatcaggagcagattatgaccatgctcaaccggatcgagaaacatctggaacgactggacgggcgtatcgaccgtcgccatgacattgcgggggcgtgctga

SEQ ID NO: 386970 - DNA, 246 bp, Salmonella enterica
atgagcaggccctcggttacggtgacacccgcccccgtgattcaggaagccactaaaccgccggtaagtatggtgaccgtgctcccccgtcccccggctccgtcacgctacgtcagtccgaccgggggactgtcgccggaggcgctgttgcgacacgccagtgattatggtgcatggtgccagggaaacgcgaacaaactggaggcactgaagaaatggttctggccggagggtaaggacaagtaa

SEQ ID NO: 386971 - DNA, 471 bp, Salmonella enterica
atgaatctgagcctcattaaagggtgtctgactcgcctgcttcccggtctgctggtctgcattctgctcggcggcgcggggtgggcgctgcaccatgcagggtataacgccggtcatgcagcagcgaaagcggatggcgacgctgcactggcccgggaacaaaaggcccggagcgatgaacggcaggcgctgacacaggcccacttacaggcattgctgaccgcgcaggagaaggcgcaccgccaacagcagcgggctgatgcactggcggaacaactggcggataaagcagcggcgctggtccggacagagcagcaactcaggttaaacattcataaggcggtcagtgatgacaataaaacggctgattccggttgtggttataacggcatcgggcctcacagcctgcaactctatgagcaggccctcggttacggtgacacccgcccccgtgattcaggaagccactaa

SEQ ID NO: 386972 - DNA, 264 bp, Salmonella enterica
gtgtcactgacgcagaaacaacctgcatttctgagcggcatcgccggtcatctgacggtggagccggtgatttttattgcactgcttgtcagttcggttgccctgctgctgtgtgtggcaatgcgtcaggcaccggacaccgcgctggggctgtatctgggggcatgggtgacacatgccggggtacagtcccatcagcagaagaaagcggcgttactgatgcagggaatacagggaaacggtaatgaatctgagcctcattaa

SEQ ID NO: 386973 - DNA, 390 bp, Salmonella enterica
atgtcttctttccgcttcagccagcgcagtgaaactgccctgcagggggttcaccccgaccttgttcgtctcacccggactgcgttatccctgtctgccgttgatttcggcgtgaccgaagggctgcgcagcatggcacgtgaaaaagaaatggtggcggaaggccacagtgaaaccatgcacagtcgccacctgacggggcacgccgtggatgttgtggcttacgttaacggggctgtctcatgggactggtcgctgtatgaacagattgctgccgcctttaagcaggcctcggcttcactgggggttcccgttgaatggggtggcgactggaagacgctgaaagacggcgctcacttccagcttccgtgggcaacgtacccggcataa

SEQ ID NO: 386974 - DNA, 456 bp, Salmonella enterica
atgcgtgaatttaacctcgaatcccttgaagacctgttgccggagacggcccgcgacattgcggacaccatcggttttccggccacccagcggctgattgaacgcttcggtggggcctgtttccctgtcgggcgggggctgcgcggctccggggagcgacgtctgtcgatgctgcgggaggtcatcggcgaggataatacccgcctgctggttcagcgtttcggcggggaaagttcactggtgatcccccgctgtgccgacgccctgcgcgaatggcgcaaccgttgttttctggcggaggttgacagaatgctggccaatggcgaatcattgcgcatggcgctgacggtgctcggtccccggttcggtatcggtaacacccgcgcctgggccattgtggccacacgaaaacaccacccgccgtcacccgccccggcacagggcgcgctgttctga

SEQ ID NO: 386975 - DNA, 396 bp, Salmonella enterica
atgaagcgtaatctgatccgcatcattcacaccggcaaatcctgcctcggctgggatgatgacacctatcgtgatgtgctctttcgtcagacgggtaaacgttctgcgcgggactgtacggttccggagctggaaaaaacggtgctctacatgcgcacgcagggctttgcgccgtcttcccgtggtcgtcgtccccgcgtggcaacaggccgtaaagccattctgagtaagattgaagccctgctggcagaagccggacgtccgtggggatatcttgacggtatcgtggagcgtatgctgggcgaaaaaaagcccgtggaatggctcgatgatgagcagatatataaggttatgcagatgctgattgttgatgcagcgcgtcacgggaggctgtaa

SEQ ID NO: 386976 - DNA, 1275 bp, Salmonella enterica
atgcacattctgtcctgccggaccttccggaaaaccggcgtggcgctgctggccgcctttgccgtcctgcctgccctgccgctccgtgcgcagggggtcaccggttacacctttacggatgagctgccgacggatgcgtcggccctgccggctgcaccgcagaaaccctggctgcaccgcaggagcgcgaaaaagacggtgccctcagcgggcggagcgtccctgccggccgtcctgctgccgcaggtacaggcgctgcaggcgcaggtggacgccctgacgctgaaactgaaacaggtaaaccagaccgccccgtccctggcggagatgaagcagcaggtggcggacctgaacatacaactggccggtcgggacagcgctctggcggagatgaaacaacagctggctgaccgggatggcatggtggcggacctgaaacagcagctggccggacgggacagtaccctggcggaaatggagcgacaggtggctgaccgcagtaccggcgccacgacgctgaagcagcaggtaacggatctgaaacagcagctggcaaccgaaaaggaagcccgggcggaacagacagaggagttactggccctgaagcggatgacggcggacgtgccgctggataccccggagcagaagcaggcctacgccagcggggtggcttttgcggatatggtgacccgcagtctgcagatgcagaaatccctgggaacggaacagcctgtcgatacggtgctggccgggatcacggatgcgatgaaacaccgttttcgcctgaacagcgaacagataaagaccctcaacggaaaactgtacgcccgactggaagcgcggatgaaggaacagcaggcaaaagcggcgcaggagaaggcggcgcaggaaaaagccggggcggactggtatgcccgttaccggaaacaggccggtgtgaaggagctgcgtcccggcgtgctgtaccgggttatcaggcccgggaagggggcaccgctgaaggcggacaatacggtggacctgttactgaccggggcgctgtcagacggttatctgtttgatgacagtggtctgaaaggccgggttcagcgcctgaagccggaagatattctgccggccctgacggatgttctgaccacgcagcgcgccggctgccatgtggaggtgctgctgtccccgtcgcaggcgttcggggacgaaggggtgccggggatgatacccggcggcgccaccctgaagtttgacatacaggttcagaagaaacagccgcactga

SEQ ID NO: 386977 - DNA, 834 bp, Salmonella enterica
gtgaaattcatcatgatactgctgccggtcctgctgaccgggtgtgctgcccggcccgtgccgccgggcggcgggggctccctgctgtccggcgtggaaacgcaggtggcggcagtgacccgccaggcgatggacggcgacccgggtgcccgggtgctgtatgcccgctggctggcggataccggcagcacggcgcaggcccgggaggtgctgtcgcccctggctgaccagggtgacagggaggcgcagtaccggctgggatgcctgttaatggcggaccggacgccggacagccgtcgtcaggccgtggaccggatgacccgggctgccacggccggcctggcggtggcgcagcggacgctgggcgactggctgctgaacggcagtgcgggaacccgtgacccggcggcagctctggtctggtaccggaaggcggcggcacagggggatgcggcggcacagaatgccgtgggggcagccctgtccgccgggcggggaaccgcgcaggaccggccggcggccctggtctggtaccggaaggcggcagagcaggggaatgccctggcggccctgaatacggggaatgcgtactggaccggcagcggcgtccgggcaaatgctggcgtggccatggcctggtatgtcctggcggagcacaacgcacggccggcggagtctgccgtgcgccggctggcgcagcagatgcgtgtccgcgccatgatgctgtccgcgaagcaggggcggctgagtgctgcccgcgccctggcggaacagtacctccggcgttatggccgtcccggtgtgcccgtcaccccgcttcccggcggggcgtga

SEQ ID NO: 386978 - DNA, 537 bp, Salmonella enterica
atggcgatgaagaaacctggtctccacctggctctgccggccctgtgtctgtgtctcagtgcctgcagccattttgcgccgcccccgttatggcagaccctgacgggcgggacatccgccgcggcagccccggaggggcctgatgaaccggacgacaccctgcatccccctgccgtggcgggggcgccggtgacagggacaccgggaattcaggcggccggtacgcccggacgtgcgccggcgggctcccggacaccggctctgccggcttccgtcgcacaggcctcccgcctgacgcagtgtcaggatgagctccgggccctgcagggactggacagggcgggctggcagcggaatcagcctctgctggatgaggtgctggccggcgcgtcccggtatgtgatgctgcgcccccgcctgagtgcggacatgcgtcaggtgatggacagcgtgcaccaggcacatctggcgcgggcctgtcagaaaattcatgccgacctgttcagcgccctgctgaaacgtgcggataacccgtaa

SEQ ID NO: 386979 - DNA, 594 bp, Salmonella enterica
atgaaaaacagattataccgggcggcgggactggtgactgccatgctgctgcccgggctgaccatcctgcctgcccgggcagcaaaggtggctgacggtaccgtgaattttaccggtgaaatgctcggggcgacgacctgcaccctggaaaaccactccctgacggcggatttcggcacgattaacgtggaccggaaggggggaattccggccaatccgctgacttccggaagaacggtcgcgttccgttttacggggtgtgcaacaaacatacagaaagtgaatatgaccgtggactttgattctgtatttggtgacgactcgctcatcttcaacgcagaggggtcagccggaaatgtggctggcgtgctggtctgtccggcgaatgccctgatgcagggagaggcctgtacggcaggtgcccgcatccgtgcggggagtgttgttcatggcgtggtgaacagtaaccgggaggtgagtttccccctggaggtgtctctggtgtcttttgatggatttaatccgtcatccccgtacatgccggatgccgggagcatcaatatgacggtcagattcacctttgaggaggagtaa

SEQ ID NO: 386980 - DNA, 1095 bp, Salmonella enterica
atgaataacgtaaccatttttgcctgcagtctggcagcaacaacgctgctggctgtcctgccgggaggagtttcaccggcccgggcggcagacctgaccctgccggcgttgccggccgggtgccagtacacccgtcagtcgctgctcccggtacaggggacattccgggtggagcccgggacgccgctgtacggtgtggtgggcccgcagcagacgacattcctgcaggtgagtctgcggtgtgacacgccgctgtccaccccgctgacgctggccctgaaggggagcggcaacctgaactggcaggggccgggccgggatgtgctgcccacggcggtccgggataccgggctgcggatgtatgcgcagggcgaggcagcgggcggcacctgcagtccgggcggctggctgggtgccggcagcggggactggcagtgcaccctgccggcgggcggtaatggcgcgcagacgctcagtctgcaggtggcggcgcaggtggtgaagaccggggaaaacacgccggtactgtccgcccgggccctgcagccggagaacggggatattcagctgcaggtgaatggcagcccggtgcccctgacggggacagggattattgccccgcagctggccacaccggtgacctgctccattgagagcggaaaggatgacacgattaacttcggaactgtccgccggaataccggcgatcagtacaactataagggcaaccagctgactgttcagacacaaaacatctccatcaggtgtgacccgcaaccggatgatgccagcccttataccgtgtccctgaggttcagtggggatatctcggatgtttacaattttggtcttgcctcaagaggggccctgaaaacatccatctccgacctgttcattctcccgacgagcactcaggttttggggcaccgcattccgattaatgatgtggcggttcccctggagctggatcccaccacgcagcgttacaacctgtcggtggactggtctctgatggggtacagccggaacggtcaggctccggctgaatacggcaatttcttcgctgtcgcaacctataccgtggatgtggactaa

SEQ ID NO: 386981 - DNA, 2607 bp, Salmonella enterica
gtgtgcggacaggctccggccggaagactgccggggcggccggcactgctgagggaggcggtctgccgggcgctcggtaccgtcaccctcggggcgggcctgctgtgcggacacggcgtgtatgcccgggactggtttaacccggccctgttgtccaccggcgggggcggggcaccgtcggccggggtggcggacctgtcccgttttgagaacggcggacaggccccgggaacctaccgggtcagcctgtgggtgaacggggagcaggtggacgagaagaatgtggtctttgtggacgggccggacgggcacctggtgccggccatgacccggaaggcgtatgaagccctgggcgtgcgcccggacgccaccccggcctttgccgccctgccggaggatgcggtggtgaaaaacctgccgcaggtcctgccggcctccaccaccaccttccgtttttccgaccagcgactggatatcacggtgccgcagataatgatgcgccgccgcgtccggggcgaagtggacccggccctgtgggaccaggggatgccggccctgctgctggactatatggtgaccgggaaccggacccgcgacctgtcgggcagccatatgccggcaacggacagcctttacggtaatttccggggcggcgccaatctcggtccctggcgtctgcgcagctatgcggtgtacagccggtcacagtccggcgaccgtccggcgcagtctgactttcacgtcatcagcacctaccttcagcgcaacatcgcttccgttcgtggggaactgaccatgggggattcctccacgccgtcggacgtgtttgacagcgtgcagttccgcggggtgcagctggcgtctgacgacgccatgctggctgacagcctgcgggggttcgcgccggttatccgcggcgtcgcggacacgaacgcgcaggtcaccgtccgccagaacggcagcattatttaccagacctatgtcccgccggggccgtttgaaatcacggacatttatccgtcctccctgagcggcgacctggaggtgacggtccgggaaaataacggccgggagcaccgcttcacgcaggcctattcctcggtggccgtgatgcagcgcgaggggcagatgaagtatgccatgacggcaggtcgcctgcgcctgagcgggcagggcgacctgcatgaagcgaaatttgtacaggccaccctgatttacggcctgccgcatgacctgacggtgtatggcgggatgcagatagccgccgcctatctggccggcacggccggggtcggggtgggactggggtccctgggggccatgtccgtggatgtcacacaggcaaatgccaccctgcaggatgaccggaaaacacaggggcagtcctaccgggtacggtactccaaaagtatggtggataccggcaccacactgtccctggcagcgtaccgctattccacgcagggttactacagcctgcaggatgcggcctcagaagaccggtttgccgcaggggggcgtaacgaccacctgcgcagcgagacggacctgacagtgagccagtcgctggggccgtggggcagcctgtatgcctccgggacacggcgggattactggaatgccggccggggcaagcagcacacctggatgctggggtacaacgtcagcctgaagggggtcagctatggcgtcagctacagccggacgcatgacacccgccgggaccgtgatgacagccggctgttcatgaacgtgtccgtgccactcagtcgctggctgccggggaacgatgccctgcaccagtcttacagcatgaacgcaaattacagctacagcacggaccaggaccatcacgtcacgcaccaggccggtatcagcggcacggcgctggaggataatcgcctgagttacggcctgaacgaaacccttcaggaccagcccggacagcgcaacagtatgggcgcttcccttacgtacacggggcggaatggcgtgctgcagggcgggtataaccgcagccagagccagtcgcagattaactacggcctgagcggcggcattcttgttcacccgtacggcatcacgctctcccagccgatgggggaaaccctggcgctggttcgcgcgccgggggcggataacgtgaaggttcagaaccagaccggactgagcaccaacctgttcggctatgccgtcatgccgtccctgaccccttaccgccggacggatatctctcttgacccgtcagggctgggcaacaccgtgtcgctcagccagaccagcacgtccgtggtgccgacccggggggcagtggtgctggcagattaccggactgaacaggggcgccaggtgctgatgaccctgcaccgcccggacgggaagccggtgccgttcggggcaatggcggccctgaaaacgcagaaggataacacagccatcgtgggggataacggccaggtgttcctgaccggtctcccggacgagggcggactgaccgtgcagtggggcagcggtgccggccagcactgccaggtgccgttccgcctgccggcggcgcgggaggaagacaccggcgtgccgctgcaggtgcaggaagtctgtcggtaa

SEQ ID NO: 386982 - DNA, 519 bp, Salmonella enterica
atgactgtcctggtcatgccggaaatggctggcgcggcaaccaccgggacgcagacctttaaggcggctgtcaccaccggaacgtgtacggtaccgggaagccagatgacgcagaccattgatttcgggaatatcccgagactgaaaacgctgagcggcagtgatacggatgcagagacggttggtgtccctgtcgtttccagaaatattcattttaatgtcaccggttgtccggtcaacatttctcttattggtctggaggtcggtttcaccccgtggtcggttgcgcatcagagctggataaaaaacaccggttcagccggaggggtggcaatggcgattactgattcagggggcgcggttatgaatacgggggatgtgctggctccggacaatgcactgcagaacggagctgtcacgattgagagcgttgtccatgtttaccgtgtggtaaaaaaggggctggttaccccggggggaataagaggcgaggtgactctggtgttgttttcagcgtga

SEQ ID NO: 386983 - DNA, 732 bp, Salmonella enterica
atgagccataaacctgccggagttttattatccggactaatgatgttgttctgcctgaccgcccttccttccgcaaaggttcacgctgaagacaggggaggtttcagcctcggaagtacccgggtgatttatgacggcagcaaaaaagaagccacggtgacggtaattaattccgctaaaaatgcgcctttccttgcccagtcatgggtgacggaatacgcccccggaaaaaagcagcccgccatggcgccttttcttgtgactccaccgctttatcgtcaggacgaaggcaggaacatgctgcgtattgtcaggaccggagggcagatgccgtctgaccgggagtctgttttctggctgaatgtgaaggccgtcccggccatgcatgaaaacctggccggtaagaacacgcttcagttcgcctatgtgctgcgggtgaagctgttttaccggccggcagggctgagtggggatgcctcgaaagccggagacagcctgacgttttcccgtcagggcaatacgttgctggcaaggaacgccagtccgtactacatcacttttaataagttgtctgtgggcggaaaggatgtgaaggacgcgtcatcggtgatggtgccgccgaaaggcgagcagcgttacacgctgccggctggtgcaaccggtcatcaggtgtcattccggacgctgaatgattatggtggtgtgctgccacagcagacggtgacgttctga

SEQ ID NO: 386984 - DNA, 549 bp, Salmonella enterica
atgaaaatcaaaaattgcttatttttactgggtaccgccatggcggtaatgagttcgtcagcatttgcagacacgacgggtacacagacctttacggctaatatcactgcaaatacatgtactgttgataatctgaataagacagttgatttaggttctgttttttcttcagactttacgtctgcctttggcagcaaggtatccaacaaatttatcgataccggctttcagatcacaggatgccctgccaccattacaactgtaaaagtaacgccaacttttgtgacgccgtcgtcagacggcgcaaaatatggttttgtagaaaataccggaacatttgatgcggtttttgcaacaaacattacctcagcaaatgacgtcgacgacaaccagaaatggcttcccggaacagaaaaatcttttactgtcactaatggtgatgcttctgtacctgttcaggggaaattgtacctgggtaagaatggtaggggtagttcttcagcggggacattgaactatgcaatgtctttcacctttgattttgcctga

SEQ ID NO: 386985 - DNA, 537 bp, Salmonella enterica
atgaacaacgccatgaaattactggctatcgctgttttgtcggctgcgggcatgtcggcagcatctgctgccactcagggtaccctgaccatcaccggtaacgtggtggaccagacctgtgaggtggatgcgtcacaactgacccgtacagttgacctgggggatattactcagggagccattatagccgcggcacagaacgcttctgttaccagcaaacctctgacatttgacgtcaccaaatgtccggcatccaccacaagcgtggggattaaattcgactacacgacggacgcaaccaacacccagtacctggaaaataccgggaatggtaagggtgtgctgctgggcattacggatgatacggataccctggtgacagcgggcggtgtggtgaaggccgcaaatctggataccactgcgggtacggcaacagtaaatgcaaaagtgcaggcataccgtacggcggtcgccgacacagatgttactgcgggtaatattgcctccacggcgacagtcactgtggcaatgaactga

SEQ ID NO: 386986 - DNA, 657 bp, Salmonella enterica
atgtctgaacgtaaatacctgacgcagaatgaagtgtcagccatcgtgaacgccgccagtcagcgaaagtatgctgaacgtgactgctgcctgattatgctggcttattttcacggttttcgtgtcagtgaactgttgtcactgcgtctgtcggatgtgaacctctcagccggttccctttatgtccgccggctgaaaaatggcttcagcacaatacatcccctgcaggcttcggaggttaaggtcatcaggtcgtggctggcagtcagaaaaacatggctgtgcaggaagccgcctgaaaaccactggctgtttatatcccgggccggaaacccgttgtcccggcagtatttttatgctgtcctgcgtcaggcgggagaggatgcaggtctgtcactgcgggcacacccgcacatgctgcggcatgcctgcggctatgcgctggctgacaacggggtggacacccggctgattcaggattatctggggcaccggaatatccggcatacggtgaggtacacggcctcgaatgcggcgcggtttgacggcatatggacgcccggacgacgccgggggaggcaactttttgaccctaaatgtaacctcctcctgaccgacgggcagattctgtctgatacccatctcccgcgccagtaa

SEQ ID NO: 386987 - DNA, 186 bp, Salmonella enterica
atggtccagcctttcctgacgatcagtagtctggagaaacaggaagagccgccgtcgttgcttcgtttaaacaatcggatcaaacaattgctctcaccagtagatttgacggaactgttacttgagatagatgtcaggacgggacttacacatgagtttgcacatgtcagtgaatctggtgcttga

SEQ ID NO: 386988 - DNA, 2136 bp, Salmonella enterica
atgaatcttattgctattttaagcgacgatgaattcttttttaaaaaagaaccattaattcttttgtctgaagtgctaaaaaaacaaaatataacgtttgtttggccggaaaatgaaaaagatttactaaatgttctggaaaataattcaaatttacgaggcgttgtttttgactgggatcagtatagtcttgaattatgtgaaaaaattaatcaatataatgagttaatgccaatatatgcttttactcatcagcatacgcagcttgatatcgattttagccaattaaatttaaatgttaatttctttgaatttgctattgatagcgtaaacgatattgccttaaaaataaaacagataacagatatttatatcaacaagttattgcctccatttacaaaagcattatttgaatatgtgaaagagggaaagtatactttttgtactccaggacatatgggagggactgcatttcagaaaagccctgtcggttctattttctatgatttctttggtagaaacacgatgaagtcagatctgtctgtttctgtatcagaactgggatctcttctcgatcattcaggcccgcatgcagaagcagaacattatattgcagaaacattcaatgctgaacggagctacattgtaactaacggaacttcaacagccaacaaaattgtgggaatctattcagctccagccggaagtacaattctgattgacaggaattgtcataaatcgctgacccatttaatgatgatgagtgacgttacacctatttatttccgtccgacccgaaatgcttacggtatacttggtggaataccaagaagtgagtttgataaagctacaatcgctgcccgggtgaaggaaacaccgaatgcttcatggccggttcatgcggtgattacaaattcgacctatgatggcctgttatataacactgattatatcaaaaaagaacttgatgttaaatcaatccactttgactctgcctgggtcccttacactaatttcagcccaatctataaaggattgtgtggtatgagtgggaaacgtactgaaggaaaagttatttatgaaacgcagtccactcacaaattactggcagctttttcgcaggcatctatgattcacgttaaaggagatattaacgaagaaacctttaacgaagcctatatgatgcatacatcaacatcaccacattatggtattgtagcctcaacagaaatggctgcggccatgatgaaaggaaatgctggtaaacgtttgttcagtgaatcaattgaacgggcgtatcgttttcgtaaagagatggtacgactgaaagagcaagccgatggatggttttttgatatttggcagccagataatatcactgatgtgaagtgttgggagttaaattccactgacaactggcatggttttaagaatattgataacggacatatgtaccttgacccaatcaagattactttactgaccccgggtatgaatgctgatggtactatggctgaatttggtattccagctagtattgttgctaaatatctagatgaacatcatattattgttgaaaaaaccgggccatacaacttgttatttttattcagtattggcattgataaaacaaaagccatgagtttattacgtgcattaaccgattttaaacgtgtttatgatttgaacctctctataaaagaagtattgccatccctttatgcggaagcacctggattttatgataatatgaaaattcaggagttagcacgaaatattcacatgcttattcgtcatcataacttacctaaattaatgtataaggctttcgatacattacctcaaatgataatgaatccgcataaagctttccagaaagaactccatggtgaagtaatggaagtttatctcgaagagttgttaggaaaagtaagtgcgaatatgattcttccttatcctccgggggttccattagttatgccgggtgaaaaactgaccgaaaaaaacaaacctgttctggagtttttacagatgttatgtgaaatcggttctcattatcctggttttgaaacggatattcatggggcatatcgtcaacctgatggtcgatatactgtgaaagttttaaaacaataa

SEQ ID NO: 386989 - DNA, 1323 bp, Salmonella enterica
ttggacaacgttaaaagcaacaaaatgggcgtggttcaattaacaatattgaccgccgtaaatatgatgggctccggaattattatgttgccaaccaaacttgctgaagttggtacaatgtcaattttgtcatggtttgttactgctttagggtctcttgcattggctttcgcattttcgaagtgtggattaatcagttcccgcgccggaggtatggggggatatgcagaatatgcttttggtaagtcaggaaatttcattgccaattatacttattctatcagtttgttgatagcaaatatagcaattgctatttctgctgtagggtatggctctgatctttttagtgttgttttatccccaataggagtttgtgttgccactatcattatattgtggattaccacaatatgtaatttcggaggggccaggattactggtcgaattggttctgtcactgtgtggggcgttattattccggttgttggtttgagtatatttggatggttctggttttccccatctttgtatatagattcgtggaatccacatcagatgcattttttttctgcggtttccacatcaatttcgatgacattgtgggcattcttgggtctggaatctgcttgcgctaatgctgatgcagtcgaaaatccacaacgaaatgttcctgttgcagtttttggtggaactcttgcgtgtgcagtcatttatatcttatcaacaaatgttattgctggcatcattccaaatgatgcattattaaaatctacagcaccttttggactggcatttgcacatatgtttactccggaagtcggtaaagttattatgggattaatgactctggcttgtatcggttcactgttaggctggcaatttacggtagctcaggtatttaaatcatcatcagatatcggatattttccccgtgtattttcaaaagagacaaaatcaggggcccccgttgtaggaatgcttattcttggtggtatacaaacattgttagccctgatgactatcagtccatcactgacaaaacaatttaatagtttggttgatttggctgtagttacaaatttaatcccctatgtactttccatggcagctttaattccaatgcaacgttacataaatctgaccaaagggcaaattaaatttaatacaattatagccattattggcactatctatagtttttatgcactttatgcctgtggccctgaagcaatgctaatgggttctcttgttactttttctggctggactttttatgggatgtgcatcaaagacgaaaatactgttccagttttgggaaaataa

SEQ ID NO: 386990 - DNA, 1512 bp, Salmonella enterica
atgtcagtaagtttacggaataatcagcacagtctcggcgatgaattacatattcgtagagaaaagttaaaccgaattcgccaggaagaacctattgcttttcccaatgacttccgacgagacaggatttcgtctcagttacatgcacaatttgataataagagtagagaggaaattgctgcctataccgcttcgattagagttgccggacgtgtaatgtcataccgacatatgggtaaagccttatttattacactacaggatatgggaggacggattcagttatatatttcagacaatcagttaccttatggagaatatgacaaactgttgcaacggattgatctgggcgatatttgtggtgcacagggggtcttgtttaaaacacaaacaggtgaattaactattcgatgtacctcactcaagcttttgacaaaagcattacgaccactgccagataaatttcacggattacaggatcaagagtctaggtatcggcagcgttatctggatcttatttgtaacaaacaatctcgcaacacttttgaaattagatcacaaattctgtcaggccttcgtcagtttatggtcgaccgggggttcatggaagtagaaacgccaatgatgcagttaatccccggaggagcatctgcgcgtccatttatcacacatcacaatgcattggatctggatatgtatttacgcattgctccggaattatacctcaaacgtctggtggtcggtggttttgaacgcgtatttgaaataaaccgtaacttccgcaatgaaggtatttctgttcgtcataatccggaattcacgatgatggaactttatatggcctatgcggattacaaagatcttattgaacttactgaatcattgtttcgcacactagcgcaaaatgttttaggtacaacgcatgtgccatacggcgaagaaatgtttgattttggtaagccctttgaaaaactgactatgcgtgaagcgataaaaaaataccggccggaaatcaatttatcagatttagataaatttgactcagccagaacaatcgctgaaaatatcggtattaaagtggaaaatagttggggaacaggcaggatcttaaccgaaatatttgacgaagttgctgagtctcatctcattcagccgacattcattactgaatatccggctgaagtttcaccactggctcgtcgtaacgatatcaacccggatgttactgacaggttcgagtttttcatcggcggacgtgaaatcggtaatggcttcagcgaactaaatgacgcagaggatcaagctcaacgttttatggatcaagttgctgcaaaaaaagctggcgatgatgaggctatgttttatgatgaagactatgtgacggctctggaatacggattacctccaacagccgggttgggaatcggtattgaccgaatgattatgttatttacaaacagtccatctatcagagatgtaatcctgtttccagcaatgcgaccaggtaaataa

SEQ ID NO: 386991 - DNA, 1482 bp, Salmonella enterica
atgacagcaaccggtcgacggtctggtgcaacctcagcctctgcaaaatggcagtccatcaactggctggccgttgaacagcaggtttcaaggctgcaaatgcgtattgcaaaggcaatgcgggaaggccgctatggcaaggtaaaatccctgcaatggctgctgacccactcgtatgccgccaaattgctggcagtacgacgagtttctcaaaacaaaggcagtaaaacggctggtactgatggtattacgtggcgaaccgataaccacaggttgaccgctgttggacagctcaagtggcgtggctatcatgctaaaccgctgaggcgcgtttatatccccaaaaagaacggcaaacagcgtcctttgggcatcccctgtatgatagacaaagcgcagcaggcgctgtatctgctggctttagagccgatatcggaaacggtagcggataagaactcatacggttttcgcccaaaacgcagcgccgccgatgcagttgagcaatgttttaaagcgttatgtagaaaaacatctgcacaatggatccttgaaggcgatataaaggcctgctttgacaaaattggtcatcaatggctcattgataatatcctgacagacaagtcaatgttacgccaatggctgtcggctggctatatcgataaaggtttgttttatcatactgatgcaggaactccgcaaggcgggatcatttctccaacattgatgttacttacgctggcaggactggagcggcacattaaacaggctgcgcccagaaaagcagaaaaggtcaacttcatctcctacgccgatgatttcgttgtcaccggtgcgtcaagggaattgctggagaacaggataaaaccgctaattgtgtcgttccttaaagagcgtggactggaactctctcccgagaagaccatcacgacctccatcagtcagggatttgattttctggggttcaatatacgtaaatacagaggtaaattgctgattaaaccctgcaaagccaacgtattaacgttcataaggaacaccagagcactcatcaaatcccatcccacaatggcaacaggtgaattaatcagactgctcaatcccaaattacggggctggggaaactattacagacactgcgtcgccaaacaaacctttggatatgttgactgccagatattcgggacattacagcgctgggcaacgcgaaggcatccgaataaaggcgccagatgggtaaccagaaagtactttttactggaatatgcgcagcactggtgttttcagggaagatctcatcttgatggtgtgacaacctcagaatatctgactcaactggtcactatcccgataaagcggcatacaaaaatccgcagtgaggcgaccccttatgatccggcgttcgccagttactggcgttcacgcaaggaatatcgggacaaaagccgaaacaactggcatatatcaccagaaaccgcgttatga

SEQ ID NO: 386992 - DNA, 294 bp, Salmonella enterica
atgaaagaatgtaaaaacggctgtgcaatttttccggcggaaaaggcgtttaaattttcgctgggtcaactggtaaatctgcgcatcagtgatgaatggggtgaggtgcaggcccgggctcagtaccttaatggcgaggatcagtatctggtttattatcaggctgccgataaatgcgcaactgagcgctggtattcagaatcacaactgatggcggtcgaagatgagtgtcatccgggatgtccggtgtttgctggtgtggaattgccggaaggggcggtcgttactgagtaa

SEQ ID NO: 386993 - DNA, 159 bp, Salmonella enterica
atggcaaaacctgacatccaatccagaattgctgagcttaaagcgcaacgcaatgatctgattggcataaatgcgacatacatcctgaatcgtctcgttaagacagaccagacggacgtactcgacatcctcaaagataacatgagtctcaggccgtga

SEQ ID NO: 386994 - DNA, 294 bp, Salmonella enterica
atgaaagaaggtcaaaacggctgtgcaatttttccggcggaaaaggcgtttaaattttcgctgggtcaactggtaaatctgcgcatcagtgatgaatggggtgaggtgcaggcccgggctcagtaccttaatggcgagaaccagtatctggttcattatcaggctgccgataaatgcgcaactgagcgctggtattcagaatcacaactgatggcggtcgaagatgagtgtcatccgggatgtccggtgtttgctggtgtggaattgccggaaggggcggtcgttactgagtaa

SEQ ID NO: 386995 - DNA, 492 bp, Salmonella enterica
atggatcgtgaattgaaaaatctgatgctgaatattaaccaactggcggcgatagcgggaatatgtcgccagacggctgcagcaaggctgcaaaatatccagcctgccggaggacatgacaagctgaaactctatcgggtgactgatattgtgtcggcatttctggcgttaccaccgccggttgctgaaggtgaaatggatgcgcatgagcgcaaggcctggtatcagtctgaacgtgaacgacttaagttcgaacaggaaacggcacaactcattccggccagtgatgtcagacgggagttcgccatctgggcaaaagcggttgtgcaggtgctggagacattgcctgatattctggaacgtgactgcggtctgcagcccgctgctgtgagccgtgttcagtccattattgacgatctgcgtgatcagatagcccagcgtgtaaccgaagctggttcggatgatgaggaggaatcacagcaggaggagtga

SEQ ID NO: 386996 - DNA, 2103 bp, Salmonella enterica
atgctgaatcaggaaacggccagagttgtacgaacagattcaggttatatccttcgcgcaccgaggcgaatacgggttgctgatgctgttgcgcagtatatgcgggtacccatgggggccgggaactcagtcccgtgggatccgctggtggcaccgtatgttattgagccgatgaactgtctggcctcgcgtgaatacgacgcagtgatatttgttggcccggcgcgaactggtaagactatcgggcttattgatggctgggtggtgtacaacgtggtatgtgatccgtcggatatgctgatcatccagatgacggaggaaaaagcccgcgaacactccaaaaaacgtcttgccagaacatttcgtgtcagtccggaggtggcggagcgtctgagcccgaaccgaaatgacaacaacgtttacgaccggacgttccttgcgggtaactacctcaaaattggctggccgtcagtcaatatcatgtcctcatcagactacaaatgtgtggcactgacggattatgaccgttttccggaagatattgatggtgagggggatgccttctctcttgcctcaaaacgtaccaccacatttatgtccagcggtatgacgctggcggagagttcccccggcagggatgtgaaggatgtgaaatggcgacggacttcaccgcatgaggctccaccaaccacggggatactgtcgctctataaccgtggcgatcgccgtcgctggtactggccctgtccacactgtggtgagtattttcagccatgcggcgatgtggttgctggttttcgtgatattgccgatcccgtgcaggcaagtgaggcggcttatattcagtgtccttcctgttccggacggattatgcctgaacaaaaacgcgagctgaacggacgtggggtctggttgcgggatggtgaatccatcaatgcggatggcagtcgttatggtgatccccggcgttcacgtattgcgtcattctggatcgagggtccggcagctgcttaccagacactctcgcaactcgtttacaaactgcttactgcagaacaggaatacgagacaaccggaagcgaagaaactctcaagacggttatcaataccgactggggtcagccttaccttccccgttccagtctggaacaacgaaaaagtgaactgcttgaacagcgggcagagccagttccttcccgcagtgtgccggatggcgttaatttcctcgtggcgacagtggatgtgcaggcgggacgtcatcgccgttttgtggttcaggtaacgggctatggcagccgtggcgaacgctggattattgatcgttacaacatcacgcagtcattgcgcggtgacagcgacggggagagccagcgaattgatccggccagctatccggaagactgggatgtcctgctgacggatgttttccataaaagctggccgctggcctccgatccttctcaacaaatgcgactgatggcaatggcggtggactccggcggtgaagatggggtcactgataatgcctataaattctggcgtcgttgccgtcgtgatggccttggtagacgtatttacctgtttaagggcgacagcctccggcgcgcaaaactgatcacccgtacattccctgataacaccggacgaacgggacgacgggcgcaggccgcaggtgatgtgccgctctggcttcttcagacggatgccctgaaagaccgggtaaataacgcgttatggcgtgactcgccaggtcccggctatgtgcatttccctgactggatggggagctggttttatgacgaactgacgtatgaagagcggagcagtgacgggaaatggagtaagccggggcgtggtgccaacgaagcctttgacctgatggtatacgccgaagcgttggtcatactgcatggatacgaaaaaatccgctggccggatgcgccggaatgggcgcgccgggaaacctggctggagtttgtccgggatgataccgaaccatcagtctcgccggagccggtacctgcgtctgttaaaaaacaaaaacggaagaaaacggcaactgacgatgttaacccctggttgacttccggaggatggttatga

SEQ ID NO: 386997 - DNA, 213 bp, Salmonella enterica
atgaaccagagtgatattgaagccatgattcagcgttatatcgaagctgaaatggcggtactggacggaaaatccatcacctttagcggtcagcagatgaccatggaaaacttatctgagatccgacaggggcggcaggagtgggagcgccgtcttgcggttctgattacacggcaacggggtaataccgggtaccgactggcgaggttctga

SEQ ID NO: 386998 - DNA, 1509 bp, Salmonella enterica
atggcaattcttgatgatgtgattggtgttttttcaccaggatggaaagcggcaaggctgcgttcccgtgcggttatccgggcttatgaagctgtaaaaccgacgcggacacacaaagccagacgggaaaaccgaactgcagaccagttaagccagttcggagccgtgtcgttacgcgagcaggcccgttaccttgataacaaccatgatctggtcattggtgtatttgacaagctggaagagcgggtggtgggaaaaaacggaattattgtcgagccacatccggtattacgcaatggggctattgccagtgacctggcagcggagatacgcacccgatggagcgaatggtctgtcagtccggaggtcaccgggcagtttacccgtccgatgctggaacgtctgatgctgcgtacctggctgcgcgatggtgaggtgtttgcccagatggtttccgggcgcataaacagcctgacgccttctgccggcgttcatttctggctagaggcgctcgagccggactttattcccatgaccagtgatgaaagcagcaggctgaatcagggcgtgtttgttgatgactgggggtgtccgcaaaaatatctggtgtataaaagccgtcctgtatccggacggcagatggaaaccaaagaagtggatgctgagcgaatgctgcatcttaaatttgtccgtcgcctgcaccagacccggggggtatcgatgttgtccggcgtgctgatccgactcagtgccctgaaagagtatgaagattctgagctgactgcagcaaggatcgccgctgctctggggatgtacatcaggaaaggcgatgggcagagttatgaagcggacggcaatggttccggggagaatgaacgcgatcttaccattcaccctggcattatctacgacgatctgagacccggcgaagaaatcggaatggtgaagtcagatcgccccaatcctaaccttgaaacttttcgtaatggtcagttgcgtgctgtggcggcgggcagccgtctgagtttttccagtgcggcgcgcaactataacggcacttacagcgcccagcgtcaggagctggttgagtccaccgatggctacctgatcctgcaggactggtttattggtgccgtcacccgcccgatgtaccgtgcctggctgaaacaggctgtggcatccggtgttatcaggttaccccgcgatctggaccgttcttcactgtataccgcggtgtattccggaccggtgatgccgtggattgaccctgttaaggaggctgaggcttggaaaatcctgattcgtggtggagcggcgacagaatcagactgggtacgtgctggtggtcgtaatccggatgatgtcaaacgtcggcgcaaggccgaaattgatgaaaaccgcaagttggatctggtatttgataccgatccggccagtgataaaggaggtagcagtgtcacaacgaaacgacaggagccgcagcacaccgacggccagtccgaagaataa

SEQ ID NO: 386999 - DNA, 2073 bp, Salmonella enterica
gtgtcacaacgaaacgacaggagccgcagcacaccgacggccagtccgaagaataactcctggttcaggatgcaggccggtcaccagagtgacgcggatatttatatttatgacgagattggtttctggggagttacggcgaagcagtttgtcagtgatctgaatgcgctgggtaatatcacccacattaatctccatattaattcgccgggtggcgatgtctttgaaggcatcgctatttttaatgcgctgaaaacacatggtgcgtccattaccgtttatgtcgacggtgtggcggcgtctatggcgtcggtcattgcgatggtgggaaatccggtcattatgccggaaaacaccttcatgatgatccataaaccatttggctttacgggcggtgatgcggaggacatgcgcacctatgccgccctgctcgataaagttgaggcggttctgttacccgcttatgcacagaaaaccgggaaaaccaccgatgaaattgctgccatgctggcggatgaaacctggatgtccggtgccgactgtctggcacatggatttgctgaccaggtgacgccagccgttaaggcaatggcatgtattcagtcaaaacgtacagaggaatttaaaaagatgccggaatccattcgaaacatgattactccgccacgcaacagtgcgccgcgtgaacctgaaaacaagactactgagtctcaggtacaaggacaggttacggttcatgctgccacagctgtgcatgatgccgggactactgcaaatacgccatctgcagatgaacgtcgcattcgtgcgcaggttctggcagagcaaaaggcgcgtgtaaacggtattaatgatctgtttgccatgtttggtgggcgttatcagacgctgcaggctcagtgtcttgccgaaccggaatgttcgctggagcaggcccgcgagaaactgttgaacgagatggggcgcgagtccacgccatccaataaaaacaccccggctcatatctatgccgggaacggtaattttgtgggggacgggatccgccaggcgctgatggcgcgtgccggatttgaaaaaaccgaacgtgataatgtctacaacggaatgaccctgcgtgaatatgcccgtatgtcactgactgaacggggtattgtggtttccggttataacccgatgcagatggtcggtgcggcgttcacacacagtacgtctgacttcggtaatattctgctggatgttgcgaacaaagccattctgcagggctgggaagatgcccctgaaacctacgaacagtggacgcggaaaggtcagttgtctgattttaaaattgcccatcgtgtggggatggggggcttcagtgctctgcgtcaggtgcgtgaaggggcggaatataaatacgtcaccaccggagataaacaggccactattgcactggcgacctatggcgaactgttcagtatcacccgtcaggccattatcaacgatgatctgaatatgctgaccgatgtcccgatgaaactggggcgcgcggcgaaatctactattgccgatctggtttatgtcattctgacgtctaacccgaaaatctccacagataatgtaagcctgttcgataaagcgaaacacgcaaacgtactggagggcgcagcaatggacgtggcatcactggataaagcccgccagctgatgcgtgttcagaaagagggtgagcgtcacctgaatattcgtcctgcgtttgtactggtaccgacggcgatggaatctgttgccaaccaggtcattcgttctgtaagtgtcaaaggggcagacattaacgccggtatcattaacccggtgaaagattttgcgaccgtgattgccgaaccgcgtctggacgacaacagtcagtccaccttctatttggcggcagcgaaaggctcagacacgattgaagtggcctatctcaacggtgtggacacaccgtacatcgatcagcaggacggtttcagtgtggacggcgtgaccaccaaggtgcgcattgatgctggtgtcgcacctgttgatcaccgtggtctggtgaaatgtacggcgtaa

SEQ ID NO: 387000 - DNA, 324 bp, Salmonella enterica
atggcgaaaaattttgtagaagacgggaaaacggtggcgattgttgccagtgctgctgtcagcagcggagatttggtgccggtgggcgatattttcgcggtggcgctgaccgatatcccgcagggtgaaacaggcgacggtatgaccgaaggtgtatttatgctgccgaaactgaaaacggatgacatgaaaacgggtaagaaggtctatctgaagtcaggaaaagttcagttgacgaacagcggctctgatccactggtcggggttgtctgggcggatgctggaatcagcgcagaatgcgtgccggtaaaactcaatgtctga

SEQ ID NO: 387001 - DNA, 243 bp, Salmonella enterica
atggatgcaatcacggtcagaaagatgggaaagacggcctcgattaatgatgtcgacatgactgtgatccagggggaaacactggaagagctgaatgctctgtccgggcagtcggtctctctggtggtgttttctccgggataccgcccacggcgtggggaccgcgttgtttatgacggacaacaatggacggtcacgcggcacgaacgctttaacggtaaaccgatgatctttattgaataa

SEQ ID NO: 387002 - DNA, 564 bp, Salmonella enterica
atgaaggggcttgagaatgcagcccgtaatctgaacagccttgatacccgtatggtgccacaggccagtgcatgggcgataaaccgcgtggcggggaaaattatttcacaggccacacgtcaggtggctcagagcacggtggtgggggataaccaggtgaaggggatccccctgaaactggtgcgcggacgcgttcgtctgtggaaggccagcccgtccggcaaaatgtacgcccgtcttcgtatcaaccggggcaatctgcctgctgttaagctgggcagggcgcagccccttcgggcaagggggcgtcgtggcggtggggtaagggtgggaaaatactttttccgcgacgggtttgttcagcagttggctaacggacgctggcacattatgcgccgcacgaacgggaaggcacgctatcccatcgatgtggtgaaaatcccgctggcggggccgttgacacaggcattttcggatgtcagccatcatcttcttgatgaagagctgccgaaacaactgggctatgccctgaaacaacaactgaggttatatctgagtcgatga

SEQ ID NO: 387003 - DNA, 402 bp, Salmonella enterica
atgaacagacactcacaaatccgtcaggcggtactggccagtctgaaaggtgcgtgcggcgaaaccaccgtgctctttgatggtcttcccgcatttattgatgtgcaggagctgcctgctgtggcggtatggctgagcgatgcgcagtacaccggaaaaatgacggacgaagcggactggcagtccgtactccacgttgcggtatttattcgtgcgcaggcgccggattccgagctggatgaatggatggaaaacactatctttccggcgatgaatgatatccccgtgctggcgaacctgctcgacacgttcacgccggtgggttttcagtaccagcgtgatgaggaaatggcgacatgggcaatggctgaagtcactttccgaattacctataccagttaa

SEQ ID NO: 387004 - DNA, 747 bp, Salmonella enterica
atggcaacacccgatccgttaaaaaaagttaaaggggccggtaccacgttctgggtttataccggtagcggcgaggcatatgagcacgcactggacgataaagcctggatgcggctggcgatgatcaaggaattgcagccgggcgaaatgtctgcggatgaagaggacgacacctatctggatgatgaaaatccggactggaaaagctccattcaggggcagaaaagcgcgggcgagaccagtatcacgctggcatggaaacctggcgaagaaggccagaaaaaactgacgggcttttttgataccgggtccgtggaagcctggcgaattaaatacccgaacggcacggtggatgtgtttaagggctgggtgagcgcgctgggtaagagcgtgcagtcgaaggaagttatcacgcgtaccgtgaaaatcaagggtgtggggcgtccacatctggcagaagacgaagcgccgacagtggttcatgttaatggtgtgactgtgaccccggaggcagcctcggtagaagtggggagtacaaccacgctgagggtcgcagtgcttccggataatgcgacctgtcgcaccatgcaggtgaaattgtcgcatccggacattgctgaggtttcggtgaaagaccagaacatcaccgtcactggtgtgaaagcgggtggcgcttcggtggtggtgattacggatgatggtggtctgattgcagtagccgctgtaaccgtcacagagaaaaagtaa

SEQ ID NO: 387005 - DNA, 405 bp, Salmonella enterica
atgttactgaaaaaagagatgtttacttatgacgaccagacggtggaactgaaggagctgtccggtctgcaacgcatggattatctggagtttgtgtccgcacagactgcagagtttgacgccagggataagacgcagcctgaaacagcgcaccagaccgcgtttttgcgcatggggatgggtatcaacgcctggctggtttcccgttccctgtggaatactgaccagacgcaggatgtggaagtgctttattcacaggtttgcgccacctggtcttatgatgcgctggggctggcagctgaacgcgttctggcactgagtggtatgcggctggtgaatacctccggagaacaggcggatgaagccggagaacaggagaaaccgcagacgccggaaaagtcctga

SEQ ID NO: 387006 - DNA, 333 bp, Salmonella enterica
atgcaactggcccgcgagtttcgccgggcagactggcggcagatgctggcagaaatgtcagcctctgagctgggcgaatgggggcgtttttttcgcacgcagtgtttcaccgatgtgtggatggatgcgcagtttgccaccctgaaggcgctgatggtgcagattgtttccggcagccgcgaggccacggcaattgatttcagcctgttgccggcggatgacgaggaagagcccgccggagagacggtgcagccggatgaggtgctgatgcgtctgggtgagggtatttcaggaggtgtgcggtatggaccagatagccaatctggtgattga

SEQ ID NO: 387007 - DNA, 3021 bp, Salmonella enterica
atggaccagatagccaatctggtgattgacctgagtcttgaaccggcaaaattcaaagaagaagtgccccgtatcaaaaatcttctgaacgggacggcgcaggaagccgcccgggcagaagcgcgggtgaaccgttttaaggagagccagctgcgggccgcggcggaaacggtcaggcagacacaggcgctggtcagcaatgcacgggcgcacgcatccctgtcggaaaccgcggcgcagacctgccagcggatggaacaactggcccgccagaatcaggcagagcgggaacaggcggcggcgctggctgctgcgcaggacaaggcgacggaggccttttatcgccagattgacggggtgaaacgggctggtgcggggttgcaggaactacagcggatccagcagcaggtgcgacaggcccgcgccacgggcggtattggtcagcaggattatctggcactgatttcagacatcactgccagaacacgcgttctggcgcaggcggaggaaaccgccacgcgcaaaaaagccgcgttcatcagtcagctaaaagagcaggctgcccgccagaatatgacgtctgcggagttgctcagggcgaaagctgcccaactgggggtaagcagcgcggcggaaatttatattcgcaaaatggagcaggctggaaaagccacgcattcgctggggctgaaaagcgcggcggcccgtcgtgaactgggggtactgattggtgaactggcgcgcggtaactttggcgcgctgcgcggctccggtattacgctggcgaaccgctctggctggctcgatgcgctgatgaccccgaaagggatggctgtcggcggcgtggttggcgggattgctgcggcggtttacgcgctgggtaaggcctggtatgacgggcagaaggaaggtgaggaatttaaccgccagctggcgctgaccggacattatgcgggggtgacctcctcgcagttgcaggcaatggcccacgcgctgagtggtaacgggatcacacagcacgccgctgccggagcgttggcgcaggtggtgggcagcggtgccttccggggggctgatgtcggcatggtggcgaaagctgctgcggagatggagcgggcagtcgggcagtcggtcagcgacacgattaaccagtttaagcgactgcagaacgacccggttaatgcggcaaaagcgctggatgacgagctgcattttctgactgccacccaactggagcaaatccgtgttctgggtgagcaggggcgtaccagtgatgccgccagaattgccatgtctgcactgggggaggaaaccagtcggcgtacagcggatattgataataacctcaacgcactgggccggacgctgaaaaccgcctcggactggtgggggcggttctgggacgccgcgatgaatatcgggcgcaatgatacgctggatggacagattgctgcgttacaggaaaaaattgagcaggcgaagaaacatccgtggctggcctcgtcttccggggtggagtatgaccagcagcacctgaacgacctgaaggagcagaagtcgcggcaggacatgctggacgccaaagcgcaggccgaacgtaattatcaggagcagcagaagcgccggaatgccgaaaacgctgagctgaaccggatgaatgaaacggaagctgcgcgacatcagcgggaaatcgcgcgtatcaacgccatgcagtatgccgaccagactgtcagggatgcggcaatacaacgtgaaaatgaacgttatgagaaatccctggcaaaaacacacgaaaatcgcaacgatgaggccacgcggctactgctgcagtacagtcagcagcaggcgcaggtggacgggcagatcgccgccgccagacagtctgcaggtattgctaccgacaacatgacggaagcgcataagcagctactggcactgcagcagcgtatcagcgatttagccggtaaaaagctgacggctgatgaaaaaagcgtgctggcgcataaggacgaactggttcaggcgctgacggagctggatgttaaacagcaggcattgcagaagcagagcgccctgaatgatctgaagaaaaaagcagtacagcttgccagccaggcagcggaagaagaacgcgcgcagcgccagcaacacgatctggatattgccaccgcagggatgggcgaccagacgcgacagcggtaccagacgcaactgagtctgttgcagaaataccagcagcagaaggagcaactggcgcgtgacagtcgccagaaagggtcgtctggcacggaggaataccgggaagcagagcaggctctgacggaacacctgaaccgccagttgaatgaaaaccgtcgttactggcagcaactggaatttgcgcagggtgactggaaaaccggagtgatgcgcgcgtttcagaattatacggaaaacgcgggtaatgctgcggataccgccgcacagatgttcacgtccgccttcaacagcatgggggacgggctggcgactttcgtcactaccggcaaactcaatttcaaatccttcacctcatccctgttgtcagatatggcgaaaattatggcgcggtgggccatgatgcaggctgtgaaaggtatcgggtccgcgtttggtggcggaggtcttactgacctgttaaaactcgttgtgaatgcggatggtggtatttaccagtctgcggaccttggacgctacagtggtacggtagtcagccgtccgactttttttgcgtttgccagaggcgcgggcgtgatgggggaagcaggaccggaagccattctgccactgcggcggggggcggacggtaagctgggtgtggttgctgcgggcgtgggggggatggcgatgtttgcgccgcagtatcatattgaaattatcaatcaggacggcagtaacggacagattggccccggggcgctgaaagcggtttatgacgtggggcgaaaagcggcggcggattttttcgcgcaacaatcccgcgacggcggcagattaagctga

SEQ ID NO: 387008 - DNA, 330 bp, Salmonella enterica
atggaaacctttcactggaaaattcgcccggatatgactgtcaatgctgaacccaaagtggtgtcaatgaaactgggtgatggttatgaacagcgtcgcccggcggggctgaataatctgttgtcaacctacagcgtgacgatacgtgttcgtaaatgcgagcacctgcctttaaaggcctttctggaacggcacggtggcgtcagtgcatttcagtggacgccgccttatgactggaaaccgatcagggtggtttgtcgtaaatggtcggcaagcgtgggggctctgtgggtaactgtaacggcagattttgaacaggtcgtggcataa

SEQ ID NO: 387009 - DNA, 699 bp, Salmonella enterica
atgcaggatattccgcaggcaacacatcatgagactacccggcttactcagtcagcgctggtggccctctgggaaattgatctgacagaggtcggtggtgagcgttattttttctgtaatgagcagaacgaaaaaggtgaaccggtcacctggcaggggcgacagtatcaggcgtaccccatacagggtacagggtttgaaatgaacggcaaaggctccagtgccaggccaacactgacggtttccaatatgtacggtctggttactggtatggcggaagatctgcagagtctggttggcggaacggtggtccggcgtaaggtttatgcccgttttctggatgcggtgaattttgtcaacggaaacagcgaagccgatccggagcaggaggtgatcagccgctggcgcattgagcagtgcagcgaactgagcgcggtccacgcctcctttgtgctgtccacgccgactgaaacggatggcgccgtttttccggggcgcaccatgctggccaacacctgcacctggacttatcgcggtgatgagtgcggttatcacggcccggctgtggcggatgaatatgaccagccgacgcccgatatcaccagggataaatgcagcaagtgtctgagcggctgcaagctccgcaataatgtcgccagctttggtggctacctttccattaacaaactttcgcggtaa

SEQ ID NO: 387010 - DNA, 744 bp, Salmonella enterica
atgacacagacagaatcagcgattctgacgcacgcccggcgatgtgcgccggcggagtcgtgcggcttcgtggtgagaacgccggagggagacaggtatcttccctgcgtaaatatctccggtgagccggaggattatttccggatgtcgccggaggactggcttcgtgcacaaatgcagggtgagattgtggcgctggtccacagccatcccggtggtctgccctggctgagtgagaccgaccggcggctgcaggtgcagagtgatttgccgtggtggctggtctgccgggaggtgatttataaattccgctgtgtgccgtatctgactggtcggcgctttgagcacggggtgacggactgttacacgctgttcagggatgcttaccatctggcggggattgtgctaccggattttgcgcgtgaggatgactggtggcgtaacggccagaacctctatctggacagtctggacgtgaacggttttcaccgtgtcacgatggcagaggcgcagccgggcgatgtgctgctgtgctgttttggttcatcggtgccgaatcatgccgccatttactgcggtaacggcgagctgctgcaccatattcctgaacaactaagtaaacgagagaggtataccgacaaatggcaacgacgcacacactccctctggcgtcaccgggcatggcacgcatctgcctttacggggatttacaacgatttggccgccgcatcgaccttcgtgtaa

SEQ ID NO: 387011 - DNA, 465 bp, Salmonella enterica
gtgcggattgccggacgtgatgcaggtgaaactgaattatcagcccgtcttaatgagccgctggtaaatggtgccgtgatccacatcgtaccgcgtctggcgggagccaaaagtggcggcgtgtttcaggttgtgctgggggcggcgctgattgcggtggcgtggtggaaccctgtgggctggctgggtgctgcggctgtatcgggcctgtatgctgcgggggccagtatgctcctgggcggggtggcacagatgctggcaccgaaagccagtacagcaacagccagcaccacggataacggcaggcagaacacgtatttctcctcgctggataacatgattgcccagggcaatgttctgcctgtactgtatggtgaaatgcgcgtggggtcgcgggtgatttcccaggaggtcagcacggcagatgagggggatggcggtcaggttgtggtgattggtcgctga

SEQ ID NO: 387012 - DNA, 357 bp, Salmonella enterica
atggagttcaagttggccatggtcgaaaagtccctgcaacccgacgtcagcgtcgcgctgctggctcgtaacaacggcatcaacgataacctgctgttcccggtatcggcaccttatcgagacttctgccgggcagcacgtgactcacccgttatcatcgaggacaaggtcgttcctgtggtggtcgaacactcgccagcgttgctgccggcgacttctccgccacctgcaataccgccaaagcccgggcaggtctgtgaggtcgccatcggtcgcgcccgcctcaaactctccggcaacctcacgccggccatgctggcaacgctggtccgagaactgaagaagaggcgacggtga

SEQ ID NO: 387013 - DNA, 1203 bp, Salmonella enterica
atgtccgctgagaaacaccgtcacccatcgccgctgcagagacgggggctgattgtgctggtcgccctcaatgcaaaacgtccggggccggtggtaacacgtgatattgagcgggtactggagcggggcggggatgtcccggtgtacggccccaacctgcgtgcctcctgccggcgtatggaagcggcaggctggctgcataccctccgggcacctaacctgcaactggttgtcgaactgacagacgccggccgtgagctggccgccccgctactggctgtcgagcaggagcgcgagctggcggaacggcgcgcgacggagagcagggttctgcccctggtcccggtcaggccggtggataccggtgacttccgggcaggcgatcggccggtccggctggacgacatctggtacatggcatgccggggcgattatgtcatccgcgccgacggaaccacctgcctgcagctgtggaatacggccggacaggtgacgcgccccgaaggcgatgccgtgcaggtggcgctatggcagcaggcctgccatgatgcaggcattgtggtccgcctgcagataaacgaaagccacgcgccggaagagggctgcatctccggaacggcacaggtcgatcagacggaggtctgggtccggcagctggacgctgaacttcagaaactggggatcaccggcctgacagaaacagatcggcaggctgttgtggtttccggagagacgctccggtcactgccggcaccggcacggctgctccatatactgcgggaaagtgcggaggcgtttccgctcacggtctcccggtatgagactgacgctggcgacgcgctcgacgccctacaggcacgcgccggattcagcgccagccaggcgcaggagctgcggtggcactgcatacgctggccgctgatgagagataaagaatttgagcagcgctacaggaaagcaacgctggttaccctggcttgtcgctgtccgccctggctggattttcattcatgccgaaagcgtgcaaaacccctcggagattctggcggatattcgcgctatcggggcgaaagcaggactggcgcttcacccggcaacgccgctattgccttatcgttatctggcattgcaactggatgcgctgatgatcatgaccagcgagcccgacgggcgcggacagcaatttatcgccccgatgtgtga

SEQ ID NO: 387014 - DNA, 948 bp, Salmonella enterica
atgaaaaaatactggctattattttttatcgttataagtggttatttcccgttgacttccgtatatgcggcaaactgttcgtttccggatcttggcggtgaatattcagtatttatcccacaaatggcaataccagcagatacgccagatggtacattactctactcatcgccaaaacaaaatataaaagtagtttgcgacggaacgcctacaaaaaatttgattgtagccactgtaacatcagactttagcgaatttttaaagatccgaaatggaatcaaagttacattatatatcaatgatgtacctttctcttacgcttctacggtgacgttggggcaaatgaatacgaccccttttcaaagcacgatgagtgtacgagtagaagtgaaagtcgatcgttcaatgggaacaatccctccgcagggcacttatctttccgggggatttcagtcggtctttgttatgcctattgctgattatagtgcaggacgtggagttattagtctgtatactccaaatatagtgtttatcccatgttctatggatttatcgctggtgcctgatacgatcaatttcggccagatgcaaaacagagatcttgagagtggtaaaaaatacagcaaagtatttacaacgcacatagtgaaaagtaaagggtgttcatctcttttaaatcctaagtttggtattaatatattattttctcctgtggggcaatccattaatcctgatggttctttaaatcttaataatggccttggattatccattagcgatgagaatggtataaaggtcccttttaatacggagtggcagattgagaatgtcgataagaattcaatattgagtaacaattttactgctactgttcagaaagtggcgggacaaaccataaagaatggtgatttttctggtgatgtggtggttgaaataaattatttctga

SEQ ID NO: 387015 - DNA, 627 bp, Salmonella enterica
atgttccttggaaaacagggcaaatcgatgataaaccgctctttaattttttttataatgctgggaggcgtggcgataaactcacttgctgctgaaaccttaaatgcctttcagactgatggattatatggccgtctgaatatgaagggatctataataaaaaatgcctgttctatttcccttgattctgtagatcagactgtggattttggaaaaatacctgtgtcacgatttatgcaagccgggccagaaattctgtcagttccattcaagatccgggtgaataattgtgaccagaaagaggggagccggttagctgtgaatgctcttaatcgggtttcttttgccgggggctataccgtactggctaaattttatggcgatactgttgctggtcatccggatctgcttggagggaaaatggcaatacctggcgttggcttacggatacggatggataaatccagtactgtaataaattttaaccaacaaacagatcctcttcctttatttagaggaaatggcgaattacttttttatgccacgcttgtcagatacggaaatgtccaggatataagaaccggtgattttgaatggaatactacttttagtatttattaccagtag

SEQ ID NO: 387016 - DNA, 744 bp, Salmonella enterica
atggagcaaaaagtgtcagtaaaattttcgtataaatgtatgctactgtgcctttttttactcactacatctgatctatatgctgcagtgaatattgatcgtacgcgagttattatgaatggcgatgtaaaatcgctttcggttacactgagtaatcaaagtaaaagtttaccataccttgcccagtcgtgggtagaagatagctcaggaaaacgttctgaaacttatttccttgcgttaccgcctttacaacgtattgatcccttaaagaaaagtcaggttcggattatggcgttaccatcaacagaaacattaccaaaagatcgggaaacactattttattttaatgtcagagaaattccacctaagagcgataaacaaaatgtcctgcagatagcgctacagagtcgacttaaaatgttctggcgtccgacggatattaaaaaagcaccaaatgtgcgtacagaagaaaagcttaatattattcgagaaaaaggaaaactaatccttgataatcctacgccttattatatcacgcttggctatcttgggcctgataataaggggaatttccgaggctttgagagtgaaatggttgcgccattttctaaaaagaatgtcaatgtaaactttaacggcgatgggcttgatgttggatacattgatgattttggtggcctgaatattaatcattatcactgtacagagagtttatgttccttggaaaacagggcaaatcgatga

SEQ ID NO: 387017 - DNA, 2472 bp, Salmonella enterica
atgagtattaagcctatatgtattgcactcgcgattgtaatgtattttcctgttacttacgcgcaaaacgttgagtttaatgctcatattcttgatgccgatgatcggaagaatatcgatctttctgcttttagtcgagaaggctatgtagcgccaggagaatatcttttagatattctccttaatggtcatatgatccgtgagcggcaggttattcattttgtaacaataggacatgagaaaagtacggttgcttgtctggatgatgcatttattggcgcgataggattaaagcctgaagtaattaaagaaattcgtcattatccagccagtacgtgtaatgatttaagaaactcagatattcatgtaaagtattctgccgataatcaaagtttatctataagcgtgccacaggcatggctggagtaccaggatgaaaactggattccgcctgcaatgtgggataatggtattaatgggtttgtttttgattataatcttcttgcaaaccgttttatgcctcaacaaggtgttacaaatagtaattatagtctgtacggcactaccggattcaatattggtgcatggagattacgttctgattatcaatataatttgtacgagtcagataatgaaagacattcgtcactaacattacctcaaacatatttgtttcgccctttccctggtattcgctcgcggctgaccgtaggccaatcataccttaattctgatatttttgactccttccgcttcgccggcgtttctctggttagcgatagccgcatgttaccgccatccttacgggggtatgcaccgcaaattagcggtatcgcacgaactcatgcacaagtaacggtatcccagaatggacgtattctttggcagtctcaggtcccggctggaccgtttgttattcccaatttgagtgaaactgtccgtggaaatctggatgttactgtcagggaggacaatggaaatgtgcaatcatggcaagttaatactgcgagtgtaccgtttctggccaggaagggaaatattctttataagacagcgatcggtaagccactgtatgggacaggaaatcataccgttgagccgtttttttcgtcgggtgaaatgacatggggggcatttaacgatacctcgctttatggcggatttattgtcagtgatggtaattatcgtgcgctggcgctgggcgttggcgaaaatatgggacggctgggggccgcctcatttgatgtgacgcagagtacaacgcaattacgtaaccagtctcagcgaacaggttatagttatcggtttaattacgcgaaaacgtttgatcagactggcagtacgattgctttcgcaggttatcgattctccgataaaaatttcatttcgatgaatcagtatcttgaccgggagaatgattattttgactcaccagcagaaaagcaaagttatatattaacttttaatcagtcatttcaggctgtggggttaagtttactattttctgccagtcgtcacaattactggaatgccgttacaaacgataactataccgtatcattaaataaggcattcaatatcggcccattttatggctcgacagcgtcgttatctctggggagtggtcatttacttgatcaacagaaagataaccaaatttatttgtctctgacactaccgtttggtacaggtagtcaattcagttacgccatgcagaatgacagcaacggtagaatggagcaaacggcaacgttgtacaatcatccatcagataaaacaagctggaatatgagcgttgggcagcagcgcgaatccggaggcgaaaatagtgcttcactcagcggggattatcagcgggaaacgccttacggacaaggggatattagctttagcaaggtaaatcagcagtattctacgctggggctcagttggtatggttcatttactgcaacgcgatatggcgctgcattccatcaaaatatagcaggtacagatcctcgtctgatgattgatactgacaatatttcgggcgtcccggtcgattatggtagaggaatcacaaaccgtttcggtatcgccgttgttcctggcggcaacagttatgaacgttcagatgttactatcgatgttacgcaattacctgcggatatcagtgtgcctgacggagttatttctaaagtactgacagagggcgctattgggtacaaaaagataaaggcgacaaaagggggacagttgattggaactatccgtatgatggatgggaaatatccgccattcggtaccatggtgaaaaatcataatggggaaacgctcggcatggttgggaataatggatttacttatttgtccggcttgactgataaagactacaataaattgcggatatcctggactggaggacaatgtttgctgaatataccaaaaaatgcaaacttacagtcaggcgtgctattacttccttgtgactaa

SEQ ID NO: 387018 - DNA, 585 bp, Salmonella enterica
atgggaaaagtcaaattattcgtagctatttgtatggccggtagtgtaggcaccgcttgggctgctgcgccaacaggcgctgattttggtcatggtactctgcatttcaccggcagtgttattaactcaccatgtagtatcgctcccggcgatgaaaatattgatgttcctttggggcaggttgcgaacaaggtactggaggctggtgcgggctattcaactgtccagcccattactatacatctacaaaactgtgatctgaccgcgcaaaatgctgtagccagcggtactggtacggttgattaccccgctttttctaaagtatcagtaacattcgcaggttcacctgatgctaaaaatgcagatttatatgctaatacggggacggctcagggagtgggcgttcgtttgatggacactatggccggtaatgttccgctcaaagcaaatgatgcatcttctgattatgctctgacttctggggataatgaattgaaatttggcgcccgtctggaaaaaaatggcgatgcggttacgacaggaacgattgttactgatgtcacttatgccatgaattataagtaa

SEQ ID NO: 387019 - DNA, 813 bp, Salmonella enterica
atggagtcagtaaatataatgtattttaacaatgtgcgcacgtatcatggcttattttgctttactgaagatgagggagtagatcttttcattgatgataaagtgatagagatagagagaaataaagtattttttttagaaaagaatattcaactgaaggtaaaagttcataaaggaaaatgtccactgattatttatctcgacgatgaaaagattaggaagattcatgagttgttactattaacgattgattacactcaggttgagcattcctccccatcatcgctatatatcagagatgcagctgttgaagacgtgattttttttaaaaggataaaaaatagattatcacagcaagaaaatagcaatgagagtttaaaactgactgcaataattacatatatgcttctccagttcgattctggaattataaaatcgatagctaaaatggtgaagccaaaaacgaaagataaagttgttagcattattacaacagatatatcaaaacagtggactctaggtaaggttagtgagcttatgtatattagtgagatttcactcaggaaaaagttagatgcggaaggagaaaaattcatgaaaatattaacagatttaagaatgaatcatagcttaaaacttttgacaacaacagagtatagtatagagaaagttgcatgctgcgttggttataatacaacttcatattttataaaaacatttaaaaactattttggattcacgccaaagcagatcgttttaaatttaaataaaaacatcttctccgattttaatgatgaacaaaataaactataa

SEQ ID NO: 387020 - DNA, 648 bp, Salmonella enterica
atgaaactggaggcatcactaaaacactttagccctcagggaatgcacatcagcgacgacgtgaaaggaacctctccggatcgtatcaccggcaccgatgttatggcggccattggtaccaccagcagccgcgcgcggtttggtctgtccgcatttttcggtaaggccgggatcagcaaaacggatgcgcaactggcggtacaggcgctggcgcgacatgcgatggagagggctccgaagaacgtcaggaaggccgccggatgtgagttcggatggtgtatgcaggtactggcgcagtttgcctttgctgaatattcccgttcggcggccaccactgtagcatgtcacacctgtaaaggcagcggacgaattaccaggacgcagacaacacgcaaagtatcttatccgtggggaaaagcgccatactgggagcagtggacagaggtaacggagatagtgccgacagtctgtgacgcctgcgaaggtaagggaacgataagcgcccggtgccgttgcggtggtaagggtaaggtgctcgaccgcaaagccacaagcgagtgtggtgcgccggtgtttaaagcctgtgagcgttgggcgggaagggattttctgcggtaccgtctactgcagcctataaagcgatactaa

SEQ ID NO: 387021 - DNA, 189 bp, Salmonella enterica
atgaaagaagggtattactggattcagcatgtaggtgttgttcaggtggcgtattacacgaatgacactgttgatgatctggaaacgggaaaaacaatcacaggtgtctggcatctgaccaaaggcgatgatatttgccataacagagaggcggaagtacttgaaggccctctcactcctccaatctaa

SEQ ID NO: 387022 - DNA, 810 bp, Salmonella enterica
atgaccgacactattacagtcgtagctcctgtaccaccttccggttctgctcttgcaggaaattattctgcttcaacaatgtctgcaggcaaccgtatttcatccgggccaaccttcttacagtttgcttatccatattaccagtccccgcaattagccgttaattgtgcaaaatggattcttgattttgttgaaagtcatgatatgaaaaatgcaaacaatcaacaaattttttcagaaaatgtggggcagttttgttttgcagataaaaatctggttgattatccgactatgaaggttttggatgcattcggcggagacagaaagtttatttactctcaggatcagatttcccggttaagcggtgatgtaacaacgccgattactgcctgggctcatttcctttggggcgatggggcagcaagaaccgttaatttgactgatgtaggtttgcgaatccagccaaaccagattagtcctgtaatggatctggtaaaaggaggggcagtaggtacatttcctgttaatgctaaatttacgcgtgacaccatgctggatggtattattccggcatcatatcttggaaatatcactcttcaaactaccgggacattgacaatcaattctcttggtgcctggtcgtatgatggggttgtgaaggcatataatgatacttatgatgcaaacccaagcactcatcgagggctgttaggcgaatattcaaccagcgttctgagacatttttcagggacgccatacgaaattcaaatgccaggaatgatcccggtaaaagggaacggaatgcgatga

SEQ ID NO: 387023 - DNA, 342 bp, Salmonella enterica
atggaatcaaaacctctgatatcaaatataatcgtttctgcttcattattgtttttcagtagccttaccattgcctccacagagaagtgtaataacctgaatgaacaagaaataatttctcaaataagcactgactttctcaataacagagcatccgtctggcctgaaaacttgatgggtaacataggcacaaaaaaacctgaacttgtgttcagtaaaaacaccatcataaataaagaaatttatggtatcccttttgaagctataggacctaaaaacaaaactaattttatagggttatatgattgcaggacaggtaaaatagaatacagcaaagaataa

SEQ ID NO: 387024 - DNA, 372 bp, Salmonella enterica
atgctggggcgtattgatggtcgccaggttgcccaccagacacaaatagccaatctggtttatggcggccgcatgggtaacaaagacgccggagatggttggaagtatcgcgggcgtgggcttatccagattactgggctggagaattacaccagatgtggcgttgccctgaaactggatctggtggcgaatccgggacagcttgagctggaacgtcatgccgcccgatccgcagcgtggttttttgtgactaaagggtgtctgaaatactccggcgacatggtacgcgttacgcagataatcaacggaggacagaacggtattggtgatcggcgggagcgctttgaaaaagcaaaatcggtgcccgtatga

SEQ ID NO: 387025 - DNA, 156 bp, Salmonella enterica
atgaaaaaatcctcccgaatgtctattgtccatcctcatgcagcgggcgttgatattggcgctgagttccacgttgtcgccgtaccgcctgatgccgacaccgagccaagccaggacttttcaaaattttactggcgctcttcagcggatgtctga

SEQ ID NO: 387026 - DNA, 1035 bp, Salmonella enterica
atgttcccggtcgcaagaccgatgtcaacgatgcccagtagttgcagaagctgcattcatttggtcttctccgtgccagtttcagacctgaacacgacatttctgtatctgaggcagcgggaacgcctgactgaataccgggctgcgcatattcaacatatgcagaaggcgctgatgcagatgaatgtgcaattacatcatgctgtatcggatatctctggcgttaccggtctttcaatcgtcagtggtgagcgcgatccttcaatgttgatccagtatcgtgatgtgagatgtaaaaagacgccagaagtacttcgacaggcactgacagggaactggcagcctgagcatctttttgcacttgaacagtcggttgcatttttcgatttttaccaggaaaagatccgtgaatgtgatgatcaaatcgaaacctcattattgcagctcagtaccggaattgaagagccggaaggggtattgccctccgccagacatcgtacaacgcaacccaatcagctttcctttgatgtcagaccattactctggaaaatgacaggtgcagatctaacacagatacatgggttcggaccttatctggcactaaaattcattgcagaatgcggtactgacatgaaccgctggccggatgcgagccattttacctcgtggctatgtttgtccccgggaaataagatctccggtggaaacgtgttgtcctcgaaaacacggcgttcatccagtcgaattgctgcggcactcaggctggcaaccacaacaattggccggagcgataccgcgttgggcgctttttatcgtcgattatcatcacgtatcgggaaaacaaaagcagtcactgcaacagcaagaaaacgggcaatactgttttacaatgccctgaagtatggtcagaaatatgtcgatcctggctcagattattatgaagagcgctaccgtagtcgcgtactcgatgggcttaagcgaagagctaaatcactgggttactctctccagcaggatcctgaattatgtgcctga

SEQ ID NO: 387027 - DNA, 147 bp, Salmonella enterica
atggaaggcataagctcacctgcaaacctcgatgtgtaccgagtggaggttctgaatctaagcatcagtgcaaggccgggaacctatatgctttcggagaatattgaagttccctacgctattgagttcacgactgaacatgcataa

SEQ ID NO: 387028 - DNA, 759 bp, Salmonella enterica
atgaactctcaagtaaatattttgcaggggataatagaaaaacagtttataccctatatacaacctgttattgatgctgaaacggaacggcttattggtggggaggtattaatgcgatggaggaaaagtgataaggaaattctgacaccagaaaaatttcttcaggaagcagagtgcactggtcttattatcagaatgacgtgtgatttactggaagacattatggataaaatgttacctttattcattaataagaaaatatgttataaattccacattgctattaacattaatcccggccttttaaacaatagtgattttataagcaaatgtatcaattttatgaacgtatttcctgaaaagaaaatgattcttattctggaaattacagaaagagaaaaagtgctctatagtaagaatgaagaagaaaacataaagagattgcgagcccacggtataaaaatatctctcgatgattttggaacgggatattcatcttatgtatatctgcagcagttccctgtggatttcattaaaattgaccagatatttgtacacaagattggcattgatgaaaatacggaatttattatcagtaatataatatccttaggaaggaaattaaaattaaaatttatagcagaaggcgttgagacattcgagcaagctgactatttaaaagacgttggtatccattatctccagggttatgtttttgggcgacctgtatcaattaatgaatttatagaaaacttctga

SEQ ID NO: 387029 - DNA, 4086 bp, Salmonella enterica
atggagggtaattcattcattatacagggaattatatctggtgggattggcggatacggaggtactggcgcaaatggattaaacggtacaaaaggtggaacaggtggtgatggaggcagggggggcatcagtcgtaactatggtgaaaatagcggtggtaatggggggaatggggggaatggcggcaatggtggtaatggtggtaatggtggtaatggcggtgatggcggggtgggaggagatgggataattgtcagtaaaaataatgtacaaattacaaacttaagtacggtcgttggggggaatggtggctctggaggcgcggccgggtctgcaggtctggccggtgccggtggtaaaggagggaatgggggggacgttccggttggatcaacaacgtcaaggggaaaacgaggtgaggatggttcttttggtgtaaatggtattaatggccgagtcggtaatggtggggccggggggacggcgataaatatatccgcagatggtgtgacgctacttaatcaggggaaagtcctgggcggaaccccggggtcaataaatgcacaacccggtgaagcaatagtggtaagtggtaaaaacagtcacattataaatgatataggaggggaaatacggtcatcaggtctaaacagtaaggctgtggaatatgaggccggagctgataatggcatttttgaaatgagaacaaacagcatagtggatggcgtcgttgatgcaaccaaaattagcaatggtaaattactattaggtggtaacacggctaaagaaaattcaacattcattgcctcaaaaattggaaatggaagacagtatcaaggtttttcgaattacgaagtaaatactacagaggggagtacatggaatttaattggagaaacaactgcccttacaccatggactgtaactggaggaacgcttgcaatagtgagtgatcactctctgggggctacagatggagcattaactctcaatggtggtgtgttacagacagtactcaacgtaaatagtgacagaaggttcaatctgactgctgaatctctaaatggtggaatactaacggatggagatttaacattaacaaatgttatatcaggagtgggcggattgaaaaaaacgggaaacgccacactgatacttggaggacagaatgattacacaggccgtactattatttcctcaggaaacctttttttgacgggagaaggtgggattgagcatagtgaaagcgttgagttaagcaaaggtacttctctgaatatcagttccacgaccggcggcaccatggtaaacaatcttacgggtgacgaaggaagccatgttgttctcggtgaccggctcctgacagtgaacagcctggccgactctgttttttccggtgaattcggcgctgaaggtgaaacaggaggcctgctaaagacaggggcggcctcattcacactggcaggccagaacaattacacgggcgacacaactgtttctgccggtaaattgtccctgtctggtgacagtaacattgagaaaagcggaaatgtcagacttaacagggatgcagcgttagacatcagtgcgacgaccaacggcaccatggtaaacaatcttacgggtgacgaaggaagccatgttgttctcggtgaccggctcctgacagtgaacagcctggccgactctgttttttccggtgaaattagtggtaacggttctttaataaagaaaggacaaggtgatatgactttggatggtattaattcataccagggaatcactcggattgatcaggggaatctgcggattaattcagaccaaagtctcgggggggggaataaaaacaattctcacttaataatgaatggaggaggactaaaaatatttggttcatttgcatcagacagggatgtatattttaatgctgatggtgaaatctctgtcgataaggacatgagttcttcttggaataaaattcacaccggggattacaaatttaccaagagtggagagggtgagttgattgttaggaatggcggtgatgcaagtgagataagtttaatgaatggcgcattaacacttatcaatttgaatatgaactcggaaaagcaagatgccttgttgaatgttaataatggcgtgttaaacatgactggaggggacgtttcggcaaaaaatgatttaatccatatcactggggatagtacgataaatctggagaatgtaagtattaaatcctcaggcaatggtatgagattgtctgacaatgttcaatcaactttgtcgttaagaaatcagtacaccgatatgccaattcttgttgagggtaagaatagtattcttaatatcaatgcaggtgacaatacgacgttagccagtaacatgcataaatctgacgaatctactattaacttaaacctgatgaataactccagtaattgggtgatatctcaacgtacagatgttgacaacgttagaaatagcgggaatattattttttcaccacttaataaaagtgaatttaataacttaaatattaaaggtgattataatgcaggaaatggtactataactttaaatactgttctgaataagggcggagataaagatcagcagctcagtgataaagttcttattaagggtaatgtcactggtgaaactgtactaaaagtagttccgcaaggtaacggagataatacagcatctgctcctggtaatatttttagcagcagggatggtatttctttagttcaggttgggggcgatgcagcagataatgcatttaagttagatcgtgagtatatatccaccgggactaaaagcccttatcagtacaggctttttacatatagaggcggtcaggtcgatcaacaaagtaattttctgggggataagcctgtaaatgtagattttagactacaaaccgcatatctggatagctctggaaatgtggtgccaggagttgatcctgattataataattcaaacaatgaaaacggtaatgatacagggaatggaaatgatacagggaatggaaatgatacagggaatggaaatggtacagggaatggaaatggtacagggaatggaaatggtacagggaatggaaatacgggggagcggaaatcacgcccgctcatagtcaggcaagcaagctcatatttaagtttaccagcagcacttagcaattacagtaactttgttctggataatatagatcgccgactgggggatatttattctaaaaataatactaagcagatcaaagattttgacttctattatagatttattacgagttcagatagttacaaaagtgatctggatttagataactatggatatgattttaagcaaaaaaataatgccatgtctataggtacaaactggacggcttttgattatggtaataataaggtatttttaggagcgaattatacattcggagacagtagaactaacgttacaaactccagtcaagaatccagttatatggttgtcaatgccaatactttttcgttgactggtacgctaattaatgtaaatgattattatattgacggagtgttatcatatgggctatataatggacatatctacaataatcgagaaaaaatttctcgggttaaagctgatagttttgatttatctatagagtttggtaagaggtttgatcttgttaactcattagaaattgagccacaagttcagcttatatccagaaacttatatataaataaggttgttgatgataatgatcttagtgtggccatcaataaccaacatccaattataggacgagcaggatttaaattgtcttatcttgtgcctggtacagaaagctggaagccgtatttcagagcggatgttattaatgatttcagtaattcgaaaaatgtgaaaattgaaggggtcagttttaaaacagggaaaaatggtgggaaatttaatactgtaatcggagccagtggaatgttaagtccagatctttcgttgtatggtgaactctcgtcttatcaaagaattaatggttttggatttgatggacaagattttaatattggaattcgttacagtttctaa

SEQ ID NO: 387030 - DNA, 363 bp, Salmonella enterica
atggtgagtcgggaaaaacaaatatgtcaacatcaactggtcaggcaggagttagtggccaaagaggttccgcagggggaagaggtagtgggtcaacaggggatacttatggacacccaggaggcgatccatcgtcaggacaaccgggttattctgacggtactggggggaatggcggtaatggtggtagtggaggcgaaggtggaggagctaacacaccatttacagggagacctgccggaaatggaggaagaggtggagatggaggaaatggaggcgattcgactgcctcagcgctgggcgcacctgggggtaacggcggaaatggtggtgaaggtgggccaggcggttggtcaaccgtag

SEQ ID NO: 387031 - DNA, 480 bp, Salmonella enterica
atgaagacatggtatctggttttacttaaaccaggaaaaggtaaagccttaaaggccaaagaaaaactggagaatatgggggtgattacattttatcctttgcttcacagaaaacaaatgagaaaagacagaaacaacacgatgagagcgatatcacaacctttatttccaggttatatgtttttatgttttgatagctctggtaatttatttcataaagttgaatgttgtgaaggggttatttgctttgtcaggttcggtaatggaccggcaattatacgtgattcagtcatggaaaatattattgctgcttgttttaaattgggggttgaaaatgttgatgttatggaaggttatgttgaaattatggaaggtaatactgtcaattcttatgatgaaagaatattgtcagtaattaatgagcctgattcatcacttaagtcgatgaagcttgttgctatgattcatgaaatgagttga

SEQ ID NO: 387032 - DNA, 273 bp, Salmonella enterica
atgctatttcagaatagctccgccctgacgaaacccgccaacaagattattcattttttacatgacaggaaattaaatacttatattaaaaaacacacattctggttgttatcatttgagaaaaccataatatcacatgacataagatcacggtcaggccctcgtcttcatcagccgatgttacagataataaaaaaactgctcatggaaatgcaagtacataaccaaccctgcaacccggataactacacagtaaattcaaaaatatattga

SEQ ID NO: 387033 - DNA, 438 bp, Salmonella enterica
atgaaaaagcaaaaaaagcctgcgcagaataatcatgaggggtgctatatccccggaggtatggagatgtatgctgaccagccaatatatattatcgtggcgctgtggtgtcttcacagaaacacatgggtgaaccgaaatgatattgccagagcattccggttgagtgaaagaaaggcctcctttcaactgtcgtacctgataaaaaaatcacacatcatcgatagtgatgtacgtaaagtccggagcgaacatcgttccacgacctgttatgaggtccgtgttaacagtgtcagcctgccgcttgtagcttcgaggagatacaaaccttctcgacgtacagatgggaaccggcggcaccaagttggcaatgcgtcacaggaggacagggcgttactgagacagttgtggccagtaaaatccgggagggtaaaatga

SEQ ID NO: 387034 - DNA, 363 bp, Salmonella enterica
atggaatcatggctgtcttcggagcgagaaattcggcggcgtgttagtagcattctgtcaaattttccgcataaaaagatgcgggaatggttggtcagggaaaaaagtggtatcagttccggaaaactgaaagacgctaaggaacacttttatcccctattgggtgatgcctccccggagggagtaaaaaaaagacggcaactttggtctgacttgcaaaaagaatatccggaagctattatttctttatttttttttctggggtgcagggggcaccatctgtataagaaggctgttgccggagattgttatgctgctgtggttttattatccgtgatggaggagttaaacagagaaaaataa

SEQ ID NO: 387035 - DNA, 945 bp, Salmonella enterica
atgctgacgcaaaaattatcgctgtgtgttattgctgttgactggagtggctatccgtctcaggaataccatgtcctccgcgccagcctgctctgcgacggacgttcgcttcccttattaagctggatagtcccgtcagaaaaacagcagaactcacagatacaaaaagcctttctggatgcccttgccggggctgtaaacccgaaggccagagtcataatagttaccgatgtgggcttccagaacgcatggttccggcatataaaatcactcggatgggattttatcggacgcatcaggggcaatatccagatgcgactggacagcaaaggcgaatactggttcaggcgtcaggaattacaggccagcagcaagccagaatatctgggaccgggtacacttgcccgttcggaatatgcccgatgtgatggtcatttttatctacataaaaaagagccgaaaggccggaaaaatcgccgttcccggtgccgcatagagcgtaaatcccggatacgggacggacgctcttcggcaaaagaaccgtggctaatttttagcagtgcgaataactttaaaccccgtgaaatcatgaagttgtacagccgtcgcatgcaaattgagcagaacttccgggataaaaaaagcgagcgcttcgggttcggtctgcgtgccagttacagtcattcagcgggaagaatgctggttctgagtctgttggcgacgctgagcacaatagtcctgtggcttattggctatcatgctgaaaataaagggttacatctgagatatcaggcgaacagtctgaagttgagaagagtcatttcatatctgacattagcggagaatatcctgagacattctccgctaattttaagaagaacagtacttagcaccgttcttaaccacttcgccagaacttaccgaagtatggttctggtttattag

SEQ ID NO: 387036 - DNA, 954 bp, Salmonella enterica
atgatagcaacaaatattaatcagttcatttctggtttcaggaatattctggtactgtttgtggcagttttattggcccttaataatgaaatgacaattggtatgatttttgccttcacggcgtattcagtagaattctccagacgttcaactatcgtcataaatcttatttataagatacagctgttaaaaatacagtcctcacaactttctgaaatcattcacgccacggacgaaagtagtttagcgtcgtactttgagctaaatgagaactatagcttgtcagcaagaggtatttaccatcagtacgataagctggcacctctggttttggtagatatcaatattgacatttcagagaatgaaacggtacttcttactggtgattcaggcagtggcaaaagtacgtttataaagatactgctggggataacagaacctgttgctggttctctttttattggaggtgttaatattaaaaaaacaggtaagcatgctataaggaaaataacatcatcagttcttcagggagattccctgtttcctggtacaatatatgagaatattacatttaatgacaatctcgacaatattgaacaggttcatgagattgcggatgctatcggcattcatgatgtaataacaagacttcctttaggatattttacacaagttggtgatatgagtgattttttatctggaggtgaaaagcaaaaattacttatagtacgagctttatttaaaaaacctaaaatacttattcttgatgaggctgacagtaatctcgatattttttctgaaaagaaagtatttgatgttattatgaattatgaatgcactaaaataattgttagtcataaaaatgagcgaacctatccggtagatcgtattattcacttcaggaaaggagaggtggttgctatccgtaacccccccaagccgatacatgattaa

SEQ ID NO: 387037 - DNA, 147 bp, Salmonella enterica
atgacattaattcatagcatattactgtattactgtgctgtcgtctgtacattatatctgatttttggtggatataaggtaattcgtaattatatccagaaaaaaattgagcaggcagcagaagcaaaaatctcatcaggtaaataa

SEQ ID NO: 387038 - DNA, 363 bp, Salmonella enterica
atgagcaggtttaccacgcccgctattctggaaatgctgggccattacaactggcgcgtttacaagccgttcgcgttttacctgagtgacgatgaaagcgacgtgatagaggttccggctggattcatcaccgaccttgccacaatcccgcgcatcttctggatactgttaccgcctgacggtaaatacgccaaagccgcgataatccacgattatatgtacgccaccgcgctacgcacgaagaaagaggccgacaaaatcttcctggacgggatgacggtgctgggcgtgccacgctggaaacgcacaatcatgtattacgcggttcgaatattcggaaggggaatgtacaggaaagagtaa

SEQ ID NO: 387039 - DNA, 663 bp, Salmonella enterica
atgtttaatccggcgctgaaaaccaccgttgaagacggtaaaaactttccggtattcctcaaacctgagaaaaaaatcagcgttgcggatgtgaagcaggcgctgcgcaatcactatcagaatacctcccacgatccgtatgccaacaataaccctaaagaaccatggcggcccacctccgttttccgcacccaggagtcgcatattctgcaggtaaggccgaacctgccgaaagcgattggagaagtgcagtacgtggcctatggcatgtcgacgctcggcgtttacgttccttattaccagggaatgagccattatctgccgggctacgataagggttccgatcaggcgagtgacgactcggtgaactggaaatttcgcaaactgcaaactctggtaatgcaggattataatgcctatgcgccggacgtccagcgtgcttacctggtgtttgagaagcagaccgccgagaagcaaaaaacgatggagcaggaatatctgaaactgtataaatcagaaccgaaaaaagcgcaggaattgctgcagacctttgaagataaaaccatgcaggatgcgctcaacctcactgatagtctgaccaaccaggtattcagcaaaatgactcacgccacggatatgaagtaccacttcgaaggggcgtaa

SEQ ID NO: 387040 - DNA, 204 bp, Salmonella enterica
atgaatctaaaacctgttgagcctgatgcccgtgaactggtggaccgcgcccgtgtactgaccgaagtcatgctggagaaccctgatgaggccgggccaaactatgttctgttgctcattctggccgaacaactccatcgtctgcacgatatcttcgaagcggctgaagtacgacgcatgcgggaagacaagctccctctgtaa

SEQ ID NO: 387041 - DNA, 750 bp, Salmonella enterica
ttgaagaaccacctggggagcgtgagtgcgctggcggcggccatgcaggagatgtcgctacctgtgtttggctccgtggtgctcaatgcggctgcgggaggagtgagcctgaatacggtacgccaggcgctgagccagtatcagtttgagggcgctccccggttgctggtgcatttacctacggtggtttccactgcgcacaagagcacactttcaagatcattcagtaatgaatatgcccgctattttgccggacaaccgctctctgtaaccgatgaagacggtaaattacgctctgacgttgaggcgctgatccatttcgcacgacatcatgacattgtgctttcttccggacatacctcgaaagatcaaacgttgcgtctgattgaagccgtggaacgtgttggcggcgtccggttgatgttgaaccaaccggcaaacccgatcacggggttttcggcggcagatctccgcgcgctgggagaatacgactggctctatgtcgagcagtgcgcgctgacgctgtacctggtctaccagaccccgcaggacatgtatgatgttctgacgcaggtgaacaatgtggtttacagctctgatctgggccaacccgctcagccggatatcggtgaatggctggaagacagccgacgctggttccaggccgccggactcagtgcagagcggattgatgcagtgacccggttaaacccgctcaggatgctggatccggagcggtcgccagattga

SEQ ID NO: 387042 - DNA, 312 bp, Salmonella enterica
atgagcgataacaccgttaataaggcgccgcgcgtgatgggttacgacaccaaaaaagaggtctgcggccacggcttccgggcaatggcgtgcagcgccctgagtgagtcgggattgtggagcaaagaagccattgaaaaacaaatgagccatcaggaaagaaacagcgtgcgtgccgcctatattcataaggctgaatatctggaagagcggatccgtatgatgcaatggtgggctgactatctggatgcaaatatggatctgtatgtgtcgccttatcagattgccgggaatctgaagaaaatatcgtag

SEQ ID NO: 387043 - DNA, 627 bp, Salmonella enterica
atggggcgtacctatcatcaggacaaccgctcaccggggagtctgccggggacaaaaacgcagatgaccatccgctcgaaaacctataaaggcagcgggtttaacgaactgcggttcgaggatgcgacgaaccaggagcaggtgtatatccacgcgcagaaggacatggatacggaggtgctgaacgaccggagcacaaaagtcagacacgaccacacggagagcatcgggaataaccagaagataacggtgagactcggacagaccgtcacggtgggcaaggaaaatgcgggcggtcatgaccaggccatcactgttgctcatgaccagagtacaagcgtagggaacgatcagacgttaagcgttacccatgatcgcaagaaagatgtgggtaatgatcagaacagtaaggtggtcggagacgataccgaggccgtggaaaaatcgcagaacattacggttgggaaagattacaccctgacggtaactgacagcctgaccatcaaagtcggggaatgtgttctgaaaatgaacaaagatggcaccatcatgctgagcggtgtaaaaatccagtttaaggcagatgacagtataaaaggcgttgccagtaccgttcatttcaattga

SEQ ID NO: 387044 - DNA, 1221 bp, Salmonella enterica
atgttagtccgaatggtacaacctgtgcttgcagaacaatatgcagatatgctggcacagaactaccggatgagaggaacactgttgtcctctcattcacatacacccggcgatctgacccggtttgatcgacgaatgctgaaatgcctgaaagggatgacgttactgaaagaaccatcatccgcttatttccgtgagcagcttcaagaaccgctatctgcgggagaattattttccattgcgttgtttgccgccagtacgaacgatgaatttttgctgtccgggtgcctggggctgacacaggcgctcccccacctgcaacctgtgttgttttctgtcgctggctgggctcctgcacaatccactttatggccgctgatgctgtcgcttcctgcctgtcgggcatatgtggcggcaatcagaagcgaccagactgcttccatgatgttcagccagcaggagatactgacgcttattgaacagggcagaagcgttgattatttgcttcattttttatgccgcagcgcttctccattacttgtttcggcgctggaagccgttttttcctctggccgggatgaactcatcctgcaagggtgtcgtgccgttttatgtccgcatccgctgacagataagtataccggggaggctgtcaggcaactccttcttctggcccgtagcgaaaaagacgatatccggtcttgtgctgtcaggaatctgctcacccaccaggccggtcttctcggcagcgagttaagcgatctctcagatccccgcttacggatacaggcgatgggctggtccgggttgcccggatacctcccttccctgttgacgtactttgattcgcctgaatacgcccgtctgagcgcactttccgccattgcgatcaccggctcattgcctgagcgggacggctggttacgtaaaagagatgacgatgtttactcccctgtttcagcagattctgctgacattccggcgcgcgatcctgagcagggcgtgggctggcctgaacgcgcggcatttgaaaactggtggcgaactcaggaagaacatttcgcccacgatacaccatatctgtgcggacaactgacctcaccggaggggctgaaccgggtactccggcagggatatctgaatctgcgacctctggcgctgatgcgtatgggaatatttcctgaacaggcggccctgcctgctgaaagccagaaaaggtaa

SEQ ID NO: 387045 - DNA, 237 bp, Salmonella enterica
atgcaacatatttcagaagacaccatccagcatgatgagaaaaaaagccctacagatgaaaaaccgaagataccggaagaactggtttttactgcgcaacaaaaaatcaccctgagctgcggtaaatcacgcatcacgctttacccaaacggcaaggtggtcatcaaaggcgagtacattctcagcgatgcggaaggtgtgaaccggttgtcaggtgggcgcattgaagtgaactga

SEQ ID NO: 387046 - DNA, 1020 bp, Salmonella enterica
atgtggcaggtaaaaaaccagacaccttatacggtaaaaggaagttggatcagaaatggttcgggtgaagagatctggaccattgtgttaaaagcaacatgggatattctgcctgacggtgtgacaaagctgtctgcggttcagcctccggttcatagcggcgcggtatttcaggatgacggtataaccttacgctatgaaccggacaccggcccgacaaaagccgccaccgatattgtgctgaacggatgcgcccattctccggacggaaaagccgttaatatgctgcctgtcggcctgaaagttggcaatatgacccggcttgcccgtgtttatggcgagcggcgctggaacggcagtgagtatggtcaacccagcagatttacccgaatgccgctcagctaccacaatatgagccggggcgcttttttctcattctgcgacagttattacaatcctgatggcatccccgttgatgaacggccagaaaccggtatatcggcattaccgcatattgaattctgcggggaagagaactttcccggatttggcccacagccgcgacactggcccggtcgcttacagtttgccggaacgtatgacgcagactggcaacgtaaccgtgctcccctcctgcctgatgatatggatgaacgttactggcagtatgcgccacaaccgttgtatgccggaggaaggttaaaaggtgacgaaatcgtctgcctgggcaatatgacgcctcccgaccatggcggattactgactttttcactccccggtatcgtgcccgcgttccggacgcggttttatgatgaaagtatacgtgaccaccgggcggtactgcacagtgtgattattgagcctgattttcctcgcgtcagcctggtctggcacagtgcgcttccctgccatcaccagattaatcagctcgaatccaccacggtgtcagaaaagcatcgcccgtttgtcagggtgaaaacgcttcccgcgaaattccctgaatgggaggctttattatga

SEQ ID NO: 387047 - DNA, 1038 bp, Salmonella enterica
atgactgctgttattgccgccgcctgtacatttccatccggccccacgctggcgctggctgatgtggctcacaccctccagttttctctgacacgtaaacaccctcagtggactgaccggtgcaggatgtcgataaaagcctgctattttccggaaatggcctctgcgcccctggacgagcgtttccggttattgattcgccaggtactgatggagctgatggatacttttcccggtctgaggcaaacgccgccagtgcaggtaggcctgttacttcccccgctgaacagaccgggaattgaccccgcgttaacgcgggttgcaaaggaggccgtggcggaaagcaccggctggcacagctgcccggtaacggttctgcatggcggacgtgcggaaaccgtcaccctgatgaatgaactggcagaaacgctattgccggaaggcgccgtcagcgttctgctggccgttgattcatggttgtctccgttgaccctgaaatggctggcagatgagaatttgctgcatggcgcacaccgcttatataaccgcaatgcgcgggagaatccttacggaagggttccgtctgagggggcggcggcgctggtgataacgtcatcttccggcaaatacacgccgtggtgccatattcgtggtacagggcaggctgttgaggatgtccggtattcagacaaaggcatctgcctgggcgcagggctgcgtgaagcggcgtttcgggcgctggaaacagcaaaaatcacgtcactgcatcatgttgtgagcgatgtcaatggcgaaccttatcgcgcggatgaactggggttcaccctggcagcgctgggggagtacaccgatgatgaaatgttacgggaaacgcccgtactggcgtcgggcgacctgggatgcgccagcctgctgacgcatatggggctgaccgcatggcgactgcatgcttctgaacagcccggtgaaacgctgctgctttcatcgtcggatgacgggcaacgcggtgcagtagtcatgtcagggagagagaaatga

SEQ ID NO: 387048 - DNA, 2418 bp, Salmonella enterica
atgacaacaattaatatcaatggactcacgttgtgccataaaggcagcggcggcgtcagccacaacacgatgccggatgtgtgcaaaaccccgccctttgctgtgccggtggcatacgaaaatgaggcatattcatcggacctggtaaagggaacgacgagcgtatttgctgatggcggcaatatgatagccaatatgggttcgcagtttgcgcgcagtgtactcgacgaagcggggagcatggggggcgtgatatcggggacgaacaaagcggaaacagagtggatatcgcattcgttcgatgtgttttttgagggaaaaccggcgtgtcgcttaaccgacaagctgtttatgaatcaccggaatacgatgaatatggcgggtctgatgcaggattatcttccgccgttaccggagcaggaagatgagtcatatataccgccgtggagagatgacggcaacgatgaagataaaaaaccgaccatgccctgtattgtcattctggttcatggggtgaatgatgtgggggaggcgtatcagaaccaggacgaaggtatttgtaaggggctgaacacgcggctgggacgtaccgatttaaacccgcatacgtggcctgcggaaacattcatgatctcagatgtggacggtaatattgcctcctccccggtgatccctttttactggggatataaaccggtggatcatgccgcctgggaagcggatcagagacgttaccgggcagatctgaaggaaaaacataacgatgcggatctgccttacgatacctaccgtgaatttgacgagaaaaaaattgccgctcatgccggtgaacatattgataatctgaataactggctggatgcctcctgtgccaaaggcggtggaacctttgccaatgcgacaactaatatccccgatatgtttggtcctggcaccgcgggtaaattgctggaagcagttggcctgattaactcacgcaacgatataatgaatgatggtgactggagccaccccatctaccagaacccccaccgtatttatcaggcgtatgccgcaaggcgactggcggacttgatcctggctatccgaaatgatgactcagccaaaaatgacgctattaatatcgtggcgcacagccagggaaccattatcaccatgctggccaatatgtgggtggttaaagaggggggccagcccgcagattgtctgatcctcaaccattccccttactcgctggaaaaccgcttgctggaagatgcgatgcccggtaaccagcagacggatgtcgcccgccagaaaacgctggcgcatctctgtaaattgatggcaaaagacagaccaaaccaggatggtgatttgcatcatgatgaggcttacatccagaacctgaaagacaatggatgtttagctgataaggccacatgggatgacccccactataaccgtaataattttggtatggtttacaactatttttgccctaatgatggggtagtttctatgacgccagttcagggatttggctggcgcgggatacctgatgacatcagtgaaacatcaggtgaaaacctgagtcagcgcgtattttgcaaagatcagaaggtgggcgaggaaaccggttaccattttgaaatgcctgcacatcaggccggtgattcaaaagatacggggtattcataccgtgatgtcaccatcaatgccccgctgttacctgaaccgtttgaatttaagctgatggcacaggatcggggttataaagacaagctgagcgggaatgatcctgccattgccagagcagccatgaaagcagagcgatttgttcccgaagtggtcaatgctcctgacagtattcagtttcagaatctgcgtgacggacaaccacttaacagcgctcaactggatgaactgaggctgaaatatccgttgtgggacatcatgagtggtgcttacagctatcaaaagctgattgctgtctatcgcagaatgactgacgccgaactggataaagcggtgcagatagaaacatcatacagccagcactcttccattgtggcaagtgtggaggtttctgaaaaatcgaccgcttacgacctggctatcgggccgtgtaaggcgtttgaaaataagggattctggaagaaattattattgcgggcagactggcgcagaccggagaatcccgatccaaaagcaatactgtattatcaggccggaattttacccccggactttaaacggtttatgaataagccggagtccccgaatgccatgccaaccggagatctgggggttgttaacggctacggaagtcgaattcgggttaaagatccctttaactatatgccttatcctcagcccgacattaatagaatagaaacaaatttacagtggccgatgcctgagccaaaggacatctga

SEQ ID NO: 387049 - DNA, 765 bp, Salmonella enterica
atggtacggattaacccattttttctgcctggcatcgtcatgctgtgtaccgcctgcgatcaggcaacgaccagaccagcgtcgccgccgacgcagatagtttaccggtttgatgatcaccgttacctggaattgaaggggttttactgtgagggtgcgctctggtacaccgacagccagaagggaatacatactgaaattgttgatcgattttatcgcgttttcacccaaaaatatgttcatccttccgaacgctatattgcggtaacgatgtatgaaggtaccgcattctatatctctaaagattatggccggacatggggtttggcccgttacacaccgggaggaggagcaaaaagatatggcgatgatcaccctcttggtaaagatgttgactctttcaccgtggtgaacgaccagggatttttactgactaaagcgggtgacctgtatatcagttcaaagccgttcgatgactcgcgactccagcctggcggtgagggcataccttatacttataaagattttgatggtgtggtgcagcgcgatcgtctgatgccgggaacgtcaggtcagaaatggggagaagaatatacgtcgtggaattcagtagccagttcagagcactggattacttatgcccacaaacccaactggcaaaatattcccaacaaagtcccggaagtgaaaaactataccggctgggatcatatgcgctgcgacccggatttagggctgtctgctaaagagcaagaagaaaaatag

SEQ ID NO: 387050 - DNA, 2451 bp, Salmonella enterica
atgataacgattaatatcaatggactcacgttgtgccataaaggcagcggcggcgtcagccacaacacgatgccggatgtgtgcaaaaccccgccctttgctgtgccggtggcatacgaaaatgaggcatattcatcggacctggtaaagggaacgacgagcgtatttgctgatggcggcaatatgatagccaatatgggttcgcagtttgcgcgcagtgtactcgacgaagcggggagcatggggggcgtgatatcggggacgaacaaagcggaaacagagtggatatcgcattcgttcgatgtgttttttgagggaaaaccggcgtgtcgcttaacggataagctgtttatgaaccaccggaacacgatgaatatggcgggactgatgcaggattatcttccgccgttaccggagcaggaagatgagtcatatatactgccgtggagagatgacggcaacgatgaagataaaaaaccgaccatgccctgtattgtcattctggttcatggggtgaatgatgtgggggaggcgtatcaaaaccaggataccggaatttgtgccgggcttaatgaacgactgggacgagaggattttcaaccgcatatatggcctgaaataccgcagggtaagccattgccggataatgcatatatgatatcagatgtggggggcaacgttgccttttcaccggttattcccttctactggggatataaaccggtagataaaaccacatgggaagctgaccagacgcgataccggaatgagttacgtgagaaacgtaataaagccgatctgccttacgatacgtaccggcaggacgatgaaaaaatccgccacgcccataacgacgcaaatatcgataacctgaacaactggctggataaaaaagcgcatgccaaaggcggcggcacgttcgccaatgccaccaccagtattcccgatatgttcgggccgggggctaacggcgtggcgctggatgttgtcggggcgatatcccgttcgaagatgaacgacggtgactggagccacccgatttatgccaacccgcaccgtatctaccaggcctatgccgcacgacggctggcggatttgattctggcaatccggcgaaatccaccaacggaaaaagataccatcattattgtcgcccacagccagggcaccattgtcaccatgctggcgaatctgtgggtaaaagcggaaggtgaagcccctgtggactgcgtgatcctcaataattcgccctactcactggaaagccgcactctggaaaatgcccagccgggcaaccagcagacggatgcggcacgccagcagacggtggcgcatttctgtaaaattatgagcgaaaacgcccggtataacggcggtcagtcccacagcgcagatgagaccgaaaagttgtgcagcgagggctgtttgtctgacagcggaaaggaaaaatggggcgcaacgacttataaccgtaataacttcgggctggtccacaactatttctgtcccaacgaccaggtggtgtcgatgctgccagtgcaagggatgggctggcgcggtatcccggataacatcagcgtgcagatgggggcgaatttacgccagcgggctttctgcaaggatgtaaacgtgggcgataaaacgggtgagcactttgtcatgccggaggcgaaacagaatgaccctgaaatccccggacaggatgtgaaatatatataccaggatgtcactgtcagcggcgcggtgctgccggaacctttcgtatttgagcttcaggggcaaaaagaaggttataaagctcctctgtcgggtaacgacccggatatcgccagggcggcaagaaaagcggaagatttcccggagaaggtgctggacgtgccggatacgacggcgttccgctatctgcgtaacggccaggcactgaatgaagcgcagcttgccgaactgagcgcacgttaccggatggacgcggtcagcggccgggtggaaggtgattacggtccgtcacagcaactgagagtaaagcgttatgcaaatagcgatgaactggatgtggtggcaaattataaagcgatttacagccagcactcgtcggtggtgtgcagcccggatgtacagttgcgggcagtgccgtatgacttggcgattgggcgtaacgaggcatttaaagatgaagcgttctggaaaaagcttttatatcttgccgactggcgcagaccagagaattcagatgacgatacaaagagatattatacagagggaatattacctaaagaattcaagggtatgatgaacaaacccgaaacgggtaaaaagcccatgccgacaggtgaaaacggggtggttaataattacggtccgcgccagcgggtgaagccgggcagcaaacgggatacggagaatcagatggaagatgtccttcagtgggatatgccgaagccgcaggtttaa

SEQ ID NO: 387051 - DNA, 822 bp, Salmonella enterica
atgaaaataatcggttttattgcgttagccctgggcatcagcctgctgccgggctgtcacgccggcaagcgtaatgcccgtaaaccgccggtacaggttatctaccggtttgacgaccaccgttatctggagctggaaggtttttattgtgaaggcgcactctggtataacgacacgcggaggcatattcgtgccgagctggtcgaacgtgatacgccaatattccggatatcgttcttcaaatacgttcatccgtccgagaaatatatcgttgttccctgggatgatttatccgcttttatggtttcaaaggattatgggcagacctggggaagcgcacgtttttctcccggcgggggggccgatcgctatggcaaacggatacccgccagaatgggaacgtatggtgtgccagccgtggcaggagaatttacgaaacctctgcccaaagaagtcgtttcaatgacggtagtgaacgatcagggatttatcctgacgaagtggggagacttatatatcagttcaaaaccgtttgacgatccgcgccttcagccgggtggcgaaggtatcgattatgtttatgatggagaaaagcaccatctgcgtccgaggaataatggcaccaacgataacagctactgggggataaattatacttcatgggcgtctcttcagggagaaagaccctggacgacatttgcttatgaaacaaactggcagggtatccccaataaagtcccggaagtgaaaaactataccgggtgggatcatatgcgctgcgacccggatttgggtctacccgcatcagagcgtggaaaataa

SEQ ID NO: 387052 - DNA, 201 bp, Salmonella enterica
atgagcggagttacttttacatgccccgactgcggtcatccccttacctcacataacaatcttgcaattaaagggatacatgatttcgaaggcaccatctgcaccagatgtggtcgaatcatcaataaaaacgatatcgctgaacaggccagagactatgctgagaaactcgtgagaagcatgttcggtaagcctcactga

SEQ ID NO: 387053 - DNA, 642 bp, Salmonella enterica
gtgacatatcgacatcaaactcgcattgcagaactggaaagccagctccgtcagaaagaccagcaactgagtttggttgaagaaacggaggccttcctgcgctctgcactggcacgtgccgaagaaaagatcgaagaagatgaacgggaaatagaacatctgcgggctcagatagaaaaactgcgccggatgctgttcggtacccgttctgaaaaactgcgtcgtgaagttgaacaggctgaggccctgctgaaacaacgcgaacaggacagcgatcgttacagtgggcgggaagacgatccacaggttccccgccagttgcgacagtcgcgccatcgtcgtccgttaccggcacaccttccccgtgaaatacaccgtctggagtctgaagaaagctgttgcccggagtgtggcggtgagctggattatctgggggaagtcagtgcagaacaactggaactggtgagcagcgccctgaaagtgatccgcacagaacgggtaaaaaaagcctgtacaaaatgtaactgcatcgttgaagcaccggcgccgtcccgcccgatagagcgtggtatcgcgggccccggattacttgcccgcgtgttgatcacggcggcgagcgtggtgcactgctgtacgggctga

SEQ ID NO: 387054 - DNA, 252 bp, Salmonella enterica
gtgagccgactgacaattgacataacagaccagcagcatcagagcctgaaagcgctggctgccctgcaaggtaaaacgatcaagcaatacgcactcgaacgtttgttccccggcgatgcagacgctgaccaggcatggcaggagctgaaaaagctgctgggaaaccgtataaacaacgggctggaggggaaagtctctaccaaaagtatcggagacattcttgatgacgaactgagcggagagcgcgcgtga

SEQ ID NO: 387055 - DNA, 318 bp, Salmonella enterica
gtgacggcctatatgcttaccactgatgcggaagccgacctacggggcatcatccgctacacgcgtaaacagtggggaaccgcacaagttcgtcgctatattgctaggctggaacatggtattgcagatcttgctgccgggcgaggttccttcagggatatgagcgaactctttcctgaactacggatgatacactgtgaacatcattatgttttttgtctgccacgcgggagtgcgcctgcactggttgtagcgatttttcatgaacgtatggatctcatggcccggctgagcgagaggctcaacatcgaaagttag

SEQ ID NO: 387056 - DNA, 282 bp, Salmonella enterica
atgaattacgatgagttaacaaaaattaccgctgaacgtatagctgactatatggcagaggctattaaaacggattctaaaggcgtttcggaaatgtttcataatgccgcgtggggagtacgtacattgtggtttgaactcgcctcacaaatagatatcgacacacacacaaaagacaggtacgcaagctatgatttaaaagttaaaattgaaaagcagaaaaatgaatttattagaatgacagatcgcgagcgtgtccctttattgaaatcgccagaataa

SEQ ID NO: 387057 - DNA, 366 bp, Salmonella enterica
atgagtgaaattcaatgttctacacccggctgtgggaatttttctgtctcaggaggtaaatgccatgactgtatttctgataagcagtctgcattagactatgtttgtcctgagtgtaatgccagagtcatcgagtttactgcccctcattgcccggtctgtaaaaaacaaaccgatatgtcgctggttgtcaccgatattacagaggccatgttcagctgtgctgaaggttatgctgctcttgtcactgacgcaatggaatttagccggggctgcaaattaacatcagcagaatgccagtcgatattcaggtgtattgaagattccatcaataaagcaataaaggaaatggaaggtgtggaatga

SEQ ID NO: 387058 - DNA, 204 bp, Salmonella enterica
atgctcaacgaacgccagaccggccagttctctcactaccttacgatctatgccgggctggaagctgaagtcgaactgctccagggtttttatccatgggaagcgcgcctgtttcagacggctttccatgccgcgctgatgtcggccgttctgttctttttatttttttaccccataacagagcaggacggcctcagggggtaa

SEQ ID NO: 387059 - DNA, 660 bp, Salmonella enterica
gtgcagaaacgtaaattcctcacccccgaagaggtcagcctgctgcttgatgccgccctctgcggtgccaatcccgaacgtaaccactgcctcatcctcatggccttcctccacggcttccgtgtctccgaactcctccgcctgcgcctctccgatatcgacctccacggccgccagatccatgtcgcccgcctcaagaacagtttctccaccgtccatcccctcatcccccgggaagtccgctccctgcgggcctggctgcgcgtgcgtaaaaaaatggccgacaccggcaatgactggcttttcatctcccgctcaggttttccgctctcccgtcagcagttctattacctcctcacccgtatcagtcataaagccggtctccctgtgtgtgctcatcctcatatgttgcggcatgcctgtggttatgcgctggctgataacggggcggacacccggctgattcaggattatctggggcaccggaatatccggcatacggtgaggtacacggcctcgaatgcggcgcggttcgggggcgtatggcgcagaaagcgcggcaggaaagggcaacagaatgacccaaaatgtaaaccagccaccatgacgggaagtaagcatatcagaattttcacaccctttgtaagggcactaccataa

SEQ ID NO: 387060 - DNA, 207 bp, Salmonella enterica
atgaaagagttaagcgaacaggaaatgcagtttgtttcaggtacaggagccgcagaagatggacagaaaattgcggggatgattggtggtgtcatcgatggaataactggtatttttggattcaagtttggatttaaagatattttgggctcgatcggcgggttgataggttcaatcgttgacactgccaataataacaaaaaatag

SEQ ID NO: 387061 - DNA, 267 bp, Salmonella enterica
atgaaattattagacgacaaagagctgaatattgtttctggtggtcatgcctggaatccatggcattcatctaccgcgattaaatccgcttttgatgatggtaccggacatatttcaggtgcaatatctccagcaggcgcagccgctgtttgtagtgctgtcgctggtgccgcttcagctattggtgggccagtaggagctgctgtgggaaccgctgtttgcggtggaattgcagccgctaactcaggggctggcacccatcattaa

SEQ ID NO: 387062 - DNA, 678 bp, Salmonella enterica
atgtctttaaacgattctaaaatccgcgacttaaaaccctcttcctgtcctgtaaaactctccgattcacacggtccgtatctgctggtcaatccgggcggttcgcgtatctggtatctcaaatatcgtttcagtggtaaagaatcccgtgccagcctcggcgcttatccgctcgtttcgctctctgaggcaagactgaaacgtgacgatatccgcaaactgctggcgcagaatatcaacctcgcccaacagcgcatggctgataaagccgcagcgtcaccggaaaagtgttttaaagcggtggcgctggcatggcacaaaaccaacaaaaagtggtcggctgactatgccacgcgtatccttgccagtatggaaaatcatatctttcctgccattggtcatctgcccgtcaccacgctgaaaacgcagcatttcaccgcattactgcgggttatcgaggataaaggctttctcgaggttgtgtcccaaacccggcagcagctttgcaacatcatgcgttacgctgttcagcagggactcaccgaaaacaatccggcaattaatttctctccctataggccagcggcgggtaagtgcgtttgcctatgtagaagatgccagccctgccagacgggagaacgcacccagcgtggagcttttatttctgccgcgaagtag

SEQ ID NO: 387063 - DNA, 2091 bp, Salmonella enterica
atgacaaagcagtctgaggctgaggtattttccgaattagaagcattgtgcacatctcccgggtttattcatgttttagcatttttgacatgtataaataacgtaactctgtatgaggaagaactaggtcccaatgaaatagaacatttgtactcaaaggaaagattaataagaacggagatttcaacgattgccggtttattattaaaatctaatatagatattacttatcctggtgaagcagaattactacatttggctgaaaaggtaaatatatctttggtgacgttgcataattcaatgtatggtggtgaaaagagtactggatatgataatgtagtcataaaagagagtgttttttatgctgctgaatccgcttacgattttcagtatttggatatggcaaatgaaaagtatgcattagatgattcatggtttagagaagttatgggtttttcatgcaatgatttgatttccattggtaaatgcgtggactcaataatatctaaacaaattgttgattatttaaatagtggattaggcttatatagtgatgaactgttaaaagcttatcacattccaactgatataatagcgaatgaaactggtcttaatgaattaaaagtaaagagcataataaatttattcacatcaactgagaactcaaatgagagattcagagaagttagtgaatttaatgtatataatgccaagccaatagtgtgcaaggatgatagatattattgtttcaccccatattctttatctcagtcaatctatgaaaccccctttttttggatgaatgatgatagagagtataagcatgtggctgcagaacatcgaggccagtttgttgaaaattatgtctataataaaatgcttggggtatttggcaaggaaaacgtatttaaaaatgtttttattgtcaataataggaatgaaactcttggtgagattgatgtattagtttcattttctgatgctgtgataatttatcaggccaaatcaaaaaaattaacgattgaagcaaggaaagggaataataatgcgattcagaaagatttccagggggtgatacaagatgcgtatgaacaaggcgtttcctgtgctcaactgattatctctgggggcaatttagctgaacaaaacttcaagccattgatacttgattcgcaggtttccagatgctatatagttcctattatttctgagcattacccagcattgagttttcaagttcatcaatatttaaaaacaacaaacacagataatatatatcctccgtttgtgatggatgttttcttattagacgtgttaacagaatttttgcgaacgccattgtattttttgtcatatattgatcggcgtacaacctataataataaagttttttcttcgcatgagttaactgtcttttcattacatttaaaacaaaatttatggattgatgacgaatgtgacatgtttatgttgcaagatgatatatgtgctgatctcgatatcgctatgattgctcgtagaaaaggagtgattgggaaaaatactcctgatggacttctcacgatgcatcaagatggatttgtaaaaaaaataattagatcattggaaactgaaaatcataaattagctatggatttaggtttgcttatgctgtcattaagcagtgaggctattgaaaacattgatcaaatggctaagaaaacgatttatttatcctcgatagataaaaaacatcatgacttttctacagtaataggaggcattggttttactgttcatagtaactactacgacaaaagtgccgcagaaaaacaattgcatacacattgtatgaagcgaaaatatataacaaaagtcaagaaatggattggaatacatgtttcacctgatacatatatagtgaactatggtgtcatgttagatttcaattggagctattctgaagaaatagagcgtacgattggacctagtagtattaaaaatacattaattaatgtcaatggcattatgactcaagtaaaacgccccggtcgtaatgacccatgtttctgtggaagcggtaagaaatttaaaaaatgctgcttgcgttaa

SEQ ID NO: 387064 - DNA, 123 bp, Salmonella enterica
atgatacaaccggactggcacccggcacatattgtcgccggattaaaaaagaaaggaacgtcgctcgccgctgtttcccgtaaagccggactggccctcttccacgctggcaaacacccttaa

SEQ ID NO: 387065 - DNA, 462 bp, Salmonella enterica
atggctacgatcctcagccagactcacccgttactttccgttccctttaacgccgacactgatttcaccgtactggccgactgttgtgaaaaactcgccgggactcaggcagaaagctacgatccggcgctgaaaatagcgctctgcgggcgtctctctgccgcactcgtgttgctgaaaccaggcctgcacgcccccattccgccacatctgaaagacagcctgaccgttgatacgctgcccaaaacctccccccgttttgcccccgatgcggacacgctttgcgattactgcctcaccctgacgcagcttttactttgccgtatgtttccgccacaaatggaggagcaactgttctggctgttgtcagagttggtggagtactttgcggcggaaatgaaagccccacgatggatacgcaccgctgacggcgtgaagtttattgaggaagtggtcgtatga

SEQ ID NO: 387066 - DNA, 303 bp, Salmonella enterica
atgggcagaacgctggaacagcttattgcggatgaaaaacctgaagtcgtggccgaagctcaggcgatggcgacggacatcctgctcaacattcaccttgccgaactgcgcgagaaagtacagaaaacgcaggtcgaaatggcgcagatgctgggcatcaggcaacctactgttgccggtatggaaaaaccggggcgcgacctgaagctttccacgctgaaacgctacgttgaggcgaccggcggcaagctacgccttgatgttgaactgccggatggttctcactacggatttgtattgtaa

SEQ ID NO: 387067 - DNA, 354 bp, Salmonella enterica
gtgtggacgattacaacaacggatatgtttgatcactggttttcctcgctcaatgataccgatcgggccagcgtgcttgcagcgctgttggtcctgcgtgaaaaggggccgggtttgtccagaccttatgccgatacgctcagaggctcccgctttagcaacatgaaagagttgcgtattcaaagtcggggtgatccgatacgggcatttttcgcttttgatccgacccgtaccggcattgtactttgtgcgggaaataaggtcggtaatgaaaaacgtttttacgatgagatgctcccggttgcagatcgggaattcacgaactggctgaacataataaaagagaaggagtaa

SEQ ID NO: 387068 - DNA, 915 bp, Salmonella enterica
gtgacgttcagggacagcaacggtttgctgacggaggctgaaatccagactctgatgctccagaccaggcaacatatgagtcagaccggcaaggatctggagtcggtaatgcacaatatcctggggttaaacggtgatgacgcggcagtgatccgtagccgactgggaaatacgctcccagagcctacggcaagtacatccggcatgagtgaaatcacagcccttcaggaacaaatagcggcgatgagtatgacgacggagtatgttcaccctcacatgcagcttgccagccccatggcagagagcttgcaatgcccgccgtttacttcttcgggtaaatccgatgaggatatatacgaaatgggaagctcaaaggtgccgcttccagcgattactccggaattgctgacgtctcaatttcctgatatgtccgaagctgacaggcaagccttagaatatatagcggaccctgaaaacttttcccataccttaaatgcagacggcacggttatctctataagtaagaaaaggcctaatagtatatttagaaataattatacagcagatacatggacatttatatctaaccttaaataccaaccggatgggggaacgttaccttattttgccagtcacatagcgcaatatcaatatttgctggcagcagtctcagggggatgggtaggacagatgccattcgttttgatcagagaaaatgtcattaatcagactacattaaataacactgaatggttgaatggcgaggagttaaagacggcttttcttaataacacgccaaatggaaaatctaccgctaagattttgcaggcttttaaacttagtgctatatcagttgaaaaggagtatgttgatagagaagtcaatttttctgtactattaatgcctgaatactaa

SEQ ID NO: 387069 - DNA, 141 bp, Salmonella enterica
atgtcgcaaaaatcgctgtccaccatcacaatttgtgttgcggtggtactcatagtctggatgttacatggttcactttgtgaactacgcatgagattaggaggcgcggagtttgcggcgttcttacagtgtaaacagtaa

SEQ ID NO: 387070 - DNA, 573 bp, Salmonella enterica
atgacatttaaaatgagcgaacaggcgcagacaattaaaatttataatctgcgttcagatactaacgaatttattggcgcgggcgatgcgtatattccgccgcataccggattaccggctcactgtacggatattgagccaccggaaatcccggcaggaagtatcgcggtgtttgacagcgaaaaaaacacctggaacgtcgtcgaagaccaccgggggcagacggtatacagaacggataccggggaggcgatctggatttctgaactggggccattaccggaaaacgtgacgaccatttccccggacggtcagtatgaaaaatgggacggtacaaaatgggtgaaagacgaagaggcagaaaaagccgcccggcttcgtgaagcagaggagactaaaaaacgacttctgcaactggcgacagataaaatggccccccttcaggatgcggttgacctggaagaagcgacagacgaagaaaaagcccggcttaatgcgtggaagaaataccgtgttctggtaaaccgcgttgatacgtcaaaacctgaatggccggaggctccctcagcctga

SEQ ID NO: 387071 - DNA, 1632 bp, Salmonella enterica
atgcagctgacgatcacgccgaattttgcacaggaacgcgcgctgaacatgctgcgccgtgactggaagtcgcataatactttcatggtgtatgcgcccactggcagcggcaaaacggggttagcagccttcatcgttgccgggttcgtcagccgtggtatgcgtgttctgttttgtgcgccgtacaccatcctgattggtcagacggctaatcgtttcgtggagtacggattaccgggggatgacatcggttatatctgggcggatcaccccaactacgatccggaccggaaaatccagattgccagcgccgacactctgattcgccgtgtgtttcctgacaatatcgatctgctgattatcgacgaagctcacctgcgtaaaaaacgcatcctgaaggacatcgaacgcctgcgcggcaaaggcgtaaaagtgattggcctgtcgggtacgccattttccccgttcctgggcaaatactatgaccgactgattaagccgactaccatcggcgagctgatccagcgtggcgatctgagtaaatacgaattttacgcgccaacaaagccggatctgaaaggcgtaaaaaccaagtcttcgcttgagtacggcaacgattacaacgaaacgcagttggctgaaattatgtgtggctctacgctggtgggcgatattgtccagaactggctggagaacggacgtgacctgccgacaattgcgttctgcgtgaacgtagcccatgccaattttctgactattcagtttaaccaggctggcgtgaatgctgaggtcatgaccgccgacacgccaacagaagaacgtcagactatcatccatcgttttgaaactggcgccacgaaaatcatcgtcagcgtgggcgtgttggttgccggattcgacagtgacgttcgctgcatcatctacgccagaccaacaaaaagcgaaattcgctggttgcaggcgctcgggcgtggcctgcgcactgcaccgggtaaagagtcctgcctcatcttcgatcacagcggcactgtgcaccgccttggttatccggattctatcgagtatgacgatctccccggtaagtctgacggcatggaggaaagtgtgcgccgcgcagctgaggaacgggacgaaaagctgccgcacgaatgttctcaatgccactacatgaaacccgctggtgtgtacgtatgcccgaaatgcggacataagccgctgggcggtgaggacgtcgatactgacaccggccgcaaactcaaaaagctgggtaaaaaccagcaccaatccacaaaggcacagaaacaggcctggtggagtcagatcaagttttatcagcgccagcgcgtatcgcaggggaaaaagcccgtcagtgatggctggtgcgctcacaccttccgggaaaagttcggtgaatggccgaatgacctgagtgacttcccgatggaaattaccccagaggtaagcaactacatcagacacaaacttatcagatatgcaaaaggaaaggggaaggcggccgcatcagctgaaactgccagccccattcccgactcagacattacccacaaggtaataagtgcaaaacgccaggtagagaatattcgcagtatgcttgggagaagaaccgcgtga

SEQ ID NO: 387072 - DNA, 972 bp, Salmonella enterica
gtgaaaacagcagaagcggcgaaaggccgctggcctgaaattttagagcatttcaacctgccgccaataaccggaaaaaatcactacaggggcgagtgcccggtatgcggtgcacgtggcaagttccgcattgacgaccgcgacggtgccgggacatggatctgtgtatgtggtagtggcgatggtatgaaacttgtcaccctgacacaggggaagccatttaacgagatttgcaccgaaatagaccatctgatcggaaatgattaccagcaggtgataatcccggtaaacagcagcgccaccagcttacgcaagcgtgtgttgagcaagttctctaagctggaggcactgcgtggcacatccggcgctgcgtatcttaactctcgtggaatattcaaccttcctgctgaggcgatccggttcaatgctaagcagagacacaacgggtgtgtattccagtctctttattccctggctactgacgataaaggggagttgtgctatctgcatcagactctgcttgatggcgccaaaaaagcagacatcggtagcagtgcaaagcgcctcaaatccctgcaggaagataactatctggatcacgctcgttcagtagcgatccgcatgtttcctgtcgccagcactctgggtatcgcagagggcatcgaaacggcgctatcagcgcaccagatttataaagtgaacacctgggcaaccatgacggccaacttcatgaagaaattccgcgttccggctggtgtgacgcatctgattatttttgctgaccgagacgaaaacagtgccaccggtttggctgcggccacagaatgcgcccatgccaacttactggcaaaaaatgacctggaaaaaatcagcatctactacccggataacggggattttaacgacatgctcatgaacggcgatcaggtccgtgagctggtctttacgaaaaaacaaaaggcggctgtgtaa

SEQ ID NO: 387073 - DNA, 423 bp, Salmonella enterica
atgcgtgatattcagatggttcttgagcgttggggagcatgggtggcaaataaccatgaggatgtaacctggtcgtccattgctgccggttttaagggattaattccctcaaaagtaaaattccgtccgcaatgctgtgatgatgacgcaatgataatttgtggatgcatggcccgcctgaaaaaaaacaacagcgatttgcatgatttattggtggactattatgtcggaggcatgacttttatggtgcttgcgcgcaagcatgggcggtctgattgttgggttggcaggatgctccaaaaagctgagggcgtcgttgatggtatgctgatgatgctgggtgtcaccctcgaaatggatcgttacgttgaatgcaaatccgcgccaattgagattacgggagtaaagcacgcccttcgctga

SEQ ID NO: 387074 - DNA, 2076 bp, Salmonella enterica
atgcggtcagaccaacgaccagcaaccagcaaatcaagaaaggtcgtaaaatctgttgagcctgatattgccgaattgggtaacagttggctcagatcatatggaattgactataaactcgagcaggcaagacttaacaccgagatagacaacgcactggacacctatttttcaaaaaatggcggcgcaggtggtaaccgacctgatgtaaaactcctgcttaaggataagtatgacaggcagtatcccgttctcattgagtacaaaggctacaaagacaagcttattaaactgggcagcaatggtattatcgaaaataaagattccagaaaagaatggaattttaaaaatataaacggctatgcggttaatggggccgtccattatgccaacgcgctacttcagttcactaattaccccgatattattgctgtcggcatgaccggctggcgtgatgaggataccgggcaactgcatcatgaaatcggtgtatggcacgtttcgaaaaataatttgggtgtaggccaaagagttggtgaatataccgatttatcgtttctttcagctgaaaacttcgatgagttcatcaacaaggtcagcctgctaaacctgtctcctgaagaactggaaaaaattaaagccagcaaagaagaagagatggatacccgtctttctcgtctgaataatgatatttaccagactgaaaaggggcttagtgaaagcgatcgcgtttatctcgttgttgctactgttattgcgactttgggtattcccggacaacttgcccccttggataaaaaagaacttacctcctcaacggaagagggcgtgcgtgacggtgatattattttcagaaaaatcagaaattttttaatattaaaagctgtccctgaaaccaaaagagaaatgatacttcgcaccctgaaaaatacgctgtggactgaaaatattaataaacctgttaatggcgaaagtcagttaaagcgagtgtttgttaagattgttgatgacatgggagagtattacaaaatagggctgaccaccgattttacaggcaagttgtttaatgaaatgtaccgctggctagggtttactcaggataagctaaacgatgttgttctgacgccgccgtatgttgctacattgctggccagacttgctagggtaaacaaagattcttatgtgtgggattttgccacgggttctgccgggttgcttgtggctgcgatgaatgaaatgctcattgacgccagagagaaaattaaatcaccggacgagcttaaaattaaggaagcgcaaatcaaggctgaacagcttcttgggcttgaagtcctgtccagtatttacatgctggctatcctgaacatgatacttatgggggatggtagcgccaacatacttaacagggactcactggcagattttgacggcagatacggttttggaaaaacaggagaaagtttcccggcaacggcattcgttcttaatccgccatattccgcaaaaggtaatggcatgatcttcgtgcagaaggcgctttcgatgatgaaaagtgggtatgccgccgtgattattcagagttccgctggttcgggtagagctaaggagtataatcagaagatactcgaaaaacataccttgctggcaagcattaaaatgcctgccgatctgtttatcgggaaatcaattgttcagacatgcgtttatgtctttcaggttaatcagcctcatcacgcattgcatcaggttaaatttattgacttttctaatgatggttacgcacgttctaatcgtcggaaggcaagaaataacctggtagatttggatcgtgcgaaagcacgttaccaagaggttgttgatttggtttattttggaaaaagctgccttaatatctttacggagaatgagtattttgaggcatcaataaatccacaaagtggtgacgactggaaccagacaaaacccgtggacacaagacccacgctggcggacttcaaaaaaactgtcggtgattatctggcgtgggaagtgtcaaagcttcttcagagtggagatgtgccaggaaaaaagcggtaa

SEQ ID NO: 387075 - DNA, 1113 bp, Salmonella enterica
gtgaagtcaaatcctcaacttgataaatccagttttgtatttactgaagataatgaaaatacttacccgtattttaccagaacggttcttaataatgggattgccgggtacgttgagtatcttgacgaagaccataaaattagtggaaacagcattgccgtaggtatgttaggtatgcaatttttctatatggaaagagatttttacgcaggccagtttaccaagacacttttcccgaaattcgaggggatggacaaaaaaatagcactttattttatagtaatgctgaataaatatcaggcaaaactacagagcattcttgtaagaaactttaaacaacaatttgatgaaactaaactatcaattccagtcagaggaaataatatagcgtgggattatatggtacaatatatagaggagctggaagcggcccatatagaggagctggaagcgtacttgctggttagcggactcgcggactcgcggactcgcggactcgcggactcgcggactcgcggactgataagccatgagcttacaccgcaggagtatgacgcggttaatctattaaacagtaataatcttgtgtggggtgcttataaccttaaagagttattcggccccacaataagaggtaagcgtttaaaaaatgctgatcgtcttccaggggatctcccgtttgttacagccggtgaagtgaatgagggggtttcagcatttattcgcaatgatgttgttgtatttccagcgaataccaccacgatagatatgtttggttctgcaaaatacagaaattatgaatatggtgcagatgaccacgtggctgttgttcatactgacaagtgcgcaaaaaatgcggctatattcataactacatcaattcataagtcctcttatacaggaaagtttaattacgggcgaaatttttatgcaaaagatgctgacgagttaatgatatctttgccgtcaaaaggtaataaacctgattatttttttatggaaatattaaacaccgcagtacacaaactggtcattaaagacatcgttcggtacgcagataaaaagctagctgcatataggcaggttacaggaagccagaacgatggtagctga

SEQ ID NO: 387076 - DNA, 402 bp, Salmonella enterica
atgaaaatcaagcacatcggtaaagccgtttttcttttagcactggtaacctcaacatgttttgctgctggtaagagcataaatgtcgagttcaggaaaggccattaccgtgcccaatactcaggaataataaagggatacgattacgatacctataagtttcaggccaaaaaaggacaacaactgcatatcagtatgtcgaatgaaagcgcggatacttacctgttcgggcccgggataagcgactcggttgacctttccaggtattcaccggcactcaatgatgccggcaagtacacgctgcccgcatcaggtaactatgaactgagaatacttcaaacgcgcaatgacgcccgtagaaacaaaactaaaaaatacaggattagtattcagataaagtag

SEQ ID NO: 387077 - DNA, 864 bp, Salmonella enterica
atgagtccgtttgccattatcaaaaaggactcaggcacagcttacgaactggttcccaacagtaataaaacggtacaaccagtagctctactcaggctgagcgtctttacgccagtatcaccgcgtgagaaaggtaaacgcgattttcagatagatgcgtcagaagagctttcaagcctggaagtagctcgtcaggaaggctatacaaacatcaaaattcaaggtgctaagctggggatgtccactgatttcaaaacgtggatcggcataatatctgctttctcaaaatacgggtacgagagcgagaaaatcacgcttcctttttcagagttcgcgagaatgtgtggattaaagcctactgatatcaacgggcgggcccgcacacgtctgagcgattctctgtttaatctttcaagcgttactctttcttttcggagcaaggacggtaagcgaagcctcattacccacctagtccagcgtgcggttctggatatggaagcggacgttgtagagattgttggtgataagagcctatgggaattgtatcgatatgaccataaggttctgctcgggttgaaggcattatctgaactctcacgaaaagaagctgcacaatcgctctacgtttactttgaaagcatgccagctggaactctttacatttcaatgaagcgtctgcgagagcgcctggctatggagtcacaaatcaaggatcagaacgcgataataagacgtgctatgggtgatctgcgtagaattgggtatctcgattacaatgaaacaaaaaaaggtagggaaatcatgttcatcattcataaccgctcgcctaaattagggcttgcagccccacggaacccagattag

SEQ ID NO: 387078 - DNA, 291 bp, Salmonella enterica
atgcggatcagcgaacaggtgctgctcagtagtctccgtcagggcggctgtgtgcggagtttctggcggcgttctgccagactggcgggaaccccacccccggttgtaccggagggtctggtgctggaaaccccgggagagtcaggcgacacccctctttctcatgtggattttgtggtggcgcagaagtgggtggtctgtgctgaaacctggacacagaccgtcgggggaacagagttcggcggggcggtctggcgactgcgtactgacagggataacaccacctcatga

SEQ ID NO: 387079 - DNA, 291 bp, Salmonella enterica
atggagcacaaagatctgtattacacatattcgtcgaaagccgtacctggtgatgatcctcgcaaaacaaaagaggatgcaacaaggttcagccgccacgaagagtatgaagttctcaccctcatcaattcatttactgatagtaacggaaaaactcttccgctacgttcacagcaaattattgagtggatgattcatgatcacttaccctcacatattcaaggaagacagaacgtcacaaattggattattgaaaaattcccaacgcttaaaagtcagtatccacgctaa

SEQ ID NO: 387080 - DNA, 630 bp, Salmonella enterica
atgacagaagacaccaaacttggcagtgcattagtcagcgccttaaaatctgatgaaataatcgagctgggcaaagaatacgccgagcttggcatcgactctttgattgaatcaaatatccttgaatctatcccctttgttagtacggtggtcgggctatacaaaaccgtcagttctgtcaaggatcagctttttactgaaaaggttattcgtttcctcactcacttctcagacctgtccgacgctgaacggattaatatgaccgaacggttgaatgaagacgataaattttctggcaaggctggcgcaaggctgattgaaatcatcgaccggatggaaagcgaagacaagcctgaaattgcggcagaattccttaaggcattcgcgcgagaagagatcgattttaatattcttcggcgtttgctggttgctcttgaacgtattccctcatttgatatcagaggattggcggtatttgctgccatcgactctaaccaagcagtggaaatggacgaggcctttttggatggtctcgttaacgctggattgggaaagagcaatggggcatggaaactcattattgtccctacagatttatgtatgaccttcgtgcacgctgggaagttataa

SEQ ID NO: 387081 - DNA, 168 bp, Salmonella enterica
atgcctaaacgacgcgcacaggccaaggttcaggagcaattgagagccattaatcccgtgctggctaaccctgaagattacatgatggtcacccgcgagtatctcaagccacacggcaagccccttgcgttctacagcgagttgacattgattattgcaactcggtaa

SEQ ID NO: 387082 - DNA, 1056 bp, Salmonella enterica
atgattaaaacatttataatctttctgagtgtttttttagtctcaaatataactaatgccagtgaacgtgcccccactataaacgtgggggtttatataagccagccgtttgtgatgagtgaaaacaataaacttaccgggttagctgttgatttgtggttgggatatgcttcgaaaaatggattgaagactatttttactgaatatcccactattgatgctttgctgaatgctacccggaatggaaatattgatgttgcagtgtctaacattaccctgacagaagaacgagctcgttacctgactttttcatttccatggtatgattccggcttgcgaattatggtgaaaacaggtcagaaagccccattaaaagaatttttctctgaactgactgatgatggacatatcagagtgtatctgttaatcgtggtagtcattattatggggacttttgtattaactattctggaccgaaaattagatgtttcttttccccgctcatggtttgcgggcctagctgaaagtttttatcatgtaatgtcaattgtaacgacggggaaaaccagccataagcttttgtttggtagcgtcgggaaaattattgctggcatctggatggtctgtggcgtaaccgttatagcttatataacatcatcgatcaccagtacaatgacaaccagtaaattacaaagtgttgtgcataatataaacgatctttctgataaaaaaaccggagtcagaattggtagcgaggcagaaaaatatctcaaatcaaaagggatggacacaaaacctttcacaaatcttactgaggcggtatctgcactgaataataacgaaataactgctattatagcggattcaccatcacttgaatattatgtgagaacaaatccctattcaggcgtaaaaattgtcgggccgatttttcatcctgaaaaatttggttttgcattacctttaaacagcgaacatacgcacaaattaacaacctatctaatcggacttcatgagagtggagaattatataatttacagaaaaaatatttttaa

SEQ ID NO: 387083 - DNA, 651 bp, Salmonella enterica
atgagcataccggtgaagttccgcaccgcgcagatcaatgcgctgcacggcttactgctggggttcggcgaaacggtgcgcaagggccgggcgtcattggacaaggcaatgccagaggtacttgagcgcctgaaggaaaagctgccgcctttcctgatttaccagattgaagaccagtaccggcggctcagtgaccttgatatgcagatagatggcatcgaaaagcagcttgcagcctgggcgaaacaaaatgaggcctgtcagcggatcatggatattcctggcgtcggcccgttggtcgccacagcagcggtcgccattatgggcgatgcaggaaccttccgctcagggcgagagttcgcggcctacattggtctggcgccaaagcaaacaggcactggcggcaaagtacggcttctgggtatcagtaagcgcggcgatgcctgtatgcggacgctgtttatccatggagccagggcggccgcattacaggcgaaggagccgaatccgtgggtgacagagctgctgaaaagacggccgaccagcgttgctgtggtggggatggccaacaagatagcgcgtacggtgtgggccctggtggctcataaccgtacctatgacaaaaaacacgtcagcgtcaggccgttctga

SEQ ID NO: 387084 - DNA, 306 bp, Salmonella enterica
atgttgttcaaaacccgcctgcgcaaaatgccggggcagcatcctgaccgcccgtctcagatgccaccgggtcggggacagtatcagaaaatcatccatgtaccgggcatacgttacatggcggtttctgctgaagacgttgtcggtttctgtcaggtggaaggcggccagcaggggactgagcgcactgccccgggggataccccgcaggggcgtatgaaattccccgccgtcttccacgctgtagtggagaatgagatgaacgcatcccaactatttaagtacggcgcaggattcggcaggtaa

SEQ ID NO: 387085 - DNA, 1371 bp, Salmonella enterica
gtgtgggtggcgctggtcccggccggggcagcccagccggtatcgccggtgaaaacggcactggtgttcctcgcaggcccgcctgacgcaacgaataccaccgtcagcaccgacaagtccgccgcgaatgctgacaacaaggaaaccatcaccgtgaccctgaccccgcgtgacagccacaacaacgtggtgcctctctggacgttccgcaaggacctcaccatcgtcccgtcggtgaacgcgacggttcccggcgccgtaaccgtaaccacacccgcgcaggacgccgcgggcaacgtcgccgcaacgcttacgtacgtcgatacaagcggaaatctcctgagtaaggaggcccgggccggcacaacgacgattgccatcggtaaagcggttaaacagacggtggatacccggttttaccccaacgtgagcgcctgcttaaccaacatcggcagccacaacctcatcatatttggccagaccgaagttcacctgtgcgacggggcagggcatgccatcgctaacccggacgggtattcagtcacgtcgtccagcttgggcacgacagattgtaccgggaccgacgggctttgcccgctcaaggccagcggccccgtgatcaacggtttaccgaatgatttaccgggaaaatccaggatcgatatcaccgtcacggacacatacgtcggcgcgaagacatgggccgggtcaccgtacgctggcaagggtttcgtagtcacaattgcacgagacatcagcacggccagccacgccgatacccagagcggaaccagcggatgggaggccaagttcagcgatatggacaaggcaggcgcagcgatgagccgcgaaccattcgccgacattaccgcaaccggaccgatttattccagtacgcttcgtgagatactgaaatataacctaacgttgcccacggttagttcgcacgacctggggctcatgaccgggggtactaggtacacgttcggcaacccttcttccatagcaggcgggggcgacaaggcacccgcgctgtatgtggggagcgtccacggctcgatttattcaaccggcgtaaccgtgggttcgtcggccgccgccgcgggcaagcaccccgacatcctgttttatttcaaccgtggcaacagtgccgaggttggcgtgtatggtgatgatacaacgaaaccagtcacaaacgggtcagcgggttattatcagacaaacggttggaacgtcgatgacgctctcaagtgcaacaactggctcgggacgccgtacgaccagcacccatgtaatggcgacacacggtaccctttcttaacccaggtgaattacgtcaacggagaaatcgcctatgtcgtatttcgataa

SEQ ID NO: 387086 - DNA, 1185 bp, Salmonella enterica
atggggcgtacctatcatcaggacaaccgctcaccggggagtctgccggggacaaaaacgcagatgaccatccgctcaaaaacgtacaaaggcagcggatttaacgaactgcggttcgaggacgcgacggaccaggagcaggtgtatatccacgcgcagaaggacatggatacggaggtgctgaacgaccggagcacaaaagtcagacacgaccacacggagagcatcgggaataaccagaaaatcacggtggtgaaaggccagacggtcagcgtggggacgaaaaaggaaggcgggcacgaccagacgattacggtggcgaataaccgtagcatcacggtacgtaacgaccagacgctgaaggtgacgaacgaccggatggcgggtatcagccacgatgacgggctgtatgtgaaaaatgaccgcagggtgacggtgggagggaagcaggaacacaccaccaccggggaccatatcagcctggtgaaggggacgcacagtctggaggtgaagggggatctggcgcggaaggtgagcggagcgctgggaataaaggtacgaaatgaaatcgtactggaaagtggcggtaaaatcacactgaaggtgggtagctcgtttgtagtgatacatgcgggcggcgtggatatcgtggggccgaaaatcaatcttaacagcggaggcagtccgggaacgccgatgggagtgatgcggccgggtgttctggaggcactggcggatgaaggggatgtaggatgtgggcaggataatagaagctcgagtgatgatggaggtgacgatccggatgatgataaaagttctgatgtgcaaagtttacgatttgctttttatggcgcagataaatctatacagtcaatcgatgaattaattggccagccatatgtaatcagagataataccggcaatataaaagcatcaggaattctcgataagaatggcagaatgccaaaaattattactgataggccgacagagttgacgttgatgctaggtgaagagatatggggctttgagaatataattgttaacgatagtggtgagtcatattttaatgatcacaacatagctgacagcgatgaagataatgaaatctacaatggttatattgatgatgtggaacagtattcttctgaacaatattatcctgcgccaaaatttattttatga

SEQ ID NO: 387087 - DNA, 432 bp, Salmonella enterica
atgagactatttattttctctgttttaattatgcccattttatcatatggtatgtgtataaatgaacacgataaaatcacggttactggtgagttgtttatccaggattttccaggcccgccaaactttgatgatataaataatggtgataaaaaagtaagagtttttatgttacatgttgatagttcgacccgtcttgattgtgtcatagatacttattattctggagataaaattaacactgattctaaaggagaggggtggagtgaatttatggaactaattcctgaaggtgaaatatctcaatataacaaatggataggctctcgtgtatctataactggacatgtgtttttagctgcatcaccttatcactatacaccagcattaatatctgacattttatcgttaaaaaagatatctaaaaaatga

SEQ ID NO: 387088 - DNA, 1647 bp, Salmonella enterica
atgaaaaataaaaaaagagaagttattacggatgtgtttaagagaatggagtactattccagtgaaacgaaaatactgtattatacatccgataatagggtgctaaagcgtacaggtggcacaaggagttggcgacttaacaatcctgggaatatagattttgcggggacaacaaatatacaaaaaggacggataggtaaagcatttattcctgggcagaaaaaaaatgatggggcaaaatttcctgatcattatgcggctgtattcgaaagctatgaggcaggatgtaaggctcaagttgatctcttaagaagaaaatatagattttttactatttctcaaatgacaaaaaaatatgcccctgatgaagataataatgattcagaagcgtatgcgaaagaattattatctgtaacgggtgtttctcccactacgacatttgagaatatgacagatgaagagattgagaaaatagcatatactatgagagtaaaggaagggttttataatacaaatatcccttataccgaagagtggttggaaacaaccaatatattagtttcagatggaaaaaggagtataacaaattatccatttaaggtcacattaggtgataaaacatatgattgggtaacaaatacggttggtaagctacctactatttttcatattgccgacggaatgataatagaaataaaggaaaataacttaacaggtaaagaaaatactgtttataaggcaattgcgggagagcaaacaaaaaatattttattgaaaaaaaattctttccattttacagcatatactttacctgaacaatccagtccacccaaagaaagaaatcaacctgagtcaattatctacactgtccagtcggatgatatatcgcttgatagcattgctatgaggtatgatgtaagtacgtcagatttggcaaaagataatggtataagagaaaataccgaaatctatccaggacaacagattattatttacaacaaaagtgggactcttgttgatacaagagaaaacctgccgtggaaacaaacaggaaaatcatattctgtaccagaatatccatctaggcaagtagaggttgttagaggaaaaaacagtggagatgctcttggtcttattcctgttatccctgatgaagccccttggatgacgatggctataagtgagttaacgaagtttcatgaggtaaataaatcaataattgaatctgttacagattacaattctgaggtgaccaataaaaaagcatctatgaaaactcaggcatggtgtgctgcatttgttaattattgtttatatcatagcgattatccaatgtgggctggcccgacaatagcggtaaatgtttgttcaagtgcgaattttgtaagaatagaaaaaccggtgtggggatgtatagtttatttaacgattagccatgcaacttttttttatggctatgcaaaaaatgtgaaaaatagctttataggacttggcgggaatcagcatgcgactatcagattttcgtcgtttcccttgagtcaggccagattttatctaccagcacaatatgctggtgaacatagaaagtatagagaattaggtatatatgatgtgaggaagttgaatgagttggctcagcatcaataa

SEQ ID NO: 387089 - DNA, 576 bp, Salmonella enterica
atgattaagatatttttatcaatattgcttttctttttttcatctaatgtttttgcaaatgactcttcagatattaaatatgagattcattgggttagcaatgaaaaacattttttggccgttgcgaaaattcatgaggataaatttataactcagcatgatattgatgaaacgaatgttgttgtgtctgcaatggatagtagcagcggtaagcaaatttggactttgaaagatggtgttcctgattgccaagtaaaccatcgattgtcttttatgaataaatatttcgaagctgtaaatttgtttggtggtagtgaacctgtaatcctttttgcttataaaataggatgtacaggggatttggcccctattgatgttaaatatattgctttctataaaggaatgagttattcattacatggttctgaacttctcgttattggtggcgtcgcttcatttaattatggaaatcttgagccacgaccggatagtagattagaagatcaacctgttattttaaaatatatgttaaaaaaatgggcggaagtatcaattactaatatggatatgtattaa

SEQ ID NO: 387090 - DNA, 285 bp, Salmonella enterica
atgcccacagcagcccggctcagtgataaaggcacgcagcacgacggttattacgagaccgtgattactgcgggttcacccacggtatttattgacggcctgcccgccgcccggatgggtgacccgctgacaccgcattcaaaaccggagcatccgccccatccgcgcaagatagcgggcggctccgctacggtatttatcgacggactgccagcggccagaaccggcgatgcggtggactgcggcggcgtggtcatcggtggcggcacggtgaatacaggctga

SEQ ID NO: 387091 - DNA, 129 bp, Salmonella enterica
atgggaggactggatcacctgaatgcaaaagacgggaagggaaagctgtactttgccggggagggtatccagcaacagtgggctatgaagagagatatgctgtcaccacgatataccacagtactctga

SEQ ID NO: 387092 - DNA, 210 bp, Salmonella enterica
atgtttactcatatgcgtattgccaaacccgtcaccaatctcgaaatgtcttttctgatgtacagtcagggcccgggtctgcataaaattgctgaattcaacgatcatgacggtttcaatagaataacgttagggcggggagactacgtaaactatacaaaatcagcttgttatgataaaggtaaaaacggtgggtatagttgcggataa

SEQ ID NO: 387093 - DNA, 381 bp, Salmonella enterica
atggtaagtgctttttccacggaatatggcgtagtattaggtcaggtgaaaaccaacgctaaaagtaatgagattaccgcgatcccggagttgctcaacctgctggatttaaagaaatccctggtgaccattgatgcaatgggatgccagaaaaatattgctgaaaaaattaaagataaaaatgcggactatcttctggcggtaaaaggtaatcagggtaaactgcatgatgcatttaaggaaaactttccgataaaattattttctgattataatggaaattcttttagtacacaggaagtgaatcacggaagacaggaaacacgattacatatagtcagtgatgtgacgcctgaattttgtgattttggatttgaatag

SEQ ID NO: 387094 - DNA, 339 bp, Salmonella enterica
gtgggtgaaaaagatacggatgaaatgagtattcggtattatatttcatcaagagatatggatgctaaagtatttgctcatgcaatcagagcacactggcaaatcgagagtatgcactggatgctggacgttaagatgaacgaagatgcaagtagaataagaagaggtaatgtggcagaaataatatccgggataaagaaaatggcgctgaatttattacgggattataagggcttcaaagcgggtttgaagcgcaaaagaaagaaggcggcgttaaacacatgttatatagaggaagtgcttgcagcctgcgcagcacctgacttcaggaagcaataa

SEQ ID NO: 387095 - DNA, 951 bp, Salmonella enterica
atggatgttgctcatatggattttactgacaaactggagattgtcgttgagaaaacaattgttttattacctgctgacgtaggtcaatatcttcgctcaatgattacaaaagaagcattaataacaatggctggaattttaattgcctgggtcgttgctcatttttttggagttggagaaattgctgattttattctggtcgcaggtggatatatagctttaggagcaacagctattgacgctgcccacaagctatatgattttgctgataaaacctataatgccactacggaggccgatcttgacgaagcagctcataaccttgccgatgcaataaccttaatcggtgtaaatgcagttttagcccttttactaaaaaataaaccaaaagatacatttaatactccttatagaggcaggacatttcccaaaattagtaccaaacaaatcaatggaatgaaaaatgtagcgccccgtactccaggatggagatataaacctaactttacgattacaagagctaatgaagcagggctgggttcaaccgacatttggggaaatgccaaagttggtagagcttatgatcgcacacagaaaacagccaaagaggctattgatgatctacataaaggtatttttcatgaacgggtccaccagtacttttcaccgaagttctatttattacgtgagccattagtatttttaaaacaaagcgggtacaataagtcttatattctacgttatgttgaagaagcattttctgaaacagtcgctttaatgagaaaaaatggtctttctccaaaatctattgtagatgggttgagatttccattaaataacaattatgagctttctattgtcctgctaaggcatgaagcaactggtgttttgttaggccccatcacagtttccagtatggtgtacaatgtgtattgtggagccattaaatga

SEQ ID NO: 387096 - DNA, 270 bp, Salmonella enterica
atgattacaccacagcgtgctatcgacatcgcaaaagattatagcacccgaaaaaaaagacttggctggagtgaaaggaatatttttattgaaagccaaatgatacagggcgatccttgctatgttatatataccagtgacatagatttaaccaagctggactggttagatacagtcacaactaattcttttcacgtatacgtcagtatggtcacggggaaatgtatcggttatgaaattgggaacagaggtatatgctttgaacgttaa

SEQ ID NO: 387097 - DNA, 174 bp, Salmonella enterica
atggatatcggaaaattaatggcacacatatcaattattcctgattacaggcaaccatggaaaatcgaacataaattgttagatattcttcttctgacgatctgcgccgttatttctggtgctgaaggttgggaggtcatcaggattttggtgaaacccatcttgatttcctga

SEQ ID NO: 387098 - DNA, 549 bp, Salmonella enterica
atggctcatgcccggagaaaaatccacgatgtgcatgcaagagcgccgaccgatatcaccacggaagccctgcagcgtataggtgaactgtatgccatcgaggcagatatccggggatgttcagcagaacagcgtctggcggcaagaaaagccagatctgcgccactgatgcagtcgttgtacgactggatacaggctcagatgaaaacactgtcgcgtcactcggatacggcaaaagcgttcacatacctgctgaaacagtgggatggcctgaacgtgtactccagtaatggctgggtggaaatcgacaacaacatcgcagagaacgccttacggggagtagccgtaggcaggaagaactggctgttcgcgggctccgacagcggcggcgaatatgcagcggtgctgtactcactgatcggcacatgccgtctgaacaatgtggaaccagaaaaatggctgcgttacgttattgaacatatccaggactggccggcaaaccgggtacgcgatctgttgccctggaaagttgatctgagctctcagtaa

SEQ ID NO: 387099 - DNA, 1122 bp, Salmonella enterica
atgccattggcaattagtttttttacattccaacaaatttcaattcaagttgactcgtatttatcaaaaaatgagaatataaatataacggattacctttactatattctatttttcccaaaattaatatctggaccaataactagatattctgacttgatgccacagtcaaacgaaaaaagaacttcaagggcatcagaaatcattgctggattgtctatattttcagttgggctatttaaaaaggttgttatttcatcttgtttctcaagtattgcagactctggatactcttcagttgcatcactgacattttttgattcatggggatctagcctggcttacacgatgcagatatacttcgacttctctggatattctgatatggctattggttcagcactccttcttggaatcaagcttcctattaacttcaactctccatataagtctaagaacattcgtgaattttgggataggtggcatatttcattatcaacatggttgcgcgattatgtttatataccacttggtggaagcaggaacggtaatataaaaacatatataaacatcataattacttttataattagcggagcctggcatgggtcaacaattaactttataatatggggaacgatgcatggtgttgcaacatgcatcagcagagcatggactaattatgggatgaagatgaacaacctcttagcgtggttggtaacttttttatttataaatttctcatgggttccgttcagggcttcttcattagaagatacattgcatatttttaaatcaatgattggtatgaatggtatatatttttcacagtctctatggggaatgctttctataatttttgagaatcaatggattagcactggaagaacagatctaaacggagtgctccacgccccaatgtattcaatactactgattcctatagctttattgtcgtgcatttttctacagaacagtaatcacatagcaggaatttatgtaaaagaaattaagtcaccaagttttatttctgttattttgtgcggagttgcattttctttatcaattatttctatgtttggtggcgcgaccgcttctcagtttatatatgcaaacttctga

SEQ ID NO: 387100 - DNA, 1020 bp, Salmonella enterica
atgaaaatcaagctattaatagtgatattcattacctcggcagtacttgttattgctgggtattacggtattttcaaataccagatgggaagatctgttactgctgaatggtgggtagttaacgttcaagacaagaaagagcagatatcaaacgataaaaaatcaaatagaattatctttttggctggatctaatggtctatttggtttaaacagtcatgtaatatcaaatattacaggaaaaaatgcaattaaccttgccatgcatgcttctctagatattagttactacaggatgttgcttgagaaaaacataaaagatggagatatagtaattcttcctttggagtatgaatactatttcagacaaaatgcatattcagaatggtttattaataatatgcttgcatggggtggcgagtacttatcatggcttcctatagataaaaaaatagaatttgcatcacatgtgtcagcgcttagagttattgagggtgttatggctagtgataaagaaatgtttgtaccaaaaaacgttatacacaaatacgaaggaaatgtttcaaataaaaattatggatataattatacaacattgacacagtatggtgatatgaacattcatacaacaggcgaaacatattctgataagctactaaaaaatatagacaacaacccttcttcattctcatacgctaaaagtaatagggttatttctgaatacgcattatcagaattaaataaaattaaagaaatagtcaaaaagcataatggtagcctatatataacatggccggtaacaatgaagacaaagtactttaacgaatcggatccagaatctatagaattcactgataacatccgtaatcagttaaataaaaatgggtttaatactatctgcaacaatttttatgcaaacatcccgagtgatttgttttttgactcagtatatcatccaaacagcgaaggttctgatttgagatcaacatcattagcaaactgtataaaaacaattttataa

SEQ ID NO: 387101 - DNA, 2046 bp, Salmonella enterica
atgtcagacatcacagccaatattgtaattggaatgccctctcagttgttcacactggcccgctcatttaaagccaacgctaacggcaaaatttacatctcgaagattgatacgccgccgggagaaatgacagatcctgacaattatgtgcaggtataccttgagaatgaagatggtagccatgtacctgttgctcagccattagttattaattctggagggtttcctgtttacaacggtcagattgctaagtttgtaaccgtagaaggccacgcgatggctatctataatgcatatggtgggcaggagttttatttcccaaatgtgcttaagtatgaccctgatcagttctctgtcgacttcacagcgcaactggcacagactggtatttatgctaatgatgataccaaaggcgacgccatgataggcgttaaacaaccaattggcgggtcaatacacagaactcagcatgatgtaaacgctgaaagaattagcgctttagatttgggggtaaagggtgatggtattactgatgatgtcacttcgattagagcagcactaattaccgccgcaacagcaaagcgagctatccattttcctgatggtgtttatttatgtagtgactttttttcaataccaagccactcaaggatttattgtgatcctggtgcagtttttaaacttacaggtagcactaaccttgggggattcgctgtaacaggcatcaataatcaggtgcagccagagctatgtgaagatgttgttacgtataacatgaccctggactgctctcgtattgctggagaaaacggaattaatggggttatttgtaaaaatataaggcactataaccccacggtattaaatacattatatgattctgttaagctaggaggaagggcctttcagtttgagggaggtaaaatagaagatgtaaatatttttaatccgataatacaaaactgctctattgggattaattcacaggggattcctgatgtattgaaaaatgtaagagcattaagttaccactctgtcgcaatgttgaatgtagatattccttttaatattgattctcaaatctcaaccccgatggaaaatacttcatcgtcaatgagtacgtcagtttttggcgcaagcctgcataactgcggaagaattacaggtgggtatggtactgcggccacaaatccggatcttggtggtggtattgtatgcggagatagagggtatggcctttacattgatggcttaagagttataaatgatgatagttatggcggtattggctctgtttttaaagggcagatgtttggagttactgttcatggtttagaattttacgggagatatgctgttacagtaatagacaactcacctgttggtttcggaaatccaagtcaggcgtcatatcccagccagatttcaatagatgggagagtctatacagatcttgattatatatggactgctagtgatgtatccgcaattggtaatggaagagttagattatgtgttaatataccgatcgccacacttagccatctttttgatgtgcatgcaggtggtagcactagcgcttggatagagctaattaataccaatacgaactacagttcagggttaaggacgttaaaaaatatttatgatagtggtaattctattggtgttatagataagtataactcaaatggtacgtggactccaattgatggaagcggtgcgtctcttgctcttacattaagtggccctcaacgttattacaaagatggaaatatagttcatttttccatgaatatacgttatccgataacatctgatacttcaaatgctgttgtgtctggtctgcaaattctttctagttcatcgatggctcagttttctggctcggcttcaatcgctataaagtcattatcttctctgtcttctgctggagtggtatctggttctgggaatatagcattttataattcatcagttggtcagttaaaaaattctgatctatcaggatcaacaattacgatttttgggtactatttttcataa

SEQ ID NO: 387102 - DNA, 429 bp, Salmonella enterica
gtggactgtctgcgttcactcacgtttctcagcgagtggacccggacgggccacccggaagtgccgtgcctgctgtggggcagaacggcgttaatccgcggagcggagggcggggcaccggtcattccctggcggctgccgccgttccgcctgcggggcgcgataaaccatggcgtgcaggtctggcgttcccgggtaaaaagccggggtacggtccgttaccggatgcggttgtcgccgcgggagatggtcattctccgtcacactctggagggggcctcactggagcagatggcagcggtactgggcgtgaagccgaaaacggtgtggacacaccggcggcatgccatggatgtgctgggaataaggcgcctgtccgacctgatgcgcctgccgcaggccgtgttccgggagataccggcgtggtga

SEQ ID NO: 387103 - DNA, 504 bp, Salmonella enterica
atgaacatgtggagcgtacacgataaaacggagttccgtgacggctggagtctgccgccgggcatggcggatatggtggacgcgccgttgtaccttgcggtgtccgtctggggactgcgccaggcgcggataatcacaacagaggatatctgccgcggtttttgtatcacccggcggcgagccggcgacatcctgcattatattgcccacgaagggcggcggtgggtgaccagtgagcggcatgtggttatccgggacaaccggtggcgccggacggggttacgtatccgggctgtgaccctgccggatatggatgaatgccggccgcgccgacggaaaacgccggcggaacccggaagtacgcccggcaggaaagcgacagagcgggagggacggcagacgcggataaaagcgctgagaatgtggatggtacagcgccgtccgggcgagcgggttccggcggagcttctgccgggacagtcaccggagccggaggcggtatga

SEQ ID NO: 387104 - DNA, 168 bp, Salmonella enterica
atggaactgaggcggtggggaaagagcgggaagcggggaaagaacgtgctccggcagtggctgcaggtggcagccggattactggttatggtggcgggctggctgctgctgttgtgggtggtgagtgaaatcatgtcgtatccgggtgcaccggggttcctgttgtga

SEQ ID NO: 387105 - DNA, 354 bp, Salmonella enterica
gtgcaaagaagatacaccgggggagcaaggatttttatttactgttgtatttttgtctgtctgctgacggcgggagcggtggtcatacagttcaccggtatggcggagccgtcccggtcagggagagtgtttgaggtggtcaggcggccggcggtcaccggttacattcgttgccggtatgaacggccggtggcgactctggagagtgatgcgctggcgcagggggtggcaggcatgaggggcagtgcggtgtgtctgctccgggaccgggtggggagctggcgggtatacggaggtgaaatagtggccccgggcggggatcagacgggtgcggcgtggacggaggggaagtga

SEQ ID NO: 387106 - DNA, 402 bp, Salmonella enterica
atgaaattacgtgaaacggtgaatgcccggctgtcggaatggcagaagggttgccggctgatatggcatgaatggctgatactgtttctggtgatctgtattctggtgacagccgggggggctggacgaatgaatatgacccggaggctgttttttattacgggggcggaaagagaccggacagcggacgttaaaccgggaactgttatttatccggaccggaatatgaaaccggatacggatcacagatgtctgccacagcccgttgtcaggataattctgcagacgatgaagatgcctctgaacatatattcatcatctgatcacgataacatgcagaaattaccctttaccccgggcggagggaggggggttattcaggctctgaaatgcggcagttaa

SEQ ID NO: 387107 - DNA, 783 bp, Salmonella enterica
gtgtttccatgctcccgatgttccaggacgttcgcctacccgtcgttactgatcaaccatatgcgctttcataccggcgagcggccttatgtctgtcagacctgcgatcgggcattccagacatccagtaatctaagccgccatatgcgcattcataccgacgagcggccttatgtctgtcagacctgtggtcaggcattctatcagcgcgctcatctgaccgttcatatgcgcattcatactggtcagcggccttatgtctgtcagacctgtggtcaggcattccagacatccggtaatctgaccgttcatatgcgcattcataccggtcagcggccttatgtctgccagacctgtggtcaggcattttgcctgcgctttagtctggtcaggcatatgcgcactcataccggcgagcggccttatgtctgtcagacctgcgatcgggcattccatcagcgcggtcatctaagccgccatatgcggactcagcacagtgccatgcaggcagacatttctgacctggaaccgacaattccggctcactggctcagcgagagtaaatttaatgccctggttgaggatctgcgacgaactcctccatcgagtcctgcgttgtcacgctggctcagcgagagtgaatttaatgccctggttgaggatctgcgacgaagccctccatcgagtcctgcgttgtcacgctggctcagcgagaatgaatttaatgccctggttgaggatctgcgacgaagcctttccgggtggtcagggatcgtcgagtag

SEQ ID NO: 387108 - DNA, 456 bp, Salmonella enterica
gtggacatcaaatttaccacggaagccctgcagcgtatcggtgaactgtatgccatcgaggcagatgtccggggatgttcagcagaacagcgtctggcggcaagaaaagtcagagctgcgccaatggctggggggaaatcgaaagcaacatcgttacggggagtcgccgcagaccggaagaactggctgttcgcgggctccgacagcggcggcgaatatgcagcggtgctgtactcgctgatcggcatatgccgtctgaacaatgtggaaccagaaaaatggctgcgttacgttattgaacatatccaggactggccggcaaaccggggacgcgatctgttgccctggaaaagctgccctgacctctcagtaaatatcaggcgagccgcttacccagtttcatatttacggcaaagattacggtatctcctgcgaagcaggtacctgttttattga

SEQ ID NO: 387109 - DNA, 1392 bp, Salmonella enterica
gtgcgctatctgccgggccttgagctgcggcggcactggcaggaaaccatcaccggcgataccgtcacctcgcaggaggctactgaagagctgcatgtgataaccacccaagcgggacgcgccggtatccgggtgctgcactggaaaacaggcaaacctgacagcattgataatgaccaggcacgctggcagataagcgataatatttatgcgctggaactggatgcgcagggacaaactatcagtcgcgaagaatattatcccttcggcggcacagcggtgtgggcggcgcgtagtgaactggaagccagttataaagtgatccgctattccggcaaagagcgtgacggtactggcttatattactacggctatcgttattacgctccctggctgtgccgctggacagcagccgatccgggccaggaaatcgacgggctgaatttgtaccgcatggtgagaaataatccgctcacgctgacagatgagtcaggcctggcgccaggaggtaactctgcacaaccttccgcatctgaagaacgttttaaatcacttgtccctacccttataaatattgtcagagcgcaaattagtgacgcacgccaggcactggaaggcaatgccagagtggtaccccaaaatagcgggtgggcgtacctacagaatgtatgggagcgatggaatccattgaataataatccatccagtagcacaaacaagcctaatgagattaacaatgaaaccagatctcttattaaagactatatgggaaatgattcaaaggaaacaataaaaatattaaaagatgccttagagaaaatggatcaggctgcagcggcattaaatgaaaactcattccgtaacattaatgaagatccctatacaccccaaaatgctgcagcatgcgtcggacctaatgaacacattttatatgataccacaaaaaatatcagcatatatatcaattacgaggagacagggaaaagacatttatatgatatcgccacagtaatcattcatgaaatgacccatctcgttttaaaaaccaaagattattgtaattcacaaacagtaccgtttcctggtcaatttgatggaaagagtacgaaaaaattgcggcaatatgccaaccagccgaataacacacctttaacgggggcggataatatagcaaaccttattagtttactttattactcacaagccggcgatacacaaacaaaatctttatatacacgctataaacagagcttgtcgaaatcaggctggcaggagtcattactggattttagcggcgcaatgccagaggtgagctggccacgggtgaattctgctgaaatccagcgacgagtattacccgtctcccgaataaaaccggcatcagcccactaa

SEQ ID NO: 387110 - DNA, 273 bp, Salmonella enterica
atgaaagacagttctgggattcagtatacagagattggtatcgggttacttaataaagagaaaaaagccctggagaaggagttatcgtctaagtataaatcaacaaaagaacaacttttaattcttgataaagagcttaataagaggcgggagtctcttgttattttggaaagaactcttttattaatagagaatgaaatccgtcgtgaaaaaccgttttatgataaaataattaaattacatccaagggggctgtttctgatatggaggtga

SEQ ID NO: 387111 - DNA, 516 bp, Salmonella enterica
  misc_feature (61)..(70): n is a, c, g, or t
atgaaaaaattaacctcaatggaattagatttaattgcaggatctggtatcggtcttggtnnnnnnnnnngtggcgtagctcttggagaagccttggatcatgctccagctgaacatgtaactcactcaggagtcacacatgataaagacattttaaatattgacatgatatctgcgaatatggatatgcatgatattcttttccatcacggcaattcagtgggtttgcagaaagatttgaatgcccttacttcagatcaacgtgttcattatgatgttcatctgggaggatatctggctggcccaggaacattatttcatgatgatgtccagataaaaagagaccctgaagttttaaatattgatacttattctgtaaaccttgatcgcagcgaaattttatccggacatgcaacaccatctgatcagactgacatcaatcaactggttcatgatcacagaactcattatgatgtcaaggagggtaaatttgttgccgggcctggagaaagataa

SEQ ID NO: 387112 - DNA, 1089 bp, Salmonella enterica
atggctataaataagttattgttttgtatgttgcccgtttttctttccttgtctgtcgcgagcgaagcctgtacgactttagcaattactgataagcaaggagatatatttcacggtcgtactctggaatatatgcaggatttaccatcctggttaacttattacccagcaggaacctcttttcgggaaaaagctcccagaggtaatgaagggatgagttatgtttccagataccctgtccttgcaatcacatctactataactgacggcgacagtcgggatgtactggaaggtatgaatagtgaggggttatcttttagtgaaaatatgattctcaatgcagagctcagtactgtttctccttcagattataaaaaagcaattccggttacatctttaggtcagtgggcacttgctcgttttgcatctgttgacgaagtaaaagaggctataaaagagggaactttctggtctcctgaactaaagcgttttgggaatttaaaatcaccattccattatgcattttatgataagaaaggcggtagtattgtagttgaggtggtatcaggaaaacttcatgtatatgataatccaacccgggtgatgactaatggtcccgagtttccctggcatctgacgaatctcaataattatacccatttaactaatatagatcgttcatctggcgaacttggtaatattaaagttactcaacctgatagtggcattgctatttcctcattaccatcttctgatacttctgtagatcgttttgttcgtggtgtatattatacaagctatgctaatcaggcctcttcagatcatgaggcgatcaacacgttggctcatatcatgagccgttttgatcgccctaagaatattacgactgataatcttggaagtgagggggaaggcaattcggtaggaaaacccgtgtctgaatatactgtctggacaactttatcagatctaagtcatggtgtcatgtttgttcgtggttacaatgatataaattaccagaagtattcgattgcacagtttaaaaacgaagtaaaaccagtgtttcagaaaattaatattaagaattaa

SEQ ID NO: 387113 - DNA, 393 bp, Salmonella enterica
gtgtacgatgcggaaggccggatacaacgcgccggttactcgttgtgtttgctgctggaacgccttcaggatgtactgcgccgccgggacatctggctcgaaaacagcgatcgctggggtgatccccgagagaagctgttgcagggtgaagagtggcagattcagcgtatctctgtttgtcgtgcggcaggacatcccatcgatgggcataaaggcgtgcagcaactggccgttcagctggatgaaacctggaaagctgtcacatcccgatttgaagggaatgcggaagtacatgtctgcaatgacggtaaatatccttccctgactatcagtagtctggagaaactggaggagccaccgttgttgctttgcctcaacagtcgggtcagatag

SEQ ID NO: 387114 - DNA, 396 bp, Salmonella enterica
atgacagacaccgcagctaccagcgatattatttttggcctgttctggttgctgggatatcagtttttgccccggcttgccgatgccggcgaagcggtattctggcgagtggataaatcggcaaactacggtgcactggatgcgctggcgcggggatgtgcagaattgtcgaaagcggagaatctgtgggatgagatgatgcgaaccgccggttcgctaaagctgggcaccatccatgcatcagaactcattcgctctttgctcaaagctcgcccccatcaggactggcgcaggcgatcatggaagtggggcgcgtcaacaagacgctgtaccttctcaattatattgatgatgaagattatcgtcggcggatcctgcttattagacgtcaactag

SEQ ID NO: 387115 - DNA, 261 bp, Salmonella enterica
atgaaaattgtctgtcatggttcgcaggaactgattagtgccatccgtaagtggcatcagaataaagtcgggcagttgaatcttattgttgagcacagtgatgctgacctcgattttggtaatggcactgttattaaagctggttcagatgcggcgaagggatttcgcgtttgcgcaatggttgttctggaattactcagtacgctgccggagtttgaaagtatcgaatttggtgacgatgagggccgcgacgatgaataa

SEQ ID NO: 387116 - DNA, 378 bp, Salmonella enterica
atgaaaacattaacgcatgaacaatatttagcgctgatttattcccagaatgttaagcgtcaggattatgccgttatctgcccgatgtgcggcaccgtacagtccggccgtctgttgtttttgtctgctgctgcgcctgattttgacggtgttttccggtatctggggttcagttgtgtggggcgctttaccggtaaaggttccccgtctgtcgaaaaagggaaaaaccacggctgcgactggacgctgggtggtttacttcacttccacaccatggaaattgtggatgcgcagggtgttaaacacccggtgtttgaacccgccacaccagagcaggcccgcgaactggcggcacgtctgggggttatttatgagtaa

SEQ ID NO: 387117 - DNA, 390 bp, Salmonella enterica
atgagcgttaccattattgaagacatgattgggcaaatttttgatgacgctatggtgaatgaagataaaacagaactggtatttcgcagggattactggtgtggtgagtgggggtatgtttttaccttctttcatgagcaggattgttgcgaatctgtctggattgaagatattacgggcgacctggatgacctgaccgattctgtcatcactgaggctgaggtcgtaacagaaacccgcgataccgacgaaggcaggcagacctggagcttctttaagttcggaacgaaaagaggatgtgtgactgtccggtggtgtggtgaaagcaacgggttttattctgaatccgtgtcgctgaaaatcgaaaaggcaaaagtcatcaccttctga

SEQ ID NO: 387118 - DNA, 144 bp, Salmonella enterica
atgcatattccgaatccggtattacgcggtggtcgggtggtcagtatcgtggcaccggcgcgggattttaaatgtggctgcattgtggaaataaacgttgagccttatttcgtaaaggtcgaaacgctgaaatcaccgcattaa

SEQ ID NO: 387119 - DNA, 237 bp, Salmonella enterica
atggcgatgcgtgtgaatgaacatgctgcaaaaaaccagtatgccgcgtatgcgctgggtgcgggccgggcggaacgtgatggtgaatacgggaaggcggcagagttgtggcgcagagctgcgaacgctccgtgtaatgcgtcaaagcaacggtgggcgcagcgccgcgcagcattctgtgagaatgcgcacatcaaaggctggagggcacacggcgataaatgccagacggtttaa

SEQ ID NO: 387120 - DNA, 201 bp, Salmonella enterica
gtgggtattcgtggtgtggaaacagtgcttgaaaccctgcgtcggctggggcttgagcggttcatccgtaccaaagaggaaatcaataaggacgccattctgagcgaaccgaaggctgttgagggcgtggcaggcatcaccgttcgtagcggtgttgaggactttgccattacaccgtttgagcagaatacgggggtctag

SEQ ID NO: 387121 - DNA, 147 bp, Salmonella enterica
atggcccggtactatggacttacaatcggagtgctttattaccttaattatcaggtgaattccggggcgcagcgttgggggacgtttttcgttgcagtgataatctcttttgtttttggcgttatggttggccgggggatcgcatga

SEQ ID NO: 387122 - DNA, 216 bp, Salmonella enterica
atgttcagaacgacacctgagcgtatgaacaataaacacgggcattactatcaacatgatggctcagtttacatatgccggtattgcggaacggcggagcatcgtaacggcacctactggtgggcgggtcgattttcaaaatgcgagccgccatgcggtgatgatgttgcggggcaggatgcctggtttgatgccgcgaaaagtgagggcgagtga

SEQ ID NO: 387123 - DNA, 372 bp, Salmonella enterica
atgactgttaatcgctttaaacccgtcgcatctgtggccatcagtctgtcggagaatggtgaatacgtgcgttatgaggattatatagcgctgatggatgagctggaggatgtcagaaagcgcaccgaagaactggaagagattgcatcttattacggtttgaaacttaagaaagcgcagatcgcattaaaatttgcggcgttacggcataaaaactcaagcaagcgcatagcagaactggagacacgagcaattgaacttcctcctgcatggtgggtaaggcaaggaaaagcaccagagtttttagcttaccctataaatttagtaatcgacgctatccgcgccgctggcatcggtgttaagggggcgtaa

SEQ ID NO: 387124 - DNA, 276 bp, Salmonella enterica
atgattgacaggatttacgtggtgttaatggtggggctgtgcatcgtgggctggctgtacatcatcgctaaagcgtgggactggtttatcggtatcgcctttcgtcagtgggataaacgccggaaactggagtgtcagcaaaaagcggttaatgcgttatatgacgctttcgggcttgaccgactggagccggggagccgcatcaccgtcactgccggggcgtttcttatcgttatgtgccgtcgggaaaacaagggggagcatcatgactgttaa

SEQ ID NO: 387125 - DNA, 225 bp, Salmonella enterica
atgaatattgaattttataaccacggggtcactgcgaccatcatcgttaacggcatgttctgggagttcgggcgttactgccgggttgtggatgcagcgctgtttgcggctccggaaagcagataccagagcaagtgcggcatttttatgaaaacggttatcacaggtaagacggtgcccatgttacgggcggtgaaagtggctaaacaggaggcggcacgatga

SEQ ID NO: 387126 - DNA, 219 bp, Salmonella enterica
atgctggtctttgtcagagaggcgctgtatcagccacccggccagcgccatgaataccgtctgagtgatggctgtgtggcggtggagttcccggcgctgccggtgccgtcccgctggaaattctacgataacggcgggcaccgcatagtgaagaaatccatgcaggccgcgatgaaagcggcggttgagcgtcataagcggaggtttaactgcaaatga

SEQ ID NO: 387127 - DNA, 561 bp, Salmonella enterica
gtgcgggagtttgccagcacgggtgcgccgagcgatgcgcgcagcgtaccgcgctatatgcatggtctgtgtacgctggtctgccgggccttcggggtggagtgctacatcggtggccgctggcgttcagctcgttcccttaagcgttacgttaatttctacgggcctgactctcgccctgagattgcggcgtatgcgttcgatgtgctgtcccgccagatgaaggcagcgcgtaaggcgtatcaggacaggcactgcaaacgctgtaagcccgccacccgcgtggcccgtggcgaccagttctgtgagggatggtgctcaggggcggcgcgggtcattcaggcattcagtgtgtcgccgcaggaggccggtctgatggagcgttacacgcagcggctgcgtgaacataaggatgtccgggacggtgagatgcgcgaggcgaaggactgccggggcgcagaccgtgcagcgactgccggatattacgagggccggaacgcgaagctgcatcagggtgttaacgggcgtggtgatgcgccgctgagtatcgggaggtcgtga

SEQ ID NO: 387128 - DNA, 1047 bp, Salmonella enterica
atgggtaaggacgcagcaagacaaacagcagatacagccggacatgatggtccaataacttcaggcagtagtaatgtcttaacaggaggttttcctgctgctcgtatgggggatacttttgtttgtaaagagcatgggccaggtgtaattagtgaaggttctaaaacagttacaataaatggaatgcccgcagcaagaaagggagataaggttgtttgtggtaaaaaagcgttacctccgacacaagggccaaagccaccagaatatcattatgtgacgatagctaaaaatacaaatgaagatggtacggtaaaagtaaaaaatccaaatgaatttcagatgattattttattagcctcatcacaattatcagattcagatggagatgggaattttgatactgcaaatgttaaagctgttgttgaggagtttcaattaaaccaccctatggggagtagtggtgctaattttaatttgggaggtgttgttggcaaggctgagatgagtggaacaacaatagcaaatgatgaacaattttcttctaaagctaacttaaaattagagggggtttccggaaatatcggcgtaagttcagggaaagagggaagtggtgattatacttcaggaaaggcagaagggactttaggctcagtggacgcaaaaggtgatgttaccataacatatgacagtaatgagtcactttatggatttggcggtgaattaggtgctgaggcagctgctgcaaagggagaggtttcagcagcggtagagtctaaatattttagattaaaaggttctcttggtggcagtgcgggatccgtggggctggctggatctgctggaggatggttagatactgataatataatgctaaaattaaaaataggaggtgaagtggcactcgcacttggactgaaaggtgatgttgaggtgcaatttggacctttttatgatgttcctgttcctttgagtgaaagattaggggttacttcatcaaaatctggtatagtattatctggtatgtcaaatgttattattggtgggtga

SEQ ID NO: 387129 - DNA, 636 bp, Salmonella enterica
atggggcgtacctatcatcaggacaaccgctcgccggggagtctgccggggacgaagacgcagatgacgatacgctcaaaaacctacaagggagacggttttaacgagctgcggtttgaggatgcgacggggaaggaagaactgtacatgcacgcgcagaaggatatgacgacggaggtgctgcatgacaggacgacgacggtgaacaacaaccatacggaaacagtggtggtgggacaggttgtgaacgtggggagtaagaaggaaaacggccacgaccagaaaatcaccgtagcgaatgatcaaaaaacaacagtagttaataatcagatcaccgaaattacggaaggaaataaaaaaactgatatagataaaggagatcaggaaattacccttcatgaaggaaagcaaacaataaaagtaaaaaaaaccatcagcgtttcttcagaagagaagatagaatttatttgtggggagtcgagtattaccttactggaaaatggcgaaattacaattagtggaaaaataattaagaatgatgcgaaggatgaatatcatgtcaataccaaaaaattatcagcagatggcagtgaggagcaggtgctgaccggtggcatattgaaattaaatccataa

SEQ ID NO: 387130 - DNA, 627 bp, Salmonella enterica
atgaaccatatgtacatggctaatcgattatttattaatttttttcagccatcgttcaagcttctggatacccaacgcattggaggaaaaacggttcgcaggcatgatgcgcccaaaacaccctatattcgactgacagagctgcatactctgcgtcctgagctccggtgccattttgacgatatcatccacgcacttgatcctctgaagttgctggaaactattcgacttcatcagcaccaattggcgcgaatcgctgtcggagatcctgctggagacaaaaacagcaatttaaccgcgtttttacagggcctctctgcagcctggcaggagggagctgtgaatcctttgtatcatccagcaccatcaaaacctcgccactggcgaactcgtgcagatcccttcgcggacgtctggaacgaaatagaacgctggcttaaagatgagccgcaactgggtagtaccgaattacttctcaaacttgaagacgcacatccgggccaatttactgaaggtcatcgaagaacactgcaacgcaggttgcaggaatggcgagtcaaggtggtcagagaactggtctacggaactcgtgccgatggtaacattttagctgaagcaagaaagtaa

SEQ ID NO: 387131 - DNA, 867 bp, Salmonella enterica
atgagcaatgcattgttgcctatggatacccgtcgtcagcttctgagggcgctgaaaacacgctatcaggcagccagtaaagtcgagaaaacccggatcctcgaagaattcatacagatcagtgggtatcatcgtaaatcggcaatccggttactgaatggtgcagtcaccagcggtaaccaacggcgtcgatcagcctcggttcgttcggtttatggcgcagctgttcagcaggttctgatcgtgctctgggaagcttcagaccggttgtgcggtaagcgtctcaaggcgttactgccccagcttattccggcgatggagaaacacgggcatctcagtctgaatccggcactccgcgagcagcttctgaaagtcagtgcatcgtccatcgatcgcctgttgaaagaagcacataccaccgccggtaaaaagcgtaaccggacggttaaccgcgtcagtaaaagtatcccggtcagaatgttcaccgagcatgagcggcattctccgggatttatggaaatggatcttgtggcgcactgtggccggcatctctctggtacctttttgtggacactgtcgctgaccgatatcgccagtggatggacagaatgtgtggcattaccggcgcgtaacgctgagttgatcatccgggccgttgataaggttcaaaaaagtctgccattcccacttcttggccttgatgttgataacggagccgaatttatcaacgaagccttgtttgaatactgttctgcccggtgtatcgcgctgacccgctcccggccataccggaaaaacgatcagggcctggatagagcaaaaaaatggttctgtggtcagaaagctggcgggatatggccgtcttga

SEQ ID NO: 387132 - DNA, 414 bp, Salmonella enterica
gtgttggtaaaaattaagagggcaataaatgaacgtttgaattcgaaaaaacaggtaatcattgattatggttttattatggaaatcaaatcagtgataaaaagggattcaagactaccaaaatttaatcgctttatcgacaaatttaatggattggggataagcgtacatgatatttatgctcaacggatcagtcttgctcgattacagcgttacgcgatgtcatgggaggggttgcttttctttaaagggcaggatcattttggccttggtaaagaagatattactgatgcactttataataaatttcgtttttttcgtatctggttttttctacaacgtcatcgtgattatgcgtacaaaccgttcatgacaaattttagtgcccatattcgtatcaatggtagagtatga

SEQ ID NO: 387133 - DNA, 525 bp, Salmonella enterica
atgaaagtgaaacataaagcagttatcgctagtttgataatattggtctgcgggtatctgctctggactcaacgcccggtaacaatatttcgggctggaattcaatttgaatatgatcctacgttttttcatgggctctatgtcagcagtaaacgagggtttattgacaaggaatggtacgatattgcagttgaccacatggcattaacagaatgggggaggattcactggtacctggaccataaagctgaactcaagaagaaataccgtataccaatgactacttcatatagtattgcttttatgggtattggcagcgggtttatcgatattgataaatcaggtgatggtgatttattttgtttctccccccaaaaaaatacaaaagaaaattgtattgaaaaaaatatgctcctgagggtcgattttgacgcgggttcttatgaacgattttctttcggtgatagtgattattactggattactatgccggatggcaaacttgtaagaataaaaaacgcataa

SEQ ID NO: 387134 - DNA, 1002 bp, Salmonella enterica
atgcactacgttggtattgatgtcagtaagcgctctctcgatgtttgccttctcgctgagggcagcaaaggtagtcgtaagaccaaaactttatcaaacggtcaggattccgcacagaacctggctaaatggctaatactccagaagtgtgaactcagtcagacccacgtaattatggaggccaccggtatttatcatgaatatctcgcctgtggccttcatcaaatggggattctgacatccgtgataaacccctgccgcagtcgcgaatttgctaaagcaatggggatctttacaaaaacagatgcggtagacgcttatgtcctggcattttatggttgcctgaagcaaccggaggcctggacgccccctgaggaagaggtccggaagctgagagcattgctgcaacacagagatagtctgctaaatgataaactacgaattgataatcgcctgaatacattgaaatctacagaagcagttcaggaggtcatggattcattgtcgttagttaatcaatacctgaaaagcgaagttgccagaatagaacgtctgatatccagccatatagcgcaacatccaggattaaaacgtgaccttaaacttctcatgtctgttgatgggatagggaaacaaattggctggaacatgctggctgtattgcgaggaaataattttaagagcgcagaacaactggccgcttatctcggcgttgttccggtcgaacgccgctcagggacctccgttcatgggcgagcccggctatcaaagataggctcatcaaatatcagagcaaaattgtacatgggagcactgacagcaatcagtaaaaatagccatattaaagcgctctatgaacgtctgttagcaaagggaaaaatgaagatgtctgcattaggtgcggcaatgagaaagctggtgcatctctgttatggtgtactgcatacgcagcaaccttacgatgaaaaatataaagcaaaaataattaacttcagctcttga

SEQ ID NO: 387135 - DNA, 882 bp, Salmonella enterica
gtgacgttcagggacagcaacggtttgctgacggagatggaaatcctgtttctgaagttcatggtcagggattacagggatctaaccggcaaagatcttgggttgataatgcacaatatcgtgagattaaacgatgatgaagcggcagagctccgtagccggatagaaaatatgtccccgagatctgcggcaagtacattcgatatgagtacggatcctgctcccatccacgagtggcttgccagatttcaggaaactcgcctggaatggcaacgtcctgacgataatgcagcattgccggcgcctgcattaacatctggtgatgacctgcccaaagcgggaaactcaaagataccccttccagcgattacaccggaattgctgatgtctcaatttcctgatatgtccgacgccgacaggcaggccctggaatatatagcggaccctgaaaacttttcccatgttttacattctgatggcacggttctatctgtcagtgagaacgggcctgcggctcattttaaaaatacctatataccacatacatggacatttaaatataattttaaatcacctggagaggattatccttattttgccagccatgtcgcgcaatatcagtatgtgctggcagcagtcgctggtggatggataggacagatgccagtaacgttgatcagggataatgtcattaatcaggctacattaaataacactgaagggttgaagggcgaggagttaaagacggcttttcttaataacacgccaaatggaaaatctaccgctaagattttggaggcttttaatcttgaagccacgtcagttaaagtggaagaaattgatggagatgccaatttttatgtaaatttaaagcgtaaataa

SEQ ID NO: 387136 - DNA, 873 bp, Salmonella enterica
atgataggtacgccccatgatgatgggctggtccgggtcgccgttcagaaagtccacgataacctcctggcccacacgggggatggcaaggttgccgaaccccgttcccgcccacgcctgcgacacccgaacccagcacgaactgtcctcgttccccgggcagtatcgatcccagtggaaccgcacccgcacccggccatgttcgtcgcagaagatttcctctcccgccggaccggtgacgatggcgctctggggaccgtccaccgacggtttcggctgtggtggtacacgccatgtcctgtccgccgggatagcctcgaaatgattatccagcgtcgttccctgtcctccgctgccgtgcagcgcctgcggctggtcgccggccaggacactgctcaccacctgccactcccggttcagtgtctccgacgggtggcctgtcagcgtgaagcgttttcccggacagagttctggggaattactgatgcaggttgctgtctctgtatcatgtcgccagccctctatctggtaacgcgcaaatgcctccccatgcgtttcatccttgaatcgtcccggatagtcaaagatttcatactgtgtacgctgaccgttcaggttctctgcggcacggttgtaataacccggccagcccggcgttttgaaggtatagtcctgggtttccaccgacgaaggcccggttcgcgcccggtaacgaaaactactgatacacatcgtggagacttccgtatccgtgttcggattaaacggcatctcacccagtgtcgataccccggccacatcatcacacagcaccagtttctgcgcggctccttgtggcgcgtgccagtcaaagtagaagatgccttcttctga

SEQ ID NO: 387137 - DNA, 975 bp, Salmonella enterica
atgattcagcttcattgcggtgactgccttgaggttatgccgaaaattccggcaggctgcgtggacctggttttatgcgacccaccatacggaaccataaaggggctttctgttcgcgggtggagcgaggagacaacggcgtgggatagcgcgatcgcgccggagaagttgttttctttgtgcgagcgtgtattgcgagcgaacggggcgctggtgctgttcgctcaggagccgtacacaagtcaactgataacccgcgtacacgggaatctgcctttttcgtaccggctggtgtggaaaaaggagcatttcgccaatccactgactgttcgtaaggcaccggtatcgttgtttgaggatgtgctggtctttttcaaaaaatacgattctgaaaaaacacaccccctcagggcgtacagtcgtcgtgttctggaattcatcggcctgaggtcctgcacggctgttaacagggttctgggtcacaggcgcgcagagcattttttccagttcgatacattgcagtttggtttgtgtacacgggagacgtacaacgagctgatttcctgtttcggtctggagctgatgccgggatttctgacatatgatgagataatcgcggtacatcgtcggatatccggcagggtgtttaatttgccgcccggacagaaatataaaccgaatgtgctggagtacaggcgtgagcgtgaacgtcatcatccgacccagaagccggtcgcattactggaagatttgatatgtacatacagcaatccgggtaacactgtgctggatttcgcgatgggtagtggttcgacaggtgttgcctgcgttaataccggcaggcgatttactggcattgaaaaggttccggaatattttgatacggcactggcacggattgacggtgcagggatggtcaggaattcggctgactggcaaaacataagggaaaatcacaagaacctgaaagaataa

SEQ ID NO: 387138 - DNA, 276 bp, Salmonella enterica
atggttaaagttgaatttgtttttacgtcactgaaaagcgataaatccgttcaggggggggtaaatgctggtcttgcggtcgaggtgaaatccacggggctggatacgcctgctgatagcccggcgcatgtattcggaaccattcttatgcataagaaagaggaggttttaaaaattgtcagcgatgagttcgcccgcgcctgtgaggcgtgcgggttcagcgtggaatctgtatccatgacccgagggcacgcggggaataatactgttaactga

SEQ ID NO: 387139 - DNA, 252 bp, Salmonella enterica
atgggtgtaaaagtggttattgagttcagggaaaataatggtgcaatgaagacactgacccgtgtacagggtaatggccaggaaacatcagaggaattaaaccgtgcgatggctatggcgaaggcggctaacgcggttatgaaagaaatgcataacggtgaaaccctgctggaaaaagcaaatgatgaacgtatccgggaagtaatggcgcgggattatccacaacatggcaatggcaacagtatccattaa

SEQ ID NO: 387140 - DNA, 186 bp, Salmonella enterica
atggctgttaaatttgaagtgattattaaagaacttgatgacgggaacggcgtttatgtcgcctgtacaccgtaccgttcgggggatggtgcaacgccgcgcgaaaatgatttgggtgaatggctccgtgataccgttgaagagttattcaaagacaaatgcaacgcaattgaaaatgttcattaa

SEQ ID NO: 387141 - DNA, 219 bp, Salmonella enterica
atgggtttcatcaacatcgagcagaaccgcatcatcaaaatcttctcggtggtttccgtggtgtttctgccgccaacgctggtcgcttccagctatggtatgaacttcgaatttatgccggaactgaaatggagctttggctaccctggcgcgattatcttcatgatcctcgccgggctggcgccgtatctctactttaagcgtaagaactggctgtga

SEQ ID NO: 387142 - DNA, 477 bp, Salmonella enterica
atgaagaataaatgcggaaaaatagcgctgtgtttatttttgttggctggcgcttataatttatggaccctgcgtccggttaaagttctgtatgcctattcagattttggctcgacagtttttctggttgtggatcatctgccatggactgacaaagataaaatcaggtggtacctgacgcaccgggaagaatttaagaggaaatatcctttactggatcaggactggtctacctatcttgtgatagatattggcaacggctttactaatgctaaagattatcacgatgggccgtatgaagatttatattgctttccaaccattaaggatgatgctgattgtatcgtgaaagattacttattaatcgttgatgagtatcctgataggaatactcgttttggtgtaaccgttattgatggcgagcttgagtaccagttaacgcccgagaaacaaatagagagagttttctatccataa

SEQ ID NO: 387143 - DNA, 240 bp, Salmonella enterica
atgcaaagggcgaccacggtggccagctacagcctttcggtgtcctcttttctggtcggattgctcgaccgctacacacaggcgcagtggaacaaggcggcgatgctggccggtattgtgctgggtgtggccacattttttctgaactggtattaccggcgaaaaacgttacgtcagttacgtgatatggggtgggatgaaaaccgcgccagcaagataaaccgttatctgggtaaatag

SEQ ID NO: 387144 - DNA, 510 bp, Salmonella enterica
atgatggcgctgattattggcggggccagttcgctgacgttgctgaatcagtttttgcacgaggaagaaggcgacagaacgcacgcttatcgtgatgcaggtggcgtctggacaatctgcaaggggctgacgcacgttgacggtaaacccgtccggaaaggcatggtgctgacaccggtgcagtgtgaccggcttgaccgtgagcaggagcaaaaggccctggcgttaatcgaccggatagtcaaagtgtcgctgacgccgccacagaaggcgggcattgcgtcattctgtgcgtggaacattggactggaaaaatgcgaacacagcacctttttgcgggaactgaatgccggacaccggctggcggcctgcgcacaaatccggcgctgggtatatgaccacggtcaggactgccggaaaaccaaaggtatggctcacggttgctacgggcaggttgaacgccgtgaccaggaatcattgctggcgtgctgggggattgaccgtgagtaa

SEQ ID NO: 387145 - DNA, 396 bp, Salmonella enterica
ttggtaatattatcacgtgcaacgccgctatcactactgtcaaccaaacccaatgtgatagagggtaaattaccgctgctcggtgtctcaggaggagcgctgactgagcttgaggggtctgataaagttgatctgcaggatgtcaatcttacgcatttgagccaggatgtcatcaataatcaacatactcaaaatatcgataaagaagaactggaaaaagaactcgcgaaaacaaaagaggaactcaaacatcttgctgaacatgtcaaacaggagcaacattctgagcattcccttcttcaggaaatgcaccagatattacagcaaaatgctaagcagcaagatttttctaatccacaatctgatgttcatttgaaggattttgattttgcctga

SEQ ID NO: 387146 - DNA, 258 bp, Salmonella enterica
atggttaaaccccacccctttgaggtctgcactggcggcattgacggtcgtgttactgaaaacccagccattatttggagcagacgcattaccgtagtcctgaacccatgcctgagtggcattctcatagatggccgccccggacatgtccacagtggtcataccaccaatcgtcatgttcagcagggtatcgcggttagaggtattaaccacactgctgtcaagaatgttggttgcccccgcaccggagccttttga

SEQ ID NO: 387147 - DNA, 525 bp, Salmonella enterica
atgaccgctgccagtttcgagataccagacctctttactgtcgacaaacgccacgccaaagccttcaccggcacctttttgctcaatgattttaccgagcatttccgccccttcacgggccgttttcaccacaggcaggatcacggtctgaatagaatcttcggtgatcccggttttctctacgtaaggatcggcggtcagcgccgttttgctgttatagatggtttccgtggcgcttataccaactcccgccgagttaaagccctcttcccccatcgatttatcctgcgtatcaaaatcatgaatggcagtgtagcgcatggcggatttcggcagcggccaggtgaaatcgttgctatgggatttaaattcaccctgctgattatctaccgccgggtggataaccatgtgcttggcgttggttgccgaatagtcttcattacgggcaacaataaacgatccatcgtccgaggctttatcgccgaccagaatagtggtacacgccattgctggtcccatacttaa

SEQ ID NO: 387148 - DNA, 468 bp, Salmonella enterica
gtgtcagataatctgtttaacgggcggcgttttcgggcgctgactgtagtggataattttagtcgggaatgcctggcgatccatgccggaaaatcgttaaaaggcgaggatgtggtcagaataatggaggcactgcgggtgctggataagcggctgccggtacgaatccagacggataacggcagcgaatttatctcaaaaagtctggataaatgggcgtatgaacacggcgtcacaatggacttctcgcgccccggaaagccgacagataacccgtttattgaatcatttaacggcagcctgcgggatgaatgcctgaacattcactggttcctgtcactggaagatgcgcaggaaaaactcgacaactggcgcagggaatacaatcatgagagaacgcattcatcattaaatgacatgactccggctgaatttatccgaagtctccggaaagacgaagatctctga

SEQ ID NO: 387149 - DNA, 213 bp, Salmonella enterica
atgctgccgaatctgaaaatgatgttcttcgtcaccagcttgccactggtgctcgccggatgtacgtcaggggcaaatgttccgtgtccggtaaagataaaaccgcaaccaccggcggcgtgggcaatggagccaccgtcgaactctctgctgatgctgaacaaaacgttcttgatatcagggccggaattatcagtgaccaggaaaagctga

SEQ ID NO: 387150 - DNA, 384 bp, Salmonella enterica
atgctggttgcctggtgggtgtaccgccagacggtaccggtctccgtccgggacgtcagtgaggcctttcatatcagcgcccgccgggccggtgacctgctgctgtacctgatgaacagcgtcagccatgtgcagtgtacccgggtctggcaggccatccccgggggcggacgccgccgggtgtggacggtgctgcgcatcggcgacctgccgccccgtaaaccggtggcggcgccggtcccggagagaaagtccccgccggcccgccgccgggcgccgtcaccggccatccgcgacctgcgggcctggatggtctcccgccgtcccggggagccggtgccggtggaagataccgggacgttgtctgacggggaggtgtcatga

SEQ ID NO: 387151 - DNA, 420 bp, Salmonella enterica
atgactattggtggtgttatttcaccgacagaaatgttattcgagattaaacctgttgataagcatgtcagagctgaggtgaaaattaatccgaagtaccgcgatcaaatctttgttggtgaaaaaacaacaatttcaattgagtcaattgtgaactccaggcgtcgaccatatccagcaataattgaaaacatcagtcctgatattattgagtctaaggataataccgggttgaaagagtattataaagtgatggttgagttttatgtttctgaaggggatttatcaaatattaaacaaggaatgatcgttgatgcaaatattataactggaaaacatacgattcttgattatcttatgtcacctattgctaaaacatttaaaggggcgctctcagagccgttaccttctgaccattga

SEQ ID NO: 387152 - DNA, 417 bp, Salmonella enterica
gtgaatattcttcccgacaagcaccgcgctgacgttctgtcttgcttctgcttccgccgtccgctgagtaaataccgggctgttaagcaggctgaggatatttccctgcgggaagccggatacaattcgttcctggcttcgcgtggcgaaataataattgctggcttccctgccatactctttttcatattcaccccgtaccgtttcactgtccagcaggcggccagagtaggggcccagtacggtaaacgccgccagatcggttcgtgcgtagactgtacgccccctgtaaccgtcgcggtcatcaagggggatagcgacggacatcatttcattcatccgcgcatcatgccttccttcattttgcaaaaaccagcgaatctcctgattaatcctggcttttgtctgccggggtaa

SEQ ID NO: 387153 - DNA, 201 bp, Salmonella enterica
gtggctatccgtggtgtggaaacggtgcttgaaacccttcgtcgtctggggcttgagcggttcatccgtaccaaagaggaaatcaacaaggatgccatcctgagcgaaccgaaggctgtcgagggtgtggcgggtatcaccgttcgcagtggtgttgaggactttgccattacaccgtttgagcagaatacgggggtttag

SEQ ID NO: 387154 - DNA, 192 bp, Salmonella enterica
atgaatgcaagacggtttaatcagctttatccggtcgggacaaagtttatgcatattccgaatccggtattacgcggtggtcgggtggtcagtaccgtggcaccggcgcgggattttaaatgtggctgtattgtggaaataaacgttgagccttatttcgtgaaggccgaaacactgaaatctccgcattaa

SEQ ID NO: 387155 - DNA, 1161 bp, Salmonella enterica
atgagtgatattgtccacctgacggttatcggtgagcaacagggcgctatttctgccggatgcgggactgaatcctcggtaggcaaccgctggcaaatcgcacacgaagatgaaattttcgttttttcgctctcgaatagcatgaccagtactggcaagggctctcaacttcatggactgcgcttctgcaagctaatcgataaaagtacgccattatttacgaatgctattaacaacaacgagcagttgtatatggagttttatttctaccgcatcaataggttcggcaaatgggagaaatattattatatacagcttcggggcgaatttttatcagatattcagtgtctcttcagtgaaaatcgtttacctacggaaaccattaacgtcagctatgaatatatcctatgcaaacatctcattgctaacaccgaattcagttatctggcgttgcccgaaaattacaaccgcttgtttatcccccagcccaaaaaatccactgatagcggcctcaagacgttaaacagcaaagcggttggcaggctgctcgctgctggaggcatttacaacgggaatatagaaggattcagggacacggcggagaagctgggcggcgatgcacctgcgggttacaagcaggtgcttaatgaaaaaacaattggactgggtattgctgctgcatctatcattttttcaagaaacgcatctaagattcaagatattaataaatttagagataaaataagcaaacttaacggtaaatcagcaggaacaatccgcaatgttaatcccggctatcccaaaatcgggtatacccataattgcgttaactgctctatcgctacagatgctaccctggcaggacatccagcatcagcattacccatcaactcaacaaaaggtgttcctctctcagtattagagaaattttataatggaaaattcaaacccatgtcatctgttgatgaaataattcacgtgatggataatgctaattcgggtgccagaggaattgtctatggttcgtatggcccgggacagccagggcatgtctttaatgttgtaaatcaaaataatacaatcagatttttggacggacaaacggggaatgccgccgatcttaatcagttcaaatcgtttcagctattgaggaccaactag

SEQ ID NO: 387156 - DNA, 1251 bp, Salmonella enterica
atgacattttcacttttcggcgataaatttacccgccattcaggcattacccgcctgatggaggatctcaacgacggtttacgcacgccaggcgccattatgcttggcggcggtaacccggcgcacatccctgccatgcaggattatttccagacgctactggcagagatggtagaaagcggcaaagccgctgatgcgctttgtaattatgacggtccccagggaaaaacagcgctactgactgcactggccgcactgctacgtgaagcgctgggatgggatatcgaaccacagaatattgcgctgacaaatggcagtcagagcgcgtttttctacttgtttaatctcttcgccggacgtcgcgccgacggcagtacgaaaaaggtactcttcccgctcgcgccggaatacatcggctatgcggattccggtctggaagacgatctcttcgtttcggcgcgcccgaatattgaactgctgccggaaggccagtttaagtatcacgtcgattttgagcatctgcacatcggcgaagagacaggaatgatttgcgtctcgcgcccaaccaacccgaccggtaacgttatcaccgatgaagagctgatgaagctggacagactggcgaatcagcacaacatcccactggtgattgataacgcttacggcgtgccgtttccgggcattatctttagcgaggcgcgcccgctgtggaacccaaatattatcttatgcatgagcctctcgaagctggggctgcccggctcccgctgcgggattatcatcgccaatgagaagacgattaccgccattgccaacatgaacggcattatcagccttgcgcccggcggcatgggtccggcgataatgtgcgaaatgattaagcgtaacgatctgctgcggctgtcggaaacggttatcaaacctttctactatcagcgcgttcaacagacgatcgcgatcattcgtcgctatttaaccgaagaacgctgcctgattcataaaccggaaggcgcaatatttttgtggctatggtttaaggatctgccgattaccaccgagttactctatcagcgcttgaaagcgcgcggcgtgctaatggtgccgggccactatttctttcccgggctggacaaaccctggccccacacacaccagtgtatgcggatgaactacgtgcctgaaccggacaaaatcgaggcgggcgtaaaaattctggcagaagagatagaacgtgcctggcgtgaaggctga

SEQ ID NO: 387157 - DNA, 792 bp, Salmonella enterica
atgattacctcataccacgaaagcgacctggaaatcagggagcattacaccgatacagcgggtttcaccgatcatgtctttgccctgatgcatctgctgggatttgcgttctgtccacgaattcgggatctccacgacaagaagctatttatcaaagggaaagcggaccaatatccggcgcttcagtcactgatatcaacaaccagcctgaatctgaaagaaattgaaattcactggcgtgaagtgctacgtctggcgacctcgataaagcagggaaccgtgacggcatcccttatgctgaaaaagcttgccagctaccctaagcaaaacggacttgccaaagcactgagagaaattggccgtattgaacgaacgctgtttatgctcgactggttccgcgatccggcacttcgtcggcgggtacaggcgggactgaataaaggagaagcccgtaacgcgctggcgcgtgcggtattcctacaccggctgggtgaaatcagggaccgaaaaccggaaaatcagagctaccgcgccagtggactgacgctgctgacggcagctatctcgctgtggaataccgtctatatggaaagagcggtcgaggccttgaagcgtaaggggctgaagatcaacgagcagctgctgtcgcatgtgtccccgctaggctgggaacacgtcaatctgacaggcgattatatctggaagagtaaccggataccggcttccggtaagtttcgtcggctgaggccagctaaagtagaaaggtcaaaaaataaccttaacgtacaataa

SEQ ID NO: 387158 - DNA, 531 bp, Salmonella enterica
atgtctgacaacagatggagcggtgtacacggtaaaaactccggacttgatggcgataaaacgtcaacaggagcagtctgctatgccggaagtcagggctggtcagttaacggaaggcgaaagctttacgtggatgataaaacgtcgccatgcccgaaatgcgggcagccaggtgtgattgcttcaggcgatctccggcagacaaacccacaggggcgggctgttgccgtcgatggttcaccagtaagctgtgggtgtgcgaccggaacgaacttcgttattgctgcgggaaatccgtcaacggcaaaaattatcggtgcacagagccagtccaggcaacaaccttcgtcacgtaacacccttcgttttcagtgtgccgatgatgatggccgactgatggtggattgccggtatgttctgatgttcccggacgggcatacggaaacggggaatacagataaccaggggatgacagcgtggcattatgctgaatccgctgaaaatattaacctgcatatattaatggaataa

SEQ ID NO: 387159 - DNA, 345 bp, Salmonella enterica
atgaaggcagattttaaaccagaaggggatacgcttaatgaagcaactgtaggagctccttattatagccaaataaatatatttggcggaagagttctatcttataatattgatggcaagcaggtaattgcaggaaatattcatcctgataattttggcctccatttacagtattgtgatgataaagaactcaataattgtattcagattagagggataccaacaaaagcaggtatagttaaagtacgagtacatggcggcttaggtggcggaatgctttcaaaatcagtcgatttcgacaaaacctacactatcacgatcaaagattcagaaggatcttcttaa

SEQ ID NO: 387160 - DNA, 369 bp, Salmonella enterica
atggcgcgtagcacgttctaccataacctcagcgctctcaggaaagctgataagcacctggcgttgaaagaactaatccttgatatttatcacctccataaggggcggtacggttatcgccggataacgctggcgctccggcgcagtaatggccctgttaatcacaagacggttcagcgcctgatgggtgagttgtcgctccgcgccgttatccgcatcagaaaataccgctcatggaaaggtcaggtggggaaaattgcccctaaccggctgcaacgcgacttcacggccagcagcgccaacgagaaatgggtgagtgacgtgacggaattcgccgtcaacggcgaaagcgttatctctccccggtga

SEQ ID NO: 387161 - DNA, 462 bp, Salmonella enterica
atggctttagtcgatgaaattgaggtctggctgacgtatcagaataagctgaggaaaccactcgggctgaccagcgtgacggcagaaatgcgtttctttggcgtatccggcgtgacggcttcagaccttcggagcgcggagcgtcaggtgaaagccgctgaaaaaagcgagttcagggagtggatactgcagtgggggccgttacacagcgtgctggaacgcaaagcgccggaacgcgttaatgcgcttcgtgaaaagcaaatatcggattatgaggaaacgtaccggatgctgtctgacacagagctgaaaccatccgggctggtcggtaataccgatgcagagcgtattatcggagcaagggcgatggagagcgcgaaaaaggcatttctggatggcctgcgccctcttgtggatgacatgctggggagctatctgaaagcccggcggcgtcttaactga

SEQ ID NO: 387162 - DNA, 408 bp, Salmonella enterica
atgcgcggcaacggcaataaaacttacgatcaaaatattgtcggtaccgcgttaagctggacgccggaaaactggactatcgccgcaggcggcggctggtatcagaactttatgaccaccaaaaaagtgtctgtgaatgactactttgccggtgatgcgtgggggctggagtattttgttggttacgctttcccgattggtcagtatgccgtgaaatcgattcaaccttactttatgggcgaccgcattgaatatgtgaatggccgcgactatctgcgtaccgataacggcgtggggatcaccttccaactggattatggtttccgcgttgattatgaacatgttttcacctccagcactgacaacctgggcgatatgaacctggtgcgtctgcgttacgatttctga

SEQ ID NO: 387163 - DNA, 1890 bp, Salmonella enterica
atgagcaatattatttatttgaaaatagtcggcgagagacaaggcgtcatatccgaaggttgtgggagtgaatcatcagttggcaatcgttaccaggcgggtcatgaagatgagatttttgtttttagcctgcaggcgctggttagcagtgctgtagccggcgtcaaccatcaggggattcgcttttgtaagccgattgataaaagctcgccgctgtttactcaggctataaataacaatgagcgttgtaccctggattttaccttttatcgtattaaccgatgggggcgttgggagaagtactaccagattgaggtcaggggagcgagcgttacagcctggtggatgcaaatccggctcgacggaatcgcagaagaacttatcacgatcaattatgactatatttgctcaaagcacctgatagccaatactgaatataatgccttattaacccccgaaaacgacaatcagctctttccggctacgcttccagcggttaaaaagccagctcctcccatcaaaaaacgtgaaatcaccttaaccattggcgtcttctttgacggaacagggaataaccttcttaataccaatttacgtatgcagaagtgtaacccagagagctacgggcttgatgccagagcgctaactgaatttagccagcgctgtatgaagaaagaaggttttgatggaatcgaggtgggaagctatctgaattattatacaaatattcgttggttgtatgatttgtatcacgtggaacgtattccggaagcgattaacgacgatgtgcagaggaaattttatatcgaaggtattggaacggaaaataataaagcggattcattgttaggtttagggttaggaaataatgatactggcgttattgcaaaaaccgataaagcgatagcattgatttgccagttactaaataatttaataaatgaaattgatgttaaaaattccaccctcaaacatctgcagtttgatgtctttgggtttagccggggagcagcggcagcgcgccatttcactaaccgggtgtttgaacgggaccctgccttagtgaacggtatcaggcaggtgttcgctaatagtgcctatagcggaaaacccgcgggggaagttcgctttctcggcatttttgataccgtgaccgccgtgggaggcgtaatggatggctttgatccgcatgacagcaataatctacaggttaaacttgctctgccgccgggtgtggcgaaacacgttttttacctgacggcaaagcatgaatgccgatataatttttgccttaatagcgtcaaagagcagtggcctgaaatgagcctgcctggcgctcatgccgatatcggcggcgggtacaatccgcttgaggaggagtatctttttctgacccggcctgcaatgcaaacggtctcttcagatattcctgtgcaatcgacagacgtttatcgccgtaccgtccgagaggccgaacgattacatacccatccagtcctggcccctgtacttccttccggcatactgaaaattgaaagcgatattgacgagtgtataccttctgaccaataccataaccgcaaaaaacgcgttgccgcagcggctacttttcggcgcaccgtcagtaatgactggtcaaaggttgctttacgagtgatgtatgaggtggcaaaagaagcagggataatttttgctgagattgacagtaaaaacaaagagctggcgtttaatcctgaacttaatacgctgagcgagcgcgtaattttatttgctaaaaaatcacttttatcgggtcatcaagaaaatatgttatttgaacgggatgaactaaaaatcattggtaaatatatcattgttctgcgaactggaatgcggttaattataatgtaa

SEQ ID NO: 387164 - DNA, 663 bp, Salmonella enterica
atgaacataaagactctaactttaactttcttagcgatggccgcattgagtcatgatgttaaagggaaagaactgacgtcacttcttgcaccctatgatgagtggtattttaactttttctatcctaaggcgttgcctgctcaggtaacgtatgttgaattactggatacggacggtattttttaccgttttcgatctttagattccaccaattccgactgggagagtgttggtggctggtatactaaatcaggttttggcattccctcctttaataaagctaaaaatccgccacagtttattcatttctgctgggattcagtgattgataaaaaggtgtatgaaacccgaattaccttcagcggtacggtctggaaaatgatgctgacgccttatccctcggtaggtgatccgcatgaaaatgactatcaccgctttatgctgataggactggcgccggaaggaaaggtgcgggtctggctggaaaatgacaataaacctaatattccgcttaccggtgagaaagtgattttaattgaaacggtatcgggaaaggatttaaaaatgtgcaagaacataaccaatcatcctgatggatatatttattatggagacacaccggactttatcaaaggtaaaaagtacccctacggcgagtggtaa

SEQ ID NO: 387165 - DNA, 201 bp, Salmonella enterica
atggcagatacaaccgcggaatggaacttgtctatcgatactcaatgccctcactgcaatcacaatttcgatttgcgttgtgagcttgtcgataatgtttcatctatccagatttgcgaaaccgacactgttgccacgcgagattatgagacggcgtgcccagaatgcggacatgaattcaccgttgattttgtgtactga

SEQ ID NO: 387166 - DNA, 1227 bp, Salmonella enterica
ttgctggcggcggctgccacggtaagccgtgacccgtttattcagcaactgatcattaagcaactgctggcgggctatgaagcggcggcggctcaggcctcagccctgaccgattattataatcagacggaagagaagggcctggcgcaacacggcggcaatatagcccgtgccgatatcaacggcctctttaaggaaattcttgccaacccgcaggcgtttggtctgacaaataccgtaggtatggcctgcccgccgggcgtatccgcctcggcgtgctcctcgacaatgccgggatttaatgcatcgcaggactatctgtttgccgatcatttacatcccggcccgcaggtccataccattatcgcgcaatatatccagtcgatcattgccgcgccggtacaggcgacatacctgaaccaaagcgttcagtcgatggcgcaaggcagtcgtaccacgcttgacagccgttatcagcagcttcgtcagggggaaaatcctgtcggttcgctgggcatgttcggcggctacagcgggggatatcaacggtatgataataatgaggccgagggtcacggtaatcataatactctgacggtaggcatcgactatcagcttaacgagcaggtactgctgggagggctgatagccggctctctggataagcaacgtcctgacgatcattatcgttatgacgcccgcggttttcaggccgccgtattcagccatttacgcgccgggcaggcgtggctggatggcgatttacactatctgtccgctaaattcagtaacattcagcgcagtataacgctcggtatgctaagacgcgtggaggagggcgaaaccaacggtcggctatggggcgcgaggttaaccagcggttacgattttgtcgtgatgccgtggttaacgaccggaccaatgctgcaatatgcatgggattacagccacgttaatggttatagcgagaagctcaataccagtacatcaatgcgttttggcgaccaaaacgcccactcgcaggtgggtagcgctggttggcgtctggatcttcgcgacagcgtcattcattcctgggcgcagattaattatcgccgccagtttggcgatgatacgtatgtggcgaacggcggccttaaatcgaccgtgctgacgtttagtcgcaccggcaaagcgcaggataaaaactgggttgatatcgcgattggcgcagattttccgctgtag

SEQ ID NO: 387167 - DNA, 306 bp, Salmonella enterica
atgaccacagcggcccgacttggcgataaaggcacccagcatgacggttattacgagaccgtgattattgcgggttctcccacggtatttattgacggattgcccgccgcccggatgggcgacccattaacacctcacgccaaacctgaacatccgccccatccacgaaaaatagcaggcggttccgccacagtatttttcgacggcctgcctgctgccagaacgggggatgcggtggactgtggcggggtggttatcggcagcggtacggtgaatataggctggcagtgtgttttctgtaagtaa

SEQ ID NO: 387168 - DNA, 333 bp, Salmonella enterica
atgcgttactggctgtcgataaatccgccgctgtggcgggcaggactgcggcagaacttccgtatcttccagcagcaggacatcaggacgatatcggcgacgctgctgaacgaggccggtgtagcggactggatgccgctgttctatgaggcgcacctggcgcgggagttctgtgtgcagtacggggagacagacctgggatttctgatgcggctgtgggcggaagaggggctgtttttcttcgagcggtgcggaaaggcagggccggagcagaggctggcggtgtgtgatgatgtggcgggccatgtcggacatgggggaaatagcgtttaa

SEQ ID NO: 387169 - DNA, 669 bp, Salmonella enterica
gtgatgatgtggcgggccatgtcggacatgggggaaatagcgtttaacccggacacgaccaccgacaggacgacggaatacatcagcgactttcgttatcgcgcgcagataagcccctcagcggtggagagccaggactacacgttcaaaacgccggggtggccggggtattacagccatgacggagggagtctgaacaggcagcggacccggtatgagatatacgattatctggggcggttcaaggatgagcagcacaggcgggattttacacgttaccggatggaagggctgaggaatgatgcggagacgggcgtctgtttttgcaacacgccgaagctgtggccgggagcgcggttccggctgacggggaacccgtcagggacgctgaaccggaaatggcaggtggtggggagcgtgctgagcggggagcagccacaggcgctgcacgggagtcagggagaagggacgacgctgggtaaaggtacggagttaaatcgtcctggagagcgggggcaatatcaccctgaaggtgggtggttcgtttattgtcattcatgcaggcggggtggatatcacaggaccgaaaatcagtctcaacagtggtggccgtccggggacaccggtaccgaccctgcaaccggcggtgctgagggcgctggccgatga

SEQ ID NO: 387170 - DNA, 933 bp, Salmonella enterica
gtggtgcgtgatccgctggtaaggaatgtggtgaaccgcctggtggtaaagcaccacagtgagtggtgcagaggtcgctcgacaggaaggtgggaagggttctacaaggatctggacactgatgaagtggcctactgtgagaagtggcagacagatctggagtggatcagtgaggtgtcaccctttaataatgatgagccggtgtggcattttcatccggttgtgtttttagatgccttaagatctcctccagaattgataaatgtttcagattttctggcaatatatacaaaagaacatatttcgttcgcacctcaacgttctggtacgttatcgcaaaaatcatatgataatctagaaaaattattggataatattaatatttattattctaatactctcgaatatagaccgaatttatataaactctcctatatgttggctactgtaagacatgagatttatgattacatcgatgtcgagtatttcagtgaaggatccgaaattgggagtgtaagttattttaacaagtatgatccagagcttgctagtactcaagaaaaaagaaatggtgcaatagctaatggtaatactaatcaaggtgatggttataaatatcgtgggcgtggttgtgtccacttgacatggaaaaataattataaaaaagctaaagagaaatttggtgtggattttgtaaataatccagatcttgctggtgacttcatttatgcggtacctatcatggtttgggggatggaggaaggtgtttttaccggcttgaagatatcatcatatattagggagggcaatattgattatgagaaagcgagaaaggttattaacggaagtgatcagaaagaattaatcgcatcatacgctagaaagtttcaatctattatggaagaaacatcaactgcttctaaagagttttaa

SEQ ID NO: 387171 - DNA, 621 bp, Salmonella enterica
atggacggtgatcgtgatggaaaagtgacggaagagaaaatcaggcaggcgctggtggtgcgtaattcgctggtaaggaatgtggtgaaccgcctggtggtaaagcactacagtgagtggtgcagaggtcgctcgacaggaaggagggaggggttctacaaggatcttgacactgatgaagtggcctactgtgagaagtggcagttagatcaggagtggatgagtgaggtgtcaccctttaataatgatgagccggtgtggcattttcatccggttgtgtttttagatgctattaatgatatcaattacccaaaaactcctgtaaatgatggacttgttccattggattttttgcggttttataacggtgaaactattgatgacgcagattttgaaaatgccgcaaaggaactagagtgtgaaatggctgcaatcaaggctgtcgcgaaaactgaaaccggtggctctggaagctattttaaatttgaacaagaagatgattatgtttctgcgatcctttttgaaaggcatcattttcataaatatacaaatggtaaatatgattctcagtctgatatttctaacagaaattctggtggttatggggtgagaacagattaa

SEQ ID NO: 387172 - DNA, 687 bp, Salmonella enterica
atgatgaaaagacataacgtactgacacttgcgcttttgctggcaatcaccgcctgtagcccgcagaaaccgcgccctttacagtcaaaacaggccgccagcggggactggacgctgccttatggcgagtggagcttctcttttatcacgccatggaaactacgagcagaagttacccacgcgcggataattgataccgatggttatctttatacctttaacaccctggaccagaccgcccaagggccggactccatcaacaaatgggcttcaagcgtgcatggccccagcatcatcttcaacaaagtcaaaaaacccccgcagtacattgtcttctgctgggattcttatgctgacaaaaaaacctatgagaccagcgccatgtttgggcccgaaacctggctacgcatgaaaactcccgctgaccatacatggagtaatggagaagcgatctggtatagcaatatcctcttcggtctctcccccggcggtaaagtcaaagtctggttcccggatgtcgccggacgccccagtcttcccgtcaagcccctgaagatgaggacccgctccggcagcgatctgaacatttgtaaagactacaacaccccggcggaaagctatgacggtattcagcccattgaagatttaaacaaaggcaaaacctacccttatggcaactgggattaa

SEQ ID NO: 387173 - DNA, 243 bp, Salmonella enterica
atgaatctaccccggctgctaagccagccccggcatatgtcataccagggtcagaagcaaaaaaacaccaacccgggcgcacagtcccaggtcagctacaatttcttctttgataaccattttaccctggagttccctatgggtcatcgtttactttttagggcgttgcgccgtagtatgacggcttgtttccagggtgttagcgcgagattatgcgattttccagatttatcatcggattga

SEQ ID NO: 387174 - DNA, 1386 bp, Salmonella enterica
atgcggggtatcggagctgttatccattttcgcccaccgacagatagtagcatgccgtcccctgacctcagcgggaggtggaacagtatcagagactggttctccctgcccgttcaggatgaggccgcacagtgctttcgcgttttttatcagccggatgaagccacgtctccctccgacaggttgaagaactttttaaaactgaaagcactggcctctccgggacgtcaggataatttcgccacagagcggatactcggtactggtgaaaccatctgcatgattgcctccggtaaaaacagcgacttcccccccgtcacacttcacctgagcgaccaggagtggcatatgacacaatctcaggaagagacggctgactgcacagtattgccgcttagcgctggtaacccggcagcgaccaccgcagaagagagcgccggagcaagccgaaaaggaagccgcattaccaatactcagattcaggcatggcgggacctgtcaccggaggcgaaacgaaaggcaggcggctggataaagtgggtgcagacccagggactctccatcagtggtgctaaacaatatctgacaaatacagggctgacctcccgcggagtggagcggctgcagccgccaggagagaagggttcctccattacaaatgcacagattcaggcatggcgggatctgccacaggaggcaaaactcgaggcaggcggctggatgaagtgggtacaagcgcagggagtatccatcgcaagtgccggaaactttctgacaagcaccgggctgaccccctttggtacagatcgcctgaaacaaccagaagaaagaggtacctccattaccaatatgcagattcggacatggcgggacctgccgcaggaggcgaaacgcaaggtcggcggctggatgacgtgggcgcaggcactggggatagacatcggtagtgcctgtagctatctgacaaacacaggactgacgcccaaaggggtagtacgactctctcctgcagcgagaggtatccccatcacagagacgcaacttctggcatggtttaacatgtcatcggagcaacgccgtgcatcaggcgggtgggccacatgggcgcagacgcaggggatatcctacataagcgccagaaagtatctggcaccgctagacagcgagataccatccagtggcacatcgcgtccgcagccgtccgcaaccgtcacgagtgacagtccacgggcatcaacatccgcagccacaggtgatgagataaccgtcagcgtgagtaccccaccggcgagcagcggggaaaaacgatcgcttccctcgactaaagaggatatctcagccccgccggcaaaacagatgaaggaagaggaagatgacgttacctag

SEQ ID NO: 387175 - DNA, 2121 bp, Salmonella enterica
atgtcgacaggtttacgtttcacgctggacgtggatggtctggggtcgaaaaccttcgccgtggtgagctttctgctgaaacagcgttattcattcccgtttacgctggacattgaagtcgccagcgactcgttcagggaaacggcagaaaaactgctggagaagaacgcgaccctgactatctggcagggcgatacaccacagcgctatatcagcggcattgtcacccgattcggaatgaaagaatacaacggctggcagatgtgctacagcctgaccatcaaccctcccctgtggcgcgccgggctacggcaaaattttcgcatcttccagcagcaggatattcagaccatttctgccacgctgctggatgaaaacggaataaccggctggaaaccgctgttttatgaggaccacccggcacgggaattctgcgtgcagtatggtgagaccgacctggcgtttctcacccgcctgtggtcggaggaagggattttcttttttgaccggcacgttgccgacacaccgtcgcagacgctgacgttgtgcgatgatgtggccgggctgtcccgtgcggatgaaatgtcctttaatcccagtcccacaaccactcttttacccacgattatcagtacatttcgttatcaggcacagatacgcccctcttcggtggaaacccaggactatacctttaaggtgccgggatggccggcgtattacgggcgcgacggcgagcacctgaacggccagcgcacacagtatgaagttttcgattatccgggacgatttaaggatgagcaacatgggcaggatttcgcccgttatcagatggagggctggcgcaataatgcggaaaccgccgtctgcatcagcaactcgccgacattatggccgggcgtcatttttaccctgaccgggcatccggtcagagaacttaaccgacaatggcaggttgtcagcagcgttctgacgggcaaacagccgcaagctctgaaaggcagccaggggttgggcacctctctggataaccagttcggggtcatccccgctgaccggacatggcgaccgcagcccctgctgaaaccgaaagtggacggcccacaaagcgccattgttaccgggccagcgggagaagagattttctgcgatgagcatggccgggtacgggtgcgctttcactgggatcgctattgtccagggaacgaggacagctcctgctgggtacgagtgtcacaggcatgggcaggcgccggatttggcaatcttgccattccgcgcgtgggtcaggaggttattgtggactttctcaacggcgaccccgaccagcccctcatcatgggacgcacctatcacgaagataaccgttcgccgggtgatttacccgctaccaaaacgcagatgaccattcgctcaaaaacctacaagggcagcgggtttaatgagctgcgctttgaggatgccaccgggcaggagcaggtttatatccatgcgcagaaggatatggataccgatgtactgaataaccgcaccactgatgtcacggccaaccaccgcgaaaccatcggcggcaaccaggtcatcaccgtgaagcaaaatcaggtgcagacggtggtgcagaatcagaaagaaaccgtgggccagaaccagagcattactgtcggccagaaccaggctgaaacggtgggcgtggcgcgggcattaacggtcggggtagcgtatcagaccaccgtgggcggcgtgatgaacacttcggtggcgctgacgcagtcttcacaggtggggatacagaaatcactgctggtcggtaagggctataacgtcagcgtcggggaaaatgtcaccttcacggtaggtaaaagcaaaaccgagagcaccggtaaggtggcggtctattccgccggagaacatctggaactgcgctgcgggcaggcgcggctggtcctgacgcagaacggcaaaatcttccttaacggtactgccattaatctccagggcgtgcagacgctcagcggcgacgcgctgatgattaactggaactgcggtgcagcggaagacccgccgaaagcgccggaggaagacagcagccagccgccggatatgcggcagtactgggtgatttaa

SEQ ID NO: 387176 - DNA, 4182 bp, Salmonella enterica
atgagcggaaaaccggcggcgcgccagggcgacggcaccatgaagggcggcccgataattcaggggtcggcaggggtgatgattggcgcgcccaccggtgtcgcctgttcggtgtgccccggcggcatgacctccggcaacccggtcaacccgctgttgggcgccaaggtgcaacccggcgaaacggattttgccctgcccggcccgctgccgtttgtgctttcccgctcttacagcagttaccggacgaaaacgcccgcaccggtgggggtatttggccccggctggaaagcgcctttcgatatccgcttacagatacgcgaagatgaactgatactcaacgacaacagcgggcgcagcattcactttgacccgctgttccccggtgaaacggccttcagccgcagcgaatcgttctggctggcgcgcggcggcgctccggcactgcatgaaagcaatccgctgtatcttctctggcagcgattaccgaaagcactgcgtaccagcccgcatatttacctcgccaccaacagcttacaggggccgtggtggatactcggctggtctgagcgcgttcctgcgcccgatgaggtactccccgccccgctgccgccgtaccgggtgctgactgcgctggtggataatttcgggcgggcaatggttttccaccgcgccgccgccggtgagttcgcaggaaatatcactggcgtgacggatggcgcaggccgccggttccggctgctgctgaccacgcaggcgcaacgggctgagcagtaccgcagacaggccgccgccgcacaacagccaccggtgcctgatgcgctgcccgccacggagtacggcgcggataacggcatccgcctggcagaggtgtggctgacccgtgacccggaatacccggatgacctgcctgcacagccgctggcgcgttatgcatattcaccgcgcggcgaactggtggcggtgtatgaccgcagtgacacagccgtacgcagcttcgcttatgacataaaatatccgggacggatggtggcgcaccatcatgcaggcagaccggaaatacgctatcgctacgatgctaccggacgagtcgtggagcagcacaacccggtgggattaagctacacctatatgtacgaaaagagtgctatcaccatcaccgacagtctgaaccgccgcgaggtgctgcacaccgacggcgacggcggactgaaacgggtagtgaaacaggaacgtgcggacggcagcgccacgcacagcgaatatgacccggcaggcaggcttatcgcgcagacggatgcggccggccgccggacggaataccgcctgagtcccggttctggtctgctgaaagaggtcgccacaccggatggcaggcgcaccgagctttactacaacagccagcgccagttaaccagcacggtgtacccggacgggctgaaaacccgtcaggaatacgatgatctgggcagactgaccgccgaaacggcgcgcaatggcaacacgacccgttatttttatgctgacccgtgcagtgaacatcccagtgccatcgaagacgccaccggcagcaaaaaacagatggtgtggagccgttacgggcagttgctgaccttcaccgactgctccggttatgaaacccgttatgaatatgaccgtttcgggcaactgacggccacacatcaggaggaaggaataagcctgttccgggtttatgataaccgtggcaggctggtcagccagaaagacgcgcagggccgggaaactcagtatgaacacaacgaggcagacgacctgacggcgacggtctcccctgacggcagccgcagcgaaaccacctttgatgaccggggcaacgccatcagtaccatgcagggcgggctgatgcgtcggatggaatacgacgccgcaggccgcgtgacacaactgaccaacgagaacggcagccacacaacattcacttacgatgtgctggacaggctgacgcaggaaaccggctttgacggcaggacgaaacgttaccgttacagcaacatcgggcaggttgtgcgcagcgaggatgaaaatctcgtcacagcatggcattacgatgaatcggaccgcctgacgcaacgcaccgtgaacgacgaaccggcagagcagtggcgctataacgaacgtggctggctggaagacatcagccacctcagcgacggctggcgtgttgccgtgcattacgcccgcgacaaccggggccgtcttatcagcgaacgcctgacggtgcatcacccggaaaccagcgagctgctgtggcagcacgaaacgaagcaggattacagcgataagggactgccgaccctcaccacccccgactgcctgtcaccggtggaatggctcacttacggctccggctatattgccggaatgaaacttggtgacgagccgctggttgatttcacccgcgaccgcctgcaccgtgaaacgttactcagctttggtcagtacgaaagaaccacagcatacactgccgccgggcggccggagagttaccattttaataaaccgcagcttaaccgtgaccacacctggaacggtgccgggcagcttatccgtatcaacgggccgcatgagcagcgcgattatcagtacagcgacgccggacggctggtcagcacacatatcaaatccccgcatcatgacctgacacagtggacgctcaccgacccggcaggaaaccggatagcggagcgggataaatacccgatgctgccggaggcctggcgtgataaccgcatcacccaggacgcggattatttttaccattacgatgagtacggcaggctgacggacaaagatgagcggcgcgtccgcaatggcggcagctatacgcatcattacagctatgaccatcagcaccggctcacgcattaccgcctgatgcagcagggaaacacgctgacagaaagccgttatgcttatgacccgctgggccgccgtactggcaaacgggtatggaaaagccagacggaacgggaaggtattaccgggaaggagtacctctggctgaaccccacgccggaggtaatatggtacggatgggacggcgaccgcctgaccaccacgcagacggacgccacccgcatccagacggtgtatcagccgggaagttttacgccactcattcgtattgaaacggcaacatcagagctgaccagaaccgcccgccgcacgctggcagagaaacttcagcaggatgcagggatggcgtttgcgccggaactggtggcgatgctgaatactctggaagctgaactgaaacgcggggcaatcagcgagcaaaatcagcaatggctgacgatgtgcgggctgaccctggagcagatgaaaaatcaggtggagccggaatatgcgccagtgaggaagctccacctgtaccactgcgaccaccgtggactgccgctggcgctgattgatattaacgggcatattgcctggagtgcggagtctgatgaatgggggaatgtgctgcgggaggataaccagcataatctgcaacagctcattcgattgccggggcagcagtgggataaggagtcaggactgtattataaccgacaccggtactacgaccctgcacaaggacggtatattactcaggatccgatagggttgcaggggggatggaacctgtatcagtatccattgaatccaattatggaaacagatccgttaggattggcggcatgtaaggttttatatcctgattatcccatcgaatatatggatgggagtactactacctggcttggtggacatggtggtattctgggatatgataaaaatggttcaactaaatattatgaatatggtcgttacaaccctaaattaaaaggtattattggtaccaaattatcgactgatgatggaaatatcagaaacgtcagtatgcccgacttagtcttagataaagaaggtaatcccactgatgaatcgcttgaaaaactcaaagctgctttatcgaaaaaagccgggaagaatactaatgttgagttaacatgtagtaaagatgtggatgagagaaaagtatatgaatatgttaataagatagctaatgatgaaaaaagagataaatatagttggaatccattttcacctaatcaatgccgtagttttgctgaagatagtttcgatgcgggagactga

SEQ ID NO: 387177 - DNA, 312 bp, Salmonella enterica
gtggtgaaatttaaaattatgttaataattgcaattattagtgtgttgtccaatatatttattttatataactggatagacagctcaattagtttaacttattcgaaacaatcttttgaagattgcagtaacgatctgtcactgcttacagcagtagctaaaggagagtttaagggtaaaaataataagtatatacagcaacattttatggatgagggtttagatgattatttgttaattaaaaacaatgtaatatatttaggtaatacggaatttatatttgatgatagtgttttggtagacgttaaataa

SEQ ID NO: 387178 - DNA, 141 bp, Salmonella enterica
atgtcgatcccgatacttacagtaaggtatatgataaagttgccaatccagggtaagaaaggaggaatagatgttattaaagttgataacgttactctcaataattcttataccgattattgtagggtgcagtgcatttga

SEQ ID NO: 387179 - DNA, 507 bp, Salmonella enterica
atgatgtttttgaaaaaaaattactcattggattcagttgctagttttcccgatgatgttaataaactaaaagaaatatggtatttttgtgataaatgtttgaatgatgagtcgtgtaaaaattatgatgtagagcagtgcaagaatgtaactattccgagcagaagtgaggcattaagtaaagcggtaggcagagctaacaccgaagctgtttatttcttggttgatgaggcaaaaactaatgtaaatgatgttacaggagaatataaggaaacaccattgatcatagctgcttattatggaacaaaagagcatcagaatatagctgaatttttactattacgtggcgctgatattaataaaacttacccagccgtggggcgaaatgctttaggcgtagctaactggaaaaataatacagattttgctgaatttttacttaggcatggagctaagccctcaacagtgattcaaaggaaaaaagcaagtgcttctgtattacgatga

SEQ ID NO: 387180 - DNA, 1080 bp, Salmonella enterica
atgatgaccgtactacaaccggcaccggtagtatgcccgcggcagggacggtatattacacaagacccgatagggctagcggggggattaaatacttacacctacgtcaaaaatccgctgtcgtacattgatccgctgggattaactggctgtagtataaaacctggaaaaaattttaaagatcactttattagacataaagacatacttgaaaagtattttggcaagaaatatccaaaatggaaagttgatgaaggcgctgaatttttaaagaaacgcggggcaatcagcgagcaaaatcagcaatggctgacgatgtgcgggctgaccctggagcagatgaaaaatcaggtggagccggaatatgcgccagtgaggaagctccacctgtaccactgcgaccaccgtggactgccgctggcgctgattgatattaacgggcatattgcctggagtgcggagtctgatgaatgggggaatgtgttgcgggaggataacccgaataatctgcaacagcttatcagattgccggggcagcagtgggataaggagtcaggactgtattataaccgacaccggtactacgaccctgcacaaggacggtatattactcaggatccgattgggctggatggcgggttgaactcatacagttatgttaaaaataatccagttaattggattgatccactaggcttagctcatacctctggaaaatggaaagactgtggcaaaggttgtcgcattcgtattgatggagatgcggttggcgatgggagacatttgcactgggaatgcaaaaatggaagcggagtaatgggtgaatttggtggccaatctcacggagatgattactcatccgcaccaaattccattaaaaaatgtgcaagaaagtatggtttcgaaccagaacaaagtaaactaacatgtaaagactcagagacatccgctacagaagcggttgttgcaactggagctactattggtgtggggtatattatatatcgagtgattcggatgataccttcgcttgccccgcctctttggccaacaattcccgttaatgcggtaactccgtaa

SEQ ID NO: 387181 - DNA, 336 bp, Salmonella enterica
atgaatgaatataatattcttgatgagattgagtggcatgacggggtgtttttagactctcggctgagttgtaaagatgggagcgtcaatctgatggtgtccgtcagtgtttacaatgataataaacgtaatgaattaaatttggagtttataagtgttgaaaatttaaccatgactatggatgcaatagaacttaatgataatcgtaatgcaggaaatattagcaatggctatgtgaaaaaagtcagcaacaaatcaaaatataaattcttcctttattttaccgatggatatctgaatttaacatttaaaaacataagggtggtgtataagtga

SEQ ID NO: 387182 - DNA, 897 bp, Salmonella enterica
gtgagtgaagaacttcagcaatggctggcaaaatgcggcctgacgccggagcggatgataaaccagttggagccgatgtacacgccgttgcgtaaagtcaacctgtaccactgcgaccaccgggggctgccgctggcgctgattgatattaacgggcatattgcctggagtgcggagtctgatgaatgggggaatgtgctgcgggaggataatcagcataatctgcaacagcttatccgattgccggggcagcagtgggataaggagtcaggactgtattataaccgacaccggtactacgaccctgcacaaggacggtatattactcaggatccggttgggctcgagggggggtggaatttataccagtatccattaaaccctatacagtttattgatccacgaggattaaaatttttggtcgaaggagacagaaaagattttgatactgcgataaattttctgaaaaaagatactgagatggcaagaataattactgcaatagagaacaacaagaaagtaataatcactgtcagttgcaacaatggaaaagataactcttttagcccttggactggaagaattcattgggatcctcattcagctttactttgtgatgagaacccgaaaaatggacattatgattttaaaaatgggacgcaggtgccagcattagctctcggtcatgaaatagcacatgcatatgctttttcgactgaaacatacaaaaattacatgacaaggacgaacgctatagatccaatatatgatactgctgaagaaaagagagtgattacaggcgccgaaacacacgcagctaaatccctgaagcaatgtatcaggaaaaatcatgggggaatatcttatcctgttaaggggccactggataatctatga

SEQ ID NO: 387183 - DNA, 468 bp, Salmonella enterica
atgaaaagagcaaccgtaatagttcttatttttttatttatagggaaatgtaatggaacacaatttaatgatatttataaagtatgtaatatagagcatataaataatatagaaatcatttattatcctgtttatatcaatacatatactgcaatgagtgataaagaattgcaattacggtatatttacaagcttgaaattattaatatcagagagagtcctgagtatggagaaattctaaaaatgttaaatattaaatatgtaaatggtaacaaaaaaagtgatataagatggggggttcgcatctcatctgaagacaataagttttgccaattatattttgatggttttggaaaatatggaaaaattaatgacacaaatgtatcgttcgaaaaaaacaatataattgaatgggttagaaaaaaagctcccctattcgttgagtatgataacctcctatcgggttaa

SEQ ID NO: 387184 - DNA, 651 bp, Salmonella enterica
ttgaaaggtgggctgaatccttatacgtacccactgaatccgatcactgatatagatccacttggtctggctacgctacaacagattatgggagccaatgcttatggtaccatgcagggtgccaatgttggattggatccaaatttgtcggacgaggaaagatcgaaagctgccgatgactttgcaaatatgcggggaatgtataatcctttggatcaatatgtaaaaagactggcttttggattaccctcaatgccgttgttagtgatgttttctccagcgacgtctctcgaagctgcatttactggtgcaggtttatcctgcggttcaaactctgcatatcagttatacaaaggggataaattcaattataaagatgctgctctggctgcattgactggttttttagctccgggacgtaatttgctggaaaatacgcttatttctatgggggttacatttttgaataaagatggaaaaactggcgcaactagcggtgccggagtaggaactgttgtcagtgatatcatgggtaagctggccccttcttatattcctgatgcagtagttgagttcggtggtggagtggcatctgaatatattggagataaatcagaggagatttttgatacagaggatgagaaaaaatga

SEQ ID NO: 387185 - DNA, 834 bp, Salmonella enterica
gtggagggcagtatcgcctggagcgctgaatatgatgagtggggaaacctgctgaatgaggcgggtccacagcagcttatcaggctgccggggcagcagtgggataaggagtcaggactgtattataaccgacaccggtactacgaccctgaacaaggacggtatattactcaggatccggttgggttgaaaggtgggtggagtctctataattacccattaaatccagttgaatatattgatcctttaggtctgtctccattttctggacttggctcaggatttaacaattacatgcaagcagcaggatcgttaggtgtctcaatgacgaagcagggatcatccccggaagatatttctgctgcatttgaacatatggcgaaaggagacttaccaaagcaagcaaggcaatttgtggaaggctgggtatatggttctgcgtcgtcctttgcgtcaatagttgcgtgcccttccgcatctttggctgtatcaggcgctttaactggtggtgctaacgctttaaatcagatatggaatggtggagattttagttttagtgatgtctatgtagcaacgaatgtggggatcctaaccgaaggccgcagcctggtagcgacaacaggtataaatgttgccgggtattcaatcagtaatgtgattaaaggaacgactcagacagttgaaggggttgtctcgacggtttttggttcaatagtaggctttggaacaggaaaaggagttggaactgcggctagtggtcccgttgccacaggaattggagcagttgtaactgaagtctctacaagtaaagccaatgaaacgcttaatgagtaa

SEQ ID NO: 387186 - DNA, 270 bp, Salmonella enterica
atggatgttgaacggagcccgtggaaatttattattatattcataatcagatattttatagccttaacaatggtactctatcttgtgcgacttggtactactgccctggctggtataaagacaggtacatttaattttgattatcgtgatgatttttttgcttctctcaaagatggtttattctttggcataatatttggcataggtgagtgggcaatacgaaaagcaaagaaatttgacgaaaataagaagaatgatagaaacaagtga

SEQ ID NO: 387187 - DNA, 201 bp, Salmonella enterica
atgaaattttttatttttatttttttgctatgcaaagtatgcagtgcttttggagaggatgtgatttatttaacaagcagagaacaatcatccttaaaaattgtatctaattgcctgccagataatgagtcatttgaaagttataaagctagtattgaagataaaaaagattttattgagatcattttttttcgaatctga

SEQ ID NO: 387188 - DNA, 351 bp, Salmonella enterica
atgtctatcgtttatccgcagttccatttaggcaatcttaacgaacagacgtttgccgctatgttggattccccacagcaggaggcgtttggcaaagataaatatacaacgctccccgagcaatgtcggcaatgcccggtgctacgcgcctgctggggcggttgccctaaacaccgttttgtattaacaaaagagggtaagcccggactcaattatttgtgcgcaggatttcgcgcctatttccagcatttgcctccctatctgaaagcaatggctgatttgatggcaatggggcgtccggccagcgatattatgcatgctcatttacattacgccagaagtgatacgtaa

SEQ ID NO: 387189 - DNA, 684 bp, Salmonella enterica
atgccggaacatcattttccactatgcattacgttgtctgatgccagacgaagagagataattcaactggcatgtcagaacaagatgcttctgctggaagatgattacgacagtgaattttacttcgacaaggttccccgccccgcaattcgttcaaccacagctgcagcgcaggtggtttatatgggcaccttctccaaggtactgttcaataacgtccggcttggatatctggttgcagatagccacctcgtacaacagatggcagccctgcactggagcctttcccgtggcacaagcggcctgctacaacaatgggtcgctgaattaataaaaagcggaacctatgcgcgacatttgcgaaggatgcgtacggtatatcgacataaacgggacgacatggtgactctggcacggaaatacctgccggacgcgcagttcagcgttccgtctggcggcctgcagctttacgtcagattcagcgagcctgaaaaaatccataggatctctgactggctttccgataaccatattcagtttgccgatacaggaaactatacgttcgatactaacgcgacttccgattttatcgtgctagggttcgcgaatactgatgtgaatgaatgtaagaccgtttttgaaagactttaccagacgctggattcggggtctggcaggttatga

SEQ ID NO: 387190 - DNA, 582 bp, Salmonella enterica
gtgattgacattcatctcagccgtagtgcgacggctcttccgctttaccatcagattgagcagcagatccgctggcagatcattaaaggtcggctgaattatggtgagtaccttcccccttcccgggagctggcccgccaactgagggtatcccggggaagcgttgttcgggcttatgaagcgctttgtgtgaaagagtactgccacagccatacgggaagaggaaccatggtgatttatcgggaaaagccggatgcctcaccgccaggtccggttacacctattccatccccaatttctcacgcgattgataaatttcttcccgggggcttatccctgcttcccagtcatgccagcaccgcccatcttccggttagtgagttccggcaggctttcaaccgcgtactgcgttatcctgaccgccttaatcattttggtgagagtgcagggaacctggagttgcgtcagcttatctgcgaccagatcctcccttcccgggggatctcagccagtccccaggaagtgctgattgtgccaggttcacagtacggaagtctgcttctggccatgaccgtacggtag

SEQ ID NO: 387191 - DNA, 1026 bp, Salmonella enterica
atggtacaggaccaatatagtggaaatttagcattatcctgcccggggagcagtaatttagcccggaaattaaaagtgagagatacggtgtccgaaaaacttaaaactgtcagcttcgatctctattcctcggtgatggggataaccggccttggcctggtatggcgggccgccgcaaaaacctacggcgctaccgctttgccaggcgaagtctttctcgctacaggattagcggtatttttagtactgaccggtatccagcttctgcggctggttttttgccgtcagactatccttgcagaatggtactcgcgcgccagtaagaactttttttgtgctgccacgatctcaggttttctgctcgcaatgggactgctgccttacagtatcctgctggcgaaggcgctttggatagcggccgccagcgcgcagatttttttcctgacgtgtacgttccgccgctggcttatcgatcggctcgatacgcatgaaatcagtccggtatggcttatcccgatggtgggaaatgcctctcctgcttttgcgggtgtggagctggggtttcctggcctgagtaagatgttactgttttcggccctgctctgctgggcgctttttatgccgcttatcctctggcgcattatttttgttcgtccagtgaccccgcaaaaggccatgcccggcctggctattatggtttcagcgcctgcggtcatcgctgtcggactttactgcgtttatggcggtatgaatgatgtgattgaatttatggcgtggaccgcactcttctttgccattgtgctcatcagcctctggcgaagaatgatcccggatacgtttgggcggatctggtgggggtttacctttccgtcaaccgcactggcctctgcccttatacgggttgacgcggcgtccatgaccacgctaaaccacacgcttgcactggcggtactgacattcgctacctttgtagtatgttccattattatcatgaccgtcagacaatcattgtcaactttcggctga

SEQ ID NO: 387192 - DNA, 747 bp, Salmonella enterica
atgaaaaacacttcggatagcatattttacagccctctttatgtgagagtatctgaatatcttttttatgcaggtaagcgaaatgtctttaccaccattgcaaaggcggtaattgataaaatcgaagagtttccttatgtgaatatcgaggaactggcgtcgcactgtaatacgacgccttcgagcattaccaaattcgtcagggaactggggtacggctcgttccaggaattaaaaaatgacactgccccctatcgactgacgcatcaggggataaaaggattgactgaaaaagaggtcattgaagagatatataaatacatcccttatgacgcgtgtaaaaaaatggcagaggtgattaatgacagtcgctctgtcattattctgtcaaactcatttcttttcaatatcgcaaacgtcatgagggaaagcatcagcagcagtaatcggaaggtttatctggtcgagcgttcaaacaacgaactgatcaaaaccattctgcgccaagtagactgcgtttttattctcaccctgacagggcaatggataaagtcatgtcagtatataaataacatctctgaaaagtcgcaattatgccttatttcaggagacgtgccagccactctaaataacaaaccagcccataccattgaactcaacaattaccctcaaatgttatacgcaaactatttttcgcataaatacattgaaagtattgtttttaatatcgtacagagcgtgatttag

SEQ ID NO: 387193 - DNA, 1338 bp, Salmonella enterica
atgtctgaacaaaagcagatattgtctatcattgacaatttaggtggccgtgaaaatattaagaattattaccactgcgctacgcgcttacgttttaatctcttcgattatgacaagattaaaaaggatgcccttaaagcgaacccgctgatcctctcagtcgtgcaggccagtggtcagtgccaactcattatcagcaacaaagtaggggcagtatacagtgccctgcatggtgtacttgaaaccgacggacagaacagcacgccgtcttcttccgggacggcaacaaaccgggaatccttcatcagccgtatcttcgcattcatttcaggcagcttcctgcctctgatcggtattctcgctgcctcaggtctgctgcgcgccttcaccacgttgttactgagcctgccttctctggcgggaaacagtacgctgaccctgctgtcatttatagctaatgtgccattttatttcatgcccgtgctgcttggttttactatcgccagaaagcttaaatctaatgagctgataggcgcaatcatcggcgcatcattactttatcccgaatttaccagtctggcagggcagacgctgaatatcattggcctgccgcttgtggttatggaatacggttacagcatttttccggtcttctttgccgtaccggttgctgctgcgctggagcgcttcctgaaggccagactctgggattcagtacagctgtttatggtgccgttgttatgcgtcgtgattgtggtaccgctcaccatgtttttacttggcccgttcgggaagtacctcggcgattatctggcatcagctatcgtttatatcattggtgtgaacagtcttgtggccgggatgatcatcggcgcggcctattcctttatcgtcctgtttggtctgcactgggccattattccggtcgtgttttcaaatattgcccatggcggtgacccaatctacgccattggcggaatgtccgctatcgctcaaatgggagtagcgctgggaatccttatcagaacccgtgatgctggcacgcgacagcttgccagcagcgccttcttcccgtcattaatcagcggcgtgactgagcccatcttatacggcctcatcattccaaaccgccgtacgatttattacatcattattgccggtgcggtcggcggaggaattgtgggtggctataacatcacgattaataaccttgtttttgcgagtctgctttccatcccgaccgcaagtaacatgctgatctacagcgtaggtctattcgccactttaattactggcgcagtcttaccggttatttttggttacaagagccggtcttaa

SEQ ID NO: 387194 - DNA, 1443 bp, Salmonella enterica
atgagtaacgaatcactgaattttcctgaaaaattcctctggggcggcgctatcgcggcaaaccaggctgagggagcctggaatcttgatggtaaaggtatcagcgttgccgacatcaatgaatatgttttcaatgaagacatgcgcaaaatgtataatatcgaactcactcgggactatgctgtccaggcacaggacgataaagacggcgtgtttcctaaaagaacgggtatcgatttttaccatactttccgtgaagacctggcgctgctcaaagccgccggtctgaagactttccgtacctcaatcagttgggcgcgtatttttccggacggggataatactgcgccaaacgaagcgggcctgaaattttacgatgagctgatagacgaaatcatcaaaaatggcatggaaccaatgattacgctcgcccattatgaaatgcccctgaatctcgcgcttaaatataacggctggaagaatcgtcagttaatcgatttttattttaactttgctcgcgcctgcctcgatcgttatcacgatcgcgttaagtactggatcccttttaaccagataaatctcattcgctatgagtccttcaatcatctgggtatttttgaagatgagggcacttatctggagcaggataaatatcagggtgttcaccatgagctggtggcctcggcgatggtaaaaaaatatgccgcatcactgggcggcgatattaagatcggcatgatgctgtataccgatttcgcctaccctgaaacgacaagcccggaggacaacttcgccacatggcagaaaaatcagtatgaagtttacttctcagatgtgcttctgcggggtgagtaccctggctatataaatcggttcttcagagagaaaaacattattctcaatatcacggaggaggataaagctctcctgaagaatacggcagatttcatgacattttcttattacaccacctatgtgagcaatgctgagattgcgcaccagttcagggggaatagcaagcgtaatccgcttttatcgcaaaccccctggggctgggcaattgacccggtagggtttcgctatgtgctgaatttcttttgggatcgctggcaaaagcccatcatgatcgccgagaacggcattggctgccttgacgagttggttaacgaaaccgtagaggatgattaccgtatagccttcttcagggatcatatccgctctgtcggtgaagctattgccgatggcgtgcaggtgctgggctactacatgtggtctccgatcgacattatcagttgctcgtcgaaccagatgtcaaaacgttatggcctggtttacgtcaatcttgacgatctggggcgtggtgacggcaaacgtttctgcaagaaaagctactactggtatcagaagctcattgcgacccacggtaaatcactcgaggaataa

SEQ ID NO: 387195 - DNA, 249 bp, Salmonella enterica
atgtctcagggctgcgtagaggattttacagaccatgatgcagccctgttttacctttatcctggtgcatcacctatgtgtatcggtatgtttgactcgggggctgtatggagagggcttgttgccagcgcgccggatgtacttgccctttttgttgagtttgatcgatttgttcgcaaaggtccgcttcacgctcacagtggttattgtagtctggctttcctgcatgccattcgaggaaaagtatga

SEQ ID NO: 387196 - DNA, 2136 bp, Salmonella enterica
atgactgacatcatgccaaatattgttgtatcacaaccaagccagttatttactttagcgcgttcttttaaagcaaatgctaatggcaaaatctatattggtaagattgacactgacccggtaaacccagaaaaccagatccctgtatatctggaacgagaagatggtactcatgttcaggtggcacagccaattgttataaatgccgcaggttatccggtatataacggacagattgcaaagttcgtgactgtgcagggccacagcatggctgtgtatgatgcttgtggggtacaacagttttattttccgaatgtgctgaagtacgaacctgaccagctcagggctgagttatcctctcaaggaggtgataagattgttggcagttcttatgggggaaccgtctatactgactacaggcaatcagaattcattaagtttgcagatttctcaggatcaaaaatacttttaaataacagacaggcagttaaatatacagacggattttggtacgtatggactggaacatttccatacaacacgtcaacatctaatcctggaaacaatgatacatggaaatgtgtaggtctactgaatggtttggcggttaatgatgcgcagaattttggcttcacaagcggtatggacgatgcccttccagcgctaaatgcgatgattagaagcccatttttcgaaatgtttttccctattgaaagtgaaattaatatttcatctgactggaatctacgttcaaatttagatataaactttcacgcatcaacaatcaactggagaggtgcggctttctccagttctgacgtggtgaacggtagcgagatggctattttaaatactccaaattttgccggtggaactactggttcattgattaacttgcatttatcaaacttaagcatcaaagcaaatgattacgcaataggtataaacgcaaggaatgttactaatttatctatagaaaatgtctatgtagagaaagctcaaaggcaaggaattaacgtatctaattgccagaatggatatattaatcaaataacactaaaagattgctccccgttatccgataaagggtttaccagcgaaaacctggaagcatggggtgatggtttaatcatatggtacggcagcactaacgtatctgtggataacattaaggtagaatccgggaataatttacgaggtgggcgctgtggtatttgtgtcgatgggtacgcccccactggtatgccagacactagaaacatttctgtaaataacgcgtatgtttatgggtatgaccgcccggtccacaccgagttatgtggcgttgttacggtaactaacagtgtattcgaatacaattcaggttctgatacgcatcatttcttgcaatgcgcagccgttgtgtggaatgtccttgaaaccactacttttatcaactgcacgtttcgtacagatatgcgttttatgaaaaactcaggtgctaaagcgaaattcataaaatgtaatatgtacaaaacatcaagcactgagcctgtgtttataacaggtccagagcaaacaggtatggttaagtttgatgactgcttactttctcaggccggtggtgaatgggcggcgtggaactgttcattaagttttaatgattgcacgatatcatctgattctgctggagctgttattaattttggtagcgaatccataccaaaaaatatcactattattaattcatctctattaaacacctcaatatcagcaccgttcgcacctggatttactgaaattcatctgtctaattcaagaataaatggagatgttaattgtggaccttcagcgagactttttgttgtaagttgcgacatatcaggaactgttacgtgtaatagtgtaatgcgatataacgggcagaaaccaaacaaattaatttatactcaaaattcagaccaacaatataatggtatgtggctgggaactagaaaaccattagaaggtaggccagatggttctggtgattggctggtgggggatataatttttaaccttgatgccgtagaggcaaccccattccagtggtattgcgtaactccaggatctcctggaagatggtctgtatctggagagcttggatatgcttcttaa

SEQ ID NO: 387197 - DNA, 885 bp, Salmonella enterica
atgacaagtatagcaattcttgaagcagttaacacctcttacgtgccgtttaatggacagcaaatcatcaccgctatggctgccggtgtagcgtatgtagcgatgaagccaatcgttgaaaatcttggtatgagctggtcaactcagcaaaccaaacttatgaagcaattacagaaattcaaccatgttcatatgaacatggttgccgctgacggcaagttacgtaagcttttgtgcatcccactgaagaaactcaacggttggctgttcagcattaaccctgagaaagttcgtgcagacatccgtgacaaactgattaagtaccaggaagaatgctttaccgttctgcatgaccactggacgaaaggtaaagctgagaatccgcgcggtaatgcagataaaacaaccactgacgaccgtactccgttgcgcggattggtgaatcgcatcatgggtaaaacaggtattcattatcagccgctttacaagatgattcaccgggagtttggcgttaagcacatcgacgaactgacatcgcgtcaggttaccgaagctatggagtttcttgctggaaaagctcttgaaggtgagttcatcggaaagcaggagaagaaaaccaacgagctttctgcaaaagaagcaaacagccttgtatggttatgggattacgccaaccgctcgcaggcattattccgtgaactgtatcctgcaatgaaacagattcaatctaactattccggcaaatgctacgactacggccatgagttctcgtacatcattggaatggcgagagacgttttaatcaatcacacgcgagatgttgatattaatgagcctgacggaccgacaaatatttccgcatggatgagacttaagaataaatag

SEQ ID NO: 387198 - DNA, 147 bp, Salmonella enterica
atgaaagttaaaactttaaggatgccggagtggcttgaaaaggctctggagcagtcagcgaaaaaggacgatcggtcatttagtaatgaggtactgaggagacttaaggaatcagtagccaaggatgggattgcttgccctgaatga

SEQ ID NO: 387199 - DNA, 258 bp, Salmonella enterica
atgtcagatagaaagtacaaaaacccacaagtaaacctaaggcttccgttagagataaaagaccgacttactgagcttgctgaggcaaactcacgctctttaaacgctgaaatggttgctgctcttgaggcatggactgagaaaaataaacatatacaagcacttgatctagctactattgcatctcggctaatagaacttgagcatgaagttgaaatgataaaaactaagcacggaaaagacaaaaaacccacctga

SEQ ID NO: 387200 - DNA, 450 bp, Salmonella enterica
atgcaagtaaccgtggaatacaatcaggatagctatgattatttcttctccccggtatttgttgagtttcccgacctgaagcaaacgctggtagatgactttatcatctacaaatcaacagggtcgcttccgaactactttggtcgtgacacctcgtaccataggcctccagacattgaagatgcaggattaatgcatctccatatagcgcttggtaaaaatgaatttgaacctataagaaatggtactgatgtgagtacgccgcaaaaacatcagtggcacagaacatccaatacagcccttgtttatgcgcaaaacctttttgatgagaataggtactcatttattgcgctttttcatccagtagctcacatgtcggcaaacaatgacgataggatgaggcggcttgcctcatatgcaagggacttcaggaacaccatatttgaataa

SEQ ID NO: 387201 - DNA, 567 bp, Salmonella enterica
atgaataagtatgattatgggattgacaaaatgatgacattaaacacagctaaagctggatttgccataggattgctgctacagcaagcttctgtgtttagttgtgaatcagttgtgttggataacgccacgcaggaatatcatgcatcagctttgagtaaagaccagatggatcacgatttgcaagttgctctgtctgctatacaagatctcacaaaaatgcttcgatactcctatcgtgtccttgctaatgcccatgatgaaaacgtatctaaagtgttagctattgtggatcaagaaaaatcccagcttattgagcatcaattgagagggcttgaaggcgctatgagggttgcgtttaaagagtctacagatgatttcaaagagatggcaaagaaagcttatgttgttgttgctgaggcaagatctgctgtaaccaacctaaactcccttatcaagcaacgaaccatctcaccagatgtgtttgatagctcagtggacatgactggacttcgcacccttgccgagcatgggacgaaggttttccattctggcaatttccactga

SEQ ID NO: 387202 - DNA, 486 bp, Salmonella enterica
atgaaaaaatcactgttaattatcctgcttctgctagcagggtgcgcaaaagtaagtgactaccaagcaagttgcgagcaacgttatccaaagctcagtgacatggcaaattgccttgatgccagcgtgaagaacgactcacgaatggcatcagcccccacaccaaaactatacgttctggctgccaaaatgctcgggcaaggagttgatgaaggcaagataagcgatgcgcaagcaaggcttgagcttcagaatctttatgtaaggctgcaaagccaggaacaggcgcaacagattgcgcaaagccaggcattccagcaggcgctattgaattatcaggctgtaaacactatgcaagcgatagaacaaaaagcgcgtcagcctgtaattactcagccatatcctacgcacgtagacacttacacaaactgcaactcaggtttcgggaataccgtaacctgcaacagtagtagtaatatcagatag

SEQ ID NO: 387203 - DNA, 267 bp, Salmonella enterica
atgaaaggtcaagcggtaatcataatattattaggtcttatcgtccttaagttatacccatcaatcttagccgcaactggccccatctcatgggtgattttagttatagtggttttggccctcctcattgtttctttcatgtggcttattggccttattggtgactggattgacaacaaagagaaaagaaaaaaagaaaaagcggaattaagagaaattaccaatatccttaagcaaatcgacaatatcaacaaaagggtaaagtag

SEQ ID NO: 387204 - DNA, 1380 bp, Salmonella enterica
atggccgacaatgaaaacaggctggagagtatcctgtcgcgctttgatgcggactggacagccagcgatgaagccagaagggaggccaagaatgatctcttcttctcccgcgtatctcagtgggatgactggctatcacaatacacaaccctacaatatcgcgggcagttcgatgtggtacgtcctgtggtgcgcaaactcgtttctgagatgcgtcagaaccctgttgatgttctgtatcgcccaaaggatggagcaagtcctgacgctgctgatgtgctaatgggcatgtatcgcacagacatgcgacacaatacggcaaaaatcgcggtcaacgtcgctgttcgtgagcagattgaatctggcgtaggtgcgtggcgtctggtcactgactacgaagatcaaagtccgacgagcaacaatcaggttatccgtcgagagcctatccatagtgcctgctcccatgttatctgggacagcaacagcaaactgatggacaagtctgacgcccgtcactgcacagttatccactcaatgagccagaatggttgggagggtttcgcagaaaaatacgacctcgatgcggatgatattccatcattccagaaccccaacgattgggtatttccatggctgacgcaggacacaattcagatcgctgagttttacgaagtggtcgagaagaaagagacggcgtttatctaccaagacccggttacgggtgagccggtaagctactttaagcgcgatattaaagatgtcatcgacgacctggctgatagtggatttatcaaaattgcagagcgccagattaagcgtcgccgggtatacaaatcgattatcacctgcactgctgtactcaaagacaagcagctcattgctggcgaacatatccccattgttccggtattcggcgagtggggcttcgttgaagataaagaggtgtatgaaggcgttgtcagactgacgaaggacggtcaacgcctgcgtaacatgattatgtcgttcaacgccgacatcgtagcccgcacaccgaagaagaagccgttcttctggcctgagcagattgcaggctttgagcatatgtacgacggtaacgatgattatccctactacctgctcaatcgcactgacgaaaacagcggagacttaccaactcagccgctggcatattacgaaaacccggaagtgccgcaggccaacgcctacatgctggaagcagccaccgctgccgtgaaagaggtggcgacgctaggcgttgacgcggaggcggtaaacggaggtcaggttgcctttgataccgttaaccaactgaatatgcgctccgaccttgagacatacgtgtttcaggacaatctggcgcaccgctatgcgccgtga

SEQ ID NO: 387205 - DNA, 1461 bp, Salmonella enterica
atgtcatcagaatttgaggcaatgcttgccgacgatatggggcgattcttctatgacccactaggatttgtgatgtatgcatttgagtggggagctggcgagcttgatggtttcgacggtccagatgagtggcagatagagtttctcactgactggggtgaggcgattcgcactaataactttgatggtataaagccggtagaagcataccgctgcgcaacaagctcaggacacggcatcggaaaaagtgcgctcactgcatgggtaattctctacatcatgagcacccgaccgttctgcaagggcgttgtaacagccaacacctcagagcagcttcgaaccaaaacatggggcgagcttggcaagtggaagaagcggtgcattaccggacattggttcgagtacaacaacggcaaaggcaacatgaacatttaccatgtagatcacatggagtcatggcgttgtgacggccagacctgccgtgaggaaaacagtgaatcattcgctggtcttcatgctgcaaactcaagcccattctacattttcgatgaagcttctgcggtgcctgacaagatttgggaggtggcagagggcggcctgacagacggtgagcctttctggttcgcgttcggaaacccaacacgcaacaccgggcgtttccgtgaatgtttccgtaagttcaagcatcgctggagacgcaagcaaattgatagccgtctggcgaagatgacgaacaaagagcttattgaagaatggcgaaacgattacggtgaggatagcgacttcttcaaagtgcgcgttcgtggcctcttcccgtctgcgtctgacctgcaatttattccccaaagctatgctgatgccggtatgtccagaaagctggagcacagtcaatatggattcgctccaaagattatcggcgttgacccggcatactcaggcagtgatgaggcgtgtatctatctgcggcagggactttattcaaggcttttaggttcttaccctaaaacagacgacgatgtgaagtttgctcaggtagtggctgctatcgaggatgaacacaaagctgacgcggtattcattgatttcggttacggcacgggtattcattctgttggtaaatcgtggggcagaaagtggcaactcgtgagcttcgcgggagaatcgaaagacccggcaatgctcaataagcgcggcgagatgtggaacgcaatgaaatcctggctgaatgaaggcgggagcattgatgaccagcagaccgctgatgagattgttgcccctgaatacaaagtgaaactcgacggtaagattgttctggagtcgaaggacgacatgaaacgccgtggtgttccatcgccaaacagggccgatgcgctggcgctgacatttgcattcccggtagtcaaaaacaaaccttcaaaagcaattcccgcaccgattagaccagtacgcagaggacgataa

SEQ ID NO: 387206 - DNA, 459 bp, Salmonella enterica
atggcggctgaagataagaaaattggtcgcccatcggcttacaaaccagagtatgccgagcaggcgagaaaactttgtctgttagggcatacagatgcagaactggcttctttctttgaagttagcgagcaaacaatcaatgcgtggaagcacgcgcatcctgtttttcttgagtccataaaaaagggtaaagctgttgcggacagtgaagtcgccgcaaagttattccaccgcgccaccggatacgaacacccagaagatgatattcgcgctgtcgatggttcgatcgtcataactcctactgtgaaacattatccacccgatacgactgctgccattttctggctcaagaacaggcagcgagataaatggcgtgacaaacaggaagtagaacacaccggagaggttagcctgattcagcgcattcaggaggcccgtaaacgcgcaaggggtgagtga

SEQ ID NO: 387207 - DNA, 528 bp, Salmonella enterica
atgaaagaagcagtgttggtccaggagttcgacttctctaagatggtgatggctatccaaggaaaggcgttcacgaccagtcagaagatcgccgattacttcggaaaacggcatgataacgtgctgagaaaaattagacaggttaagtcagaatgccctccagaatttgccgccctcaattttgaggaggctgattttattgataaaaatggcgaagcgcagccaatgttcaaactgacaaaagacggttacatgttggtcgtcatgggcttcactggtgcggcggccacgctaatcaaggtgcgatacattcaggcgtttaactggatggcggaccagttgactcgctggcaggagatgggtgagcaggcccagcatcgccatgcgttaaaggtcgccaagtcagaagtgaaggcccgcatcggtagcaagatgatgaatgcgcgcaagcgagaaaaaaaactgcttgcgctggaatttgaacagatcctctcgctgacgcagccaaaacttatttttaccgagtga

SEQ ID NO: 387208 - DNA, 573 bp, Salmonella enterica
atggctgttatctcttacctacgcgtatccactgacgaacagaacgcaagaaaccagattcagcagatagaggcggctggttacgcggtagaagcagactttcaattttgcgacgaaggattaagcggtagcattcctgccagcaagcgccccgcactgaatgaagcaataaaaatggcgcgtaagggggatgtattcgtggtggttgcaattgaccgcctcggtcgcgatgccgttgacgtgctgacaacggtcaagacgctggcagataaaggcgtgaaagtcgtcagtctccgggaggggttcgatctcagcacgccagccggaaaaatgatgcttcacatgatggccggttttgctgagatggaaaaaagtatcatcgccgaacgccgcgatgcggggatcgctcgcgcaaagtctgagggcgtgcattgtggtcggcctcaattcgaacacggtgatttaatcgcttctctttgggctgatggcctgagttatccgcaaatcgtttccgaactggcgtccaaaggcattaaagccgggaaaactaccatctaccgctttaagaattga

SEQ ID NO: 387209 - DNA, 243 bp, Salmonella enterica
atgcctgtcatactaagatttaaggggtatcggttctttttctattcgaatgagggtgatccccgtgaatcggcacatattcacgttcgcggcactgatggtgaggcaaaattttggctaacaccagaagtgctgctggcgcgtaatgatggttttaatgctcgcgatctgaaggaactggtgggcgtggtggaagaaaatcgcaaactactaatggaggcgtggaatgactatttcgcctaa

SEQ ID NO: 387210 - DNA, 249 bp, Salmonella enterica
atgactatttcgcctaagaacgtaaagttcgacgaatacaatatgtgggtagagttaagcgatgcccgcacgctgggcgtaccgttggcatggtttcccaaattgatgcacgccagccctgatgagcgaaacgactttgagttaagccgccggggtattcattgggatagcctcaatgaggatgtttctattgaaggactcctggccgggcgtggcgatgtgacattcaggccgcacagcgccgcataa

SEQ ID NO: 387211 - DNA, 429 bp, Salmonella enterica
atgaatgaaagcgatgcgaagcgagatgagggtattaagtatcacctggtgaaagcgggaatagctggcacagagaaacggtctgaatgggaacgccactgtgaaaaaaaacagatcccctgtatctgtataaaaccgcagggcagcacctcaaccgtacatttcgactacataacgtttgatgacgcactggatgagcttttttctggcgagtcagaacaggcgttgcagaaagctgtactgaatctttttgctgagtatgcctcttgttatccgtcaaaaatgacgtgtaccaacgcagggatggttacgacgattcaatcagtgccaaaagacgtcgcgcctttactggccacagcgctatatgacgttgttgcttcatatgtaacgaaggaactcaacgatacttaccagcgacagcatagataa

SEQ ID NO: 387212 - DNA, 369 bp, Salmonella enterica
atggcagatattaaaacatacgaaatagattatgacctgaaagccagtgtcactattgagattgactacgatattgttagtgaggcttatttgcatgaacttaataacttttggacaaatgctaactggcgcgttaaacgtgatggtggggttcttaacgcagtattgaagatgctggcacgtgagattatgtatatccagttcacggctggttataccgttgatggtttgattaaacagtttgactgggattctggtaatgggcaggaaggatggccacctatggatggaagtcacggtattaaaattattgataccgaagatttagagcttgatacggatgatatgacaatcaagcaaattgattga

SEQ ID NO: 387213 - DNA, 2697 bp, Salmonella enterica
atgaacgtcactattcaacaggaagttgtcagacggttaattaatgacttctcctttaaagagcgtgaacagtatttgcagcagggcgtttgccctgcctgtcataaacgcgagttatttaccagtatcgaaaaaccctggatgctgaaatgtggtcgtgaaaataaatgtggcaaagagatactggtcaaggaattgtaccgggatatttttgaggactggtcaaagcgttatcagcccacacctgaaactcccaatgccacggctgaagcctatttgcgtgaagcgcgtgggctggataccagcaaactggcgggctgttatacccaggggactttcatcaaaaacggtctcggcagcgccacggtgaagtttaagctggcgaacggcagcagctgggagcgaatcattgatcagccagaccgttttaaccagaaagccaatttcatggggaactatgcggggtactggtgggaatatcccggtctggatttgtccgaacagaaagagatctggatcaccgaaggtatttttaatgccatcgcgcttaatgaggctggcagggccgcagtggccactctcagcagcgttaactatccaaaggtgctgctcgatatgctggctgagacacttggcgataagccacgtccacggctgatatgggcatttgatgatgataaggccggtcgcagccatattgtcaaattcgcacatcgtgcccgtgatgccggctgggaagtttcagcggctttgccgtctgaattcggttcctctctggactggaatgacctgttattacgtgatcgcctttccaacaaatatctgtctaagtaccggtactacggcagactcttactcgcagaaagcccgtcagcgaaagcgatggagatgtaccacgaaaacagctggcacagctttcattttatttttggttcccgtacttactggtttgagctggattttgaaaaatacagcaaagcattaagacgtcttcaggaaactgaaggtgaatttgatgaagttaaacttcaggaacgtgcgttacgtgaatctaatgggcttgaagaaatagcgaactgcgttatgcagccactctattaccagacatccaaaccgactgatgaggcctggtattacatccgggttaagttgccggacggaacgtcggtcaaaagtacctttacagccagtcagttgacgagcgctgctgagtttaagaaacgccttctgcatatggcaaagggggcgctctttaccggaacgacaaaacaactcgatcgcattattcgttcgcttctcgccattaaagaagtcaaaacgatggattttattggctataacaaggcgtatgactcctgggtatttaacaatctcgccgtcagcaatggtcagttgtataccattaacgatgaggattactttgatatcggtaaattaccgttgaaaagtcttagcctgagtccatcactggtgcttaatgacaattttcaggagtttgaaacagcatggcttgacgatttatggactgcctttggtgagaagggatatgtcgcgctggccttctggtttggctccttttttgcagagcaaatccgtatgcgtaataagagtttcccttttctggagattaacggtgaaccgggtacagggaaatccacgcttattgagttcctgtggaagctgtgcggccgcgaagagtacgaaggttttgacccatccaaatcatcagccgcggcgcgtggccgtaacttcgtgcaggtggcaaacctgcccatcgtcctgattgaaggtgatcgtgatgaatcaggacgaccggcgagaaaccgggcttttgattttgatgaactgaaatcgctttataacggccgggcaccacgcgctcttggggttaagaccaataacaatgaaacctatgagccacccttcagagggagcgtagtgatagcccagaacgctgaggtgaaggcatcagagccgattcagacacgtatcatccatgtttatactgacaagtccggacaaagtccggaaacactgcgcgcggctgaacgccttgaaaagatgccgatggagaaggtttccggatttatgctgaaggcggttctggccgaaaagcaaatccttgaggggtatgatcgtgagtttgaagcggcgaaggaagaatttcgccagcatgaggaaatcaggattcagcgcattatcaaatgtcattcccagatactggcatttcttgctgtactgcctctggttgtccctgtttctgcgtcacgtctggccctgacacgggactatatgtttcgcatcgcgtcagaccgtcagaaatccatacagcgtgataaaccacttgtgcatgaattctgggaaatggtggaatatctggatgaacgtgaagaatacggcgttaaccactctgaaaatgagaacttctgggcaatcaactttaaccatattgaagaagttgcatccatctataaacagagtttcagagttccactcaatgaaattaaagagcaactgaaggaaggcaaggtctataaatttatcggtcctaaatctgtcaggagccttgtcagtaaaaaatttaacgctggtaaagcctacggtaaaagaatgtccgacatttataagtgctgggtttttgcaaagccggatataagtagtcgtagagtgcagtcagatgatgatgaagatgagtaa

SEQ ID NO: 387214 - DNA, 219 bp, Salmonella enterica
atgctgacagtgacctctcatgcaagtgaaagtgtcattaataaagctttcattctgctaaatgaatattacagtggcaaaaagaattatcaggttgttaaacctcatcactaccttaaagtgaatgtgtcattacgctggcgcttactcagtaaagatggtggtaagcgctgggtgttaatgacgcatgagcgttataacaagcagttccgaatttag

SEQ ID NO: 387215 - DNA, 561 bp, Salmonella enterica
atgaaacatttaatgattgaaattgaggcaatggacgataaaccaacggcagcagttacagctatcgcagcggtattttttaatcctgaaactggtgaggtgggtaaaacattttatcgccgtatcagtctttatgatgcgatgagtaatggcggaaccgtcagtgcggaagccatcgagtggtggttgcgccagccttctgatgttcgttgccagttgcttgatgatgattgtcaggatattgagctggctgtgtgtgacttctatgacttcgtaaataagaatatgactccactcgcgactaaattatggtgcggttgcccgtcacttcatggcaatattgttcgtcatgttttaaataaatatactggcgtgggttttgaatatggtaatgagcagtcggtagtgacaatggttgaactggctaaatctcttggactgaatatggatgctattattccgtattcattcacacggaatgcatataatcacgccatccataatattaaaattgtttcatatatctggatgtatctcgataaaatagccagtgtgagataa

SEQ ID NO: 387216 - DNA, 300 bp, Salmonella enterica
atgtcaaatacgataggcgaaaaaatagttctgattagaaaatctgagtatctaaatagacagcaactcgctgatataacaggtattccttatggaacactgagttattacgaaagcgggcgctcgacccctccgactgacgttatgatgaaaatccttcaaacgccacagttcactaaatacacaatgtggtttatgactgaccaaatctccccagaatccgggcaaatcgcaccggcgctcgcacactttgggcaagacgaaacaaccttacgccaatcagaccaaaagactggttaa

SEQ ID NO: 387217 - DNA, 450 bp, Salmonella enterica
atgaaaacgacttttaaactgtcgttcatgatgttcgtggagtggtttatctggggtgcctggttcgtcccgctgtggctatggctaaataaaagcggcttttccgccggtgaaataggctggtcttatgcctgtaccgccattgcggcgatcctgacgccgattctggtcggctccgttaccgatcgttttttctcggcgcaaaaagtgctggcggtactgatgttcgcgggcgccgtactgatgtacttcgcagcgcagcaaaccacctttgccggattctttccgctgctgctggcctattcattaacctatatgcccaccatcgcgctgacaaacagcattgccttcgctaacgtaccggacgttgaacgcgattttccacgcattcgcgttatgggtaccattgggtggatagcctccggcctcgcctgtggattcctgccgtaa

SEQ ID NO: 387218 - DNA, 648 bp, Salmonella enterica
atggcacacctttcggcccagggaatgcaggccaaccagcagatattctttttatccgacggcgcggataacctgagggaactacagttcggtatgtaccctgagtcaattcatgtgcttgactggtttcatattacgatgcggctgacggtgttaatgccgtatgcaaaagggctgcaggcatcagatctggaggcggacagtaaggtttctgcgcttctggaaagcagtaaacgatacctctggcatggcaatgttgtcgccgcgctggagcatattgataattgcgttatgttctgtgacaaccctgaactgaactatgcaaacctgaaatccctgcaaaaacagctggatgaaatgtatacctacatccggaacaatcaaatgatgatcccaaactacggagaaatgcgccggtacggggagccggtatcaacggcgtttgtggaatccacgatcaacgaagtgatcgccaggcgaatggccaaaaagcaacagatgcagtggagcagaaaaggcgcgcattatttgttacagacccgtaccggtgttctgaataacgaactgcaggataaatttgccagctggtacccgggttgctcaatagacgatcagagggacggggagttatctgtgatagcagcatag

SEQ ID NO: 387219 - DNA, 345 bp, Salmonella enterica
atgttttcatcaaagagcacacaccattttaaaccatttttccttctgccttttatattttcaattgcgggatgcgataatatgggaggaatatcctgcgacggaaaagatgaaataaatagtataaaagaacaaatcaaccatgaaagaaataaacaaaaacaacaggcatctgtactttcattattttttaaccatctcatgtttgatggtgcatttgacataaagagcatagaaaaaaaaaagagacaaagaacaaaaatcactcacctgctcagcaaatcttattttggagagcatgaaaaactgtggggcagtcgtgaactatgctgctatcacagataa

SEQ ID NO: 387220 - DNA, 909 bp, Salmonella enterica
atgtccagagggtgtaaattgttaaaacgtgaactcgtcgttctcgcaagagaaggtaagggaagttttaaaacagtgtccgatcgttctaaaatagtagagcgattatctcatcgtttgttggatttaaatgttcagatccgctctgcgcagcagttaaaggtgagacatattgaattatatattgaaagtcgtaaggccgaaggtatttctgacaggaccttacagaatgaaatggccggtattcgaactatactttatctgtcagggaagacgaaaatggctgatccgaatcacgaacgattaagtaataaagcgttaggtatttcgggaaccagtcgtaggggaacaaagttggctatatcagacgagcgctatcgcgaggcgctcgccctgattaaagcgaaagatgagggggtagctgcaacaatgcaactttcccgctatttaggtctgcgtaatgaagaagcagtacaggcagtaaaatcaatcaagacgtggaagcaggcaatattacgaggtgatgaccgtgtcagaattatatttggtacaaagggagggcgtgcccgtgatacacgtgttatcgataaagaaaaagtattgtcggcaatcaatgatgcaattttatgtgcagagaaaaataatagaaaattaatcgataaaccttcgctgcaacaggctcttgatcgttatatcaatatcatgcgtcgggtcggcggtttgaaatatgaaaattcaaatcactcattacgttatgcttacgctcaggatgcggagaaatattatatttctaaaggttttactcaaaatgaagcctgcgcgttaacatccattgatttggggcacggtgatgggagaggggactatataaaaagagtctatagtcaaaaagatctgggggaggagtaa

SEQ ID NO: 387221 - DNA, 369 bp, Salmonella enterica
atggacgtttattcactgaaaacccgcactgacgctttcatctggcttgctcatatggaaggcgatttgttgagtatccgggcgtctgcgaacgccggtttatatccgccttacgacgagaaggctgaagagcctgagtttgaatgtgcggtatttaactgtggttttgcctgcggtgaatttttagaaaggctgcagtcgggtgatatcgaaccccttacgaccgccgcaaaagcactgtttggcacgcttgaatatctggggagaacgctttgtgaacccgtctggatgcaggcgatgagccaggggcagcatgatgtccgtgctgaccgggcgatatgcaatgctgaagcggacggctggatatag

SEQ ID NO: 387222 - DNA, 222 bp, Salmonella enterica
atgatgtccgtgctgaccgggcgatatgcaatgctgaagcggacggctggatatagcgatctgcttttcacttttcgaggtctgccacgcaggcctgtctgggccggctggctgaccactgccgtatttgcgcagtggttcccggaacattaccggctaaccgttcctgtctttcgtttgtccgttgtttcccctgaccgggcgcaaccggtggacgaatga

SEQ ID NO: 387223 - DNA, 450 bp, Salmonella enterica
atgattattaaccgcttgtttgtttttttgctgcgtcatctgtggcgcctggtgcgctgggcagctctttcggtgtatcacggcattgcggtgctgtaccgccgaagacaggccagactgcaggcatccgactggcggccacgaacggtgtataccggtcgctggcaactggccgatgacggtcagtgttgtggccgggcggtggtacttcgcctcagtgacgcgctgaaacccggcgtggaactgctttacttcggtgaggagagtgctgagccgtactacagcgagcgccagagtgtggacgataaggagtcagtgatggtcgccgagcagatgctgttgcggttcctgggcagccggcatcggcggcagaaccggcgcaacgtttctgttccggtcctggtgactgacgctgtggccaccgttccggttaacgatgaggcggcatga

SEQ ID NO: 387224 - DNA, 294 bp, Salmonella enterica
atggatatgtcggcgctgctcagcagcacgccgccggccgtcgccatcgaggagccggtgtgggcacagatggtcagttacccattggcccccgcctgtgaaaacgagcggctgcagcggctgatttaccacggttttgaggccctcagtcaggcgccttcaggccaggttatggtggagtttgggtatttctgcctgccacctgatggtaaccagaacgcgcccctgtggcagaacgtctgtattaaacgtgaacattcatccggtcaggtgacactcactttcgaccgttaa

SEQ ID NO: 387225 - DNA, 1710 bp, Salmonella enterica
atgaacacctcattacatccggatgatatcagccggtttatcaccggccgtattatcggcagtctggccgcaggccaggtgccgtggcacggcaccgtgccgggtttaccggagcatgccctgacgggcgagccgtttaccggcgttaacgtgctgttgttgtggcaggccatgcagcagcggtcactgcattcaggtcgctggttaaccggcgatgacctccgccagcttggcggccaggtccggagcggtgaaaaaccggtgacgctggttcgctaccggccgacgctgtcactgtttaaggtgattaaccctgaacagtgtgacggactgccggagacgctgcagcccgggtggccactgccacccccgccgcaaccgtcactgagcgttgtccgtgacctgctccggagcagcgggatacccgttatccaccgggacaatattttaccagtctaccgggcattacatgaccggattgagctcccgccggcggcggcttatgccggggaagaaacatactggcaggatatgctgaatctgctggtccaggctaccggacacccgcagcggttacatcgattcggcttaacggtggacaggcgtactgatgaggttcaggaagccctggtggcggagctgggggcagcgtttctgacggcgtccctgggactgtccggcagacagccctcgcggcacgacgtggcaccctgggtgtcatttttacacgacgacccgtggcgcctgtttcgggcggcggaggcagcgcgaaaggcgatggtgtggctgagtgcgcgaagacccgcgatgacgacggtggagatgtggcagaagatggccacgctgatactggagacacattacggttttccactcgacgacacgatgctgggctgtcgcagtgtggttgagcgccatcttgagtgtggcatcacaccgctgttgtccgtgatgcagttcatgctcgatgaggtggcgctgaacccggatttgcgggagaagtgccgccaggcagagcgtattctgacgttctggatacgcggtctcgatgcgctggcagaggcatcttacgatatggcgatactgccgcgtacggtgtcagagtgcagcggccgggttgaccggcttttaccgggagacccgcaggcgttgctggccctgccggaggatgccttcctgcgtctgaccggtcaggggggcctgatgtcgggagagcagttacccagggaactgcttgaagcgacgctgccttactggacacgcttcatggcgtggacggcccgggagctttaccagacggaggaccggtgcctcgtgcagttggggcgcctttttcgccggctgattgttgaaccccgaaaagtgcgcagttttaacctgtcgtttggtcgcatcgagctgcatatgtccgggcgcgatatagacgagtgtcaatatctgtacgcgtatgatgatgcttctctggaggattatctggaggaaatcatggccggtaatctgaccccggttcgctttgaagcccgggtgctctaccacaatgattcagagctgaatgttttcacgcgcgataccgatgtgattgacactgaacatcctcacgtcagtgactggcagactgtggtcagtgaggcgctggactggatacgccaggagcgtgcttcactgaataagataacgacactgcggccgacactgaaactggctgcctga

SEQ ID NO: 387226 - DNA, 327 bp, Salmonella enterica
atgctgaaattcagcgcaaaagaattaaaaccggttctgcaggaagcacgcaaaaatcactgtggcgtggtcctggtcaaagatcacggcgtatacattatgtccgaaatcggggcgctgacttcacgtggccggaaggtggcttatgcgaagggatgtcatcctgataaggatgaggcctggtgggagaccgcgcgggcagaagtgggtggtgatgattttggtgagtcaatagacctgactgaaagcatgattaaccgcattctgaacgaggggaaaccgttatacatcacggccagtaacgaggcatttaagatcgagtgttaa

SEQ ID NO: 387227 - DNA, 279 bp, Salmonella enterica
atgtttttgatggatcggagacatctgccaggtctgtctgctgcacaattttccatccgtctctggcaagcgccggaggagattcctgtcggggcagatgatttaattacctgcacgattatcattctggtgtcagtgatttactttatcccagtctcgcaaccggtaactcagcccaacgggtggtataagccggggaaagtagttctcttttcatttgccactcaggagcgatccctcgtcccgcaaaccacactttccccagccctgaatggttaa

SEQ ID NO: 387228 - DNA, 252 bp, Salmonella enterica
atgaaatcactacttattacttcattggtcatgggatttattacagtgaatgccgcatctgccgctcaggaaattaaccatgcagatggaaaagaaaaaatcggtgtagtctcagccagcaatgcctatacgcttgatgatttatcgaatgcactctctcgtaaggctgatgagcaaggagcaacatcgttcaaaattctgtcaaccacggggaataaccggctgcacggagttgctgaaatctataagtaa

SEQ ID NO: 387229 - DNA, 792 bp, Salmonella enterica
atgaaaatactcgttgcaggggcgacaggaagtattggccttcatgtcgtcaataccgctatcaaaatgggccatcagcctgtagcgctgatccgaaataagcgcaaagtgaaatcgcttcctcggggaacagatattttttacggcgatgtttcattgcctgaaacactcaccgaattaccgaaagatattgatgccatcattttcactctcggttccgatggtcagggtcgtattggtgccagagcgatagactacggcggagtgcgcaatattttacgaatattcagggaggtacctcttcgtatcagcctgatgaccacgattggcgtaactgaacgactcagcacctggaatcaacgcactgaggttcatgactggaaaagacgtgccgagcgtctggtcagggcaagtggtcacccctataccatagtcaggcccggctggtttgattacaacaatgatgatgagcacagaatcgttatgcttcagggggatcgtcgccatacgggaacaccggaagatggtgtgatatcccgggagcaaatcgcccaagttctggtcagtgccctgacccacgacgaggcaaaaaataaaacgttcgagctggtggctgaacgaggtgaagcacagcaggatcttaccccactgtttgcagacctgctggctgatgatccacaaaaaaatgatggggttctggacatagacaatatgcagctcagagaagaaccggagtgcattattaacgaactgaacctgtattcaaaaaaattaaccaatctacaaccctga

SEQ ID NO: 387230 - DNA, 894 bp, Salmonella enterica
atgctcaaagaaaatttcaacgaactgcaaatctttcttgtggtggcgagggaacgaagttttaccaaagcggcgggtaaactgggcgtttctcagtctgctcttagccacgcgatgaaggccctggaggaaaggctgaatatccgccttctgacccgcacgacccgaagcgttgcccccacggaagccggagagagaataattgcctgccttgaacctcgtattgccgatcttgaacaggaactggaatcactggttcagctgaacggcactgcctccggcaatattcgtttatctgccggggagcatgccgcgcgaagtgtggtgtggccgaagttaaaacccttcctcagggaatatccggaaatcaatctcgaactggtggtggataacggctttgtcgatattgttgaggggcgttttgatgccgggatccgcctgggcgaaagtgtagataaggatatgattgcggtaagaattggcccggacatgagaatggctgtggtaggagcgccgtcttatttcgctgcaaaccctgcacctgaaacgccgcacgagctacaaaatcaccggtgtatcaatatgcgcctgccgacagccggtgggctttaccactgggagtttgagaaggaagggaaaccgttacgggtccgagtggaagggcaggtaacctttaatctgcaggcagaaaggattgatgcggctttatccggttttggtatcgcctgcatacctgaagacagagtgcaggattatataaagtcaggagagcttattcaggttttgctggactggtgcccatctttccccggatattatctttactacccgagccgtaagcagcatccgcccgcttttgcgctgatgattgatgcgcttcgctaccaggaataa

SEQ ID NO: 387231 - DNA, 990 bp, Salmonella enterica
atgcaaaaacgttatctgggtaaatcccgactcgaagtctccgcgattgggctcggttgcatgggcttaagccacggctatggtccggcgaccgatactcgtcaggctatcgagctcattcgcgcagcggttgaacgtggcgtcaccttcttcgataccgctgaagtgtatggcccctaccttaatgaagagtttgttggcgaagccttaaaaccagttcgtgaccgcgtggtcatcgccactaagtttggttttatttttggcgacgacaacaagcagcagattttaaacagccgtccggagcatatccgtgaagcggtggaaggatcattacgccgtcttaaaactgatgtcattgacctgctatatcaacaccgtgtcgatccggatgtcccgattgaagatgttgcgggaacggtgaaagacctgatcgctgaaggcaaagttaaacatttcggtctgtccgaagcgggtgcgcaaaccattcgtcgtgcgcatgccgtacaacctgttacggcgctgcaaagcgaatactccatgtggtggcgggagcctgagcaggagatcctgccgttactggaggaactgggtataggttttgtgcccttcagcccattaggcaaaggcttcctgacgggatcgattaagccaggaaccacttttgggaaggatgattaccgcagcaccgttccgcgtttcgccgagcaggcgattgaagccaatgaaaagctggtctcattactgggtgaactggcggcagagaaaggcgtgacgtctgcgcaaatcgccctggcgtggctgctggcacaaaagccttggattgctcctattcctggcaccaccaaactgcaccggcttgaggaaaacctgggggctgccgacatcatccttacgcaggatgactcttgtcagataacccaggcgcttgaaaccattaaagtcgtcggcgaacgttactctcctgagcaccaggcccgcgtaggccgttaa

SEQ ID NO: 387232 - DNA, 852 bp, Salmonella enterica
atgcaaactgtaaaactgaacaacggtattgaaatgcccctgctgggctttggtgtgtttcagatgtctgatgccgctgaatgcgaaagagccgttattgatgcgatcgatacggggtaccgcctgatcgataccgcagcgtcttaccagaatgaaacccaggtcgggaacgctctgaaacagagcggtatcgcgcgtaacgaactttttgtaacgaccaaactttggctacaggataccaattacgaaggcgctaaagcccagtttgaacgttccctgaatcggctgcaacttgattacgtcgacctgtatctgattcaccagccttatggcgatgtccatggggcatggcgtgctatggaagaactgcagcaggcaggcaaaattcgcgctatcggcgtcagcaacttccatactgaccgactggccgatcttatcgccttcaacaacgttgaccctgcggtgaaccagattgaagttaaccccttcaaccagcagttgcatgcggttccatggaatcaaagccatggcatacagccggaagcctgggcaccgtttgcagagggtaaaaatggcctgttccagcatcccgtgttaacggcaattggccagaagtacggcaaaagcgtgggccaggttgtgctacgttggatcttccagcgaggcatcgtttcgctggcgaaatcggtgcgcaaagaacgcatgcaagagaacatcaacattctcgattttgaactcagctctgaagatatgctgcaaattgccgccctcgacaccgcaaccagcgccttcttctctcaccgcgacccggcgatggtggaatggctgactggccgcaaacttgatgtttaa

SEQ ID NO: 387233 - DNA, 885 bp, Salmonella enterica
atggcgaaaagggagaactacaacgagctgtacctgtttatgcaggtggtgcgggaaggcagttttaccgctgcggctcagaggctggggcttgctcaatcaggggtcagccgttccgttcgtgagcttgaagaaagactgggcgtccagctactggtacgcaccacacgtaagctttcgctgacgcaagcgggtgaacagctctaccagaagacggcgtctggatttgatacgttggatcttggacttgccacgctagcgcattatcgtgagacgccttctggcacggtgcgtatcaatgccagccagcacgccattgataaatgccttctgccaaaacttgcggtctttaaacagcgttatcctgatatcaggctcgaactcatgaacgagagccgattcgtcgatattatcgaggagcgattcgacgcaggcgttcgcctgggacccgaagtaggccagggaatggtcgcggtgcgcattacgcccaatatggaaatggccattgtgggaactcctgagcattttcgtcgctacggttttccgcaaaccccggcggatttaaaggcgcatccctgcatcgcctatcagtttgccgacggcagcgtatatcagtgggaactcaatcaggatgataaaaaaattacccatcgacctgaaggacagtgggccttatctgacagctatatggaagcagaagctgcccggctgggtctcgggttagcctatgtccctgttgaattagtcgacgatgatttagaacacggtaagcttatcagggtgttgcagcgttacagcctgcgaatggaagggttgtttctttattatcctcatcgtaacgtctccccagccctgcggatggtcattgatactttgaaaatctga

SEQ ID NO: 387234 - DNA, 1137 bp, Salmonella enterica
atgaaagccttcacccgaacgctaaaaaccgcgatgcctgccatgctgctgttcgcatctttaagtggagtcacgacaatgagttatgctgattcaaccaatccgaatgcccctgtttcgatgatcgaaaaatgggataagacatttgccgagagccagaaagtcgatcatcgtaaggtctcgttccagaatcgatatggcatcaccttagtgggcgatctttacctgcccaaagatcgtggcgatcgcaagctggcagcgattgctatcagcgggccttttggcgcggtgaaagagcaatccagcggtttgtatgcgcagacgctggcggaacagggatttgtgaccctggcgttcgatccttcttatacgggggaaagcggtggttatccgcgtaatgttgcctcgccggatatcaacactgaagatttcagcgcggcggtagatttcttagggctgcaaaaagaggtggatcgtaaccgtatcgggttgcttggtatttgtggctggggtggtatggcattaaacgacgccgcgatggatacccgtgtcaaagcggtcgccaccagcgtgatgtacgacatgagccgggcgatggggcatggcgtgggtgatggcaaagaccgttattcaaccgccgaccgtcgtgctgttctgcagtatctgaatgagcagcgctggaaggatgccgaaagcggaacgttcgcacagggtggccatgatattaacgttgatagcaacggcaaggtcagtgcgggcgagcgcattctgcctgaaacgctgccggccaatccgcatccggtgctgaaagagttcttcgattactaccgcatgccgcgcggtttccacgagcgttccgttaactcgacgagtgcgtggacggcaacgatgccgctgtcgtttatgaatatgccgctgctaagctacgccagtgaaatcacgatcccgacgcttatcgtgaccggtgaaaatgcacactcccgctattttgctgaagacgcttataaagccgtcggcagtaaacagaaggaactggtgattgtgccgggagcaaaccatgttgatttatacgacaacgtcgccgggaagatccccttcactaaatttgacgagttcttcaaaaccagcctgaaataa

SEQ ID NO: 387235 - DNA, 1128 bp, Salmonella enterica
atgaccctgtgcgtgtttgtgctgatcgcttcggagtttttgcccgtcagcctgctcacgccgattgcccgtgatttaggcgtgacagaggggcgggctggtcaggggattgccatctccggtgcgctggccgtcctgaccagtttgagcctgtcgacgctggccggaaatgtgaatcgcaaatatctactgctgggaatgacgatcctgatggcaatctcggggctggttatcgcactggcgtccagttatctggtgtatatgacgggtcgtgccatgataggcatcgcgattggtggattctggtcgatgtctgcggcaacggcgatgcgcctggtgccggagcatcaggtcacgcgtgccctggctatttttaacggcggtaatgcgctggcaacggtcgtcgccgcgccactgggtagctatcttggcgccactatcggatggcgtggtgcctttttgtgtctggtccccgtcgcggttgtcgcttttatctggcagtgtatctgtctgcctggcatagatgcgcagacaagccgcaagtcacaaggctctgtattccacttattccgccgccgcatggttgcggttggcatgctggcctgtggcgtttttttcatggggcagtttacgctatttacctacgtgcgcccgtttctggagtcggtgacgcgggttaattcctccggcttatccctgatcctgctcgctatcggtgtggcgggttttgtcggcacgctgattgttgccattttcctcaatgcaaagttctaccctacattggtagccattccgctgttgatggcggttatcgccatgacgttaattctgaccgggcatcgcgtttgggtggttgggctgctgttaggtttttggggattgctggcaaccgccgcaccaacgggatggtggacatggattgcgcgtgcgctccccgacgatgcggaagcgggaggtggactgatggtagccgtgatccagttttctattgcgctggggtcaacggtcggcggcatggtgtttgaccaccttggttggcaaagtacgtttgcattgagtggcttgctactcattgctgctgccgctctgacctttttgacctcacgtcagcaagccagcacgtcttaa

SEQ ID NO: 387236 - DNA, 1065 bp, Salmonella enterica
ttgaagacaatcttaaaaacgctggccatctgcgtaatggcaggtggcctggtggctcagtcggtatacgccgagccactggtcattcaggaacagggaagtttttctgctggtggcaccatcatcaccgcaccaggaaaatttgacgcgaaaaagccgctggactctgctggccaaacctaccatggcgatcatgcctcagtgttctaccaaatcccggagaatccgcataaataccctatcgtcatgctgcacggcgcaggtcagttctcccgtacctgggaaagtaccccggatggtcgcgaagggttccagaatatatttctacgtcgcgggttctcaacttatcttgtcgatcagccacgccgtggcagcgccgggcgcacgactgtagagggtactgttacgcctaaaccggatgaacaaatgtggtttaaccagttccgagttggcgtgtggccagagtattttaaaggtgttcagttttctcacgacaaagaagcgttgaaccagtatttccgtcagatgaccccgaacaccgggccgtttgatatcaatgtcatctctgatgcgatgtccgcagtagtggataaatccggccccgctatcctcttcacccactctcagggttgcggaccaggctggtacacggcgatgaaaaacgacaaggtcaaagccattgtcgcctttgagcctggcagcagctttgtcttcccggaaaaagaactccctgcccctatgccaagcgcgttcgatacgctgaagggtgagcctgttccgatggaacaatttatggcactgaccaaaatcccgattctgattatttacggcgataacatcccggataaacctgtcgccatgcccgcgcaggacagctggcgcgtgcgtctggcgatggctcgtgagtggcgtgacgtggtgaacaagcatggcggggatgtcacggtgacgcatctgcctgaagtgggaatcaaagggaatacccacttcccgttctctgatttgaataatgtgcagattgcggatttggtgagtcaattcctgaaggataaagacctgcaatag

SEQ ID NO: 387237 - DNA, 585 bp, Salmonella enterica
atggagcatgatcccaaccgcagaatgttaatcaccgcacttgccgggctgacgctggcgaacgtttcttttgcatcagctgcgaccggaaccgcaaacgtgcagggtaaaagcagtgttctggtggcgtacttttcccgcagcggaaatacacgggtgattgcgggcgtcattcaccgcagcctgaataccgatctgtttgaaatcgaaccggctacaccttatccggaagactattttcagaccgttgaacaggcgaaaaatgagcgtgagcggggagtaaaacccgcattgaaaaatagcgtcgcagatatctcacgctacgagaccctgtatttaggctttccgatctgggggaccagcgtgccgcctgtagtgcaaacatttctcagcagccacaaccttgcgggcaagttaatcatcccctttattactcacggcggctacggcaaaggagacagcgacaacatccttaccagtctcgccccgactgcacgtcgggaaaaaccgctggtcattgaatgcgaccaggagcgaagaaccactgaaacggtcaccagctggttagagacaatacgcagttaa

SEQ ID NO: 387238 - DNA, 762 bp, Salmonella enterica
atgaacaataccacgcccattaaagcattagcggcagcagtactgctgacctttggttttggtctcgccgcacatgctgcccccgtcaataaaggagcctcagaaatgaaccacgaaaaaaaggtttcagatacgctgtcagccagccaacaggccatcccgttgattgcggcatcgatggccagcagtcagatggacaagctgaattccgccctgaatcagggtcttgacgcaggactcacgataaacgaaaccaaagagattctcgtccagctttatgcctacacaggctttccccgtagcctgaatgcacttagcgaactgatgaaggtcgtcgaagcacgtaaacaacgtggtatcaaagacgttgagggtaaagaatcggttgccccgatccctgtcggggatgagcttcgccgtgtcggtaccgcaaaccagacaaaaatctcaggcgctcccgtccaaggcccgctgtttgattttgccccggtgattaaccagttcctgcaaacgcaccttttcggcgacattttcgcccgcgataacctcgactggcaaagccgcgagctggcaacggttggcgcattagcggccacgccaggcgttgaagcccagctgttatcacatacacgagcaagcatgcaggtcggcctgacggcgtcgcagctgcgccagctggcacaggttctgcgtgaacatggcgaaagtgatgtagcaacgcgcgctgaaaaggcgctgcagcaggcgcttgcaaacaattag

SEQ ID NO: 387239 - DNA, 480 bp, Salmonella enterica
atgatcggacatttacgttatctcgggctggtactgcccttcttcacattttcatcctgggcagcggaacaaaattctgctgtccatatcgccccatcaggaagtcagaacgcggtgttcgggccagccgagaactttaccggtcgcgtcagggttgatcctctcttcaaaccggataacgacatcagtgtttccggggcttatgtcacgtttgaacccggcgctcgctccgcctggcatacgcatccggcaggtcagaggctgattgtgacctcgggtgttgggctcacccaacaagaaggccagccggtgcaaattatccgcgctggtgatgttgtctcttgcccggcgggcgtcaaacactggcacggggcggcacccggcagcgcgatgacgcatctggcgataaccgggattgtggatggcaaaagcgttaactggatggagaaagtgacagatgaacaataccacgcccattaa

SEQ ID NO: 387240 - DNA, 1458 bp, Salmonella enterica
atgcctaagcgttccatctccgttcacctggcgctgatgtttgccttatccgcgctgctgattgtgtccatcatcggcatcctgctcagaaactctttacatgactctttgcaaaagcagatgcacaacgaattgttgtttcgcgaatcattaatgagcccgtggatcaccgcccgaacctcggctgacggctggtcgacgttggccaataaattcactgtattaaccaattctgaaggtgaacgcgttcgctactggatagtgagcgatgactcacgctttagcatggggggaacaccgccggtgggcgttcagtggtcttctttgcaggaaggctttaataaagtgcccggcgcatcggaaggtgcgtgttcactatttctgttagtgaaaactatccccgccaacggtaaaaggcctgagctacgctacgtggttgccatcgattccacaccgtacatgggaacactcgatgccttcacacgtacactattgattattgccgccctgggtgtcgtgattgtcgccttactgggatacgtcgtttcaaggattggtcttcgtcccgttggggcgctcagtaaacaggcccggcaactcgcgccaggggatcatggtcagcgcctggataccgaagcattacctgacgaattacagcaattagcatcatcttttaatggcgtgctggaacggcaagaggtcgcctggcgacaactcgaaagctttaatgccgacgttgcgcatgaactccggactccgctgactaatctgatcggccagacgcagctggggctctctcgccgacgttcacaagatgaactggaagagttattgggttccaatctggaagaacttgaacgcatgacgtcgatagttaacgacatgctgttcctgtcccatgctcacgcgggcgaacatgcgtcccagttgactaaggtgtccctgcgagaagaaaccctgaaaacagcagagtatgtagagccttctcttgctgaaaaacagctttctctggttgtagagggagatgtcaccgcacacatcgatcggcgtctgtttcaccgctcgctggctaatttactggaaaatagcgcaagacattccccctccaatagcacgattacggtgcggttaagcgaaaaaggtcatcaggcctgtgttgaagtgtcaaatccgggcgatccaatagcaacagaacacttacaccggcttttcgagcggttctatcgcgttgacacctcccgagcaagaagtgatacccaccatgggctgggcctgtcgatcgtacgcgccgtcgccattatgcaccggggagatgtctttgcgcgtagtgaaggtggcatcaatacatttggcctcacctttgcgatacaagcggataaacctgcgggcaatgctcattccggcactgagcagggaccgaggttaactgacagaattgtcaggggggcgtcagcctga

SEQ ID NO: 387241 - DNA, 681 bp, Salmonella enterica
atgcgcctgttgttagtcgaagatgaagaaaaaacgtcaacctatctcaaccgcgcgttgagcgaatccggatttacggtagatgtctctgcagatggctctgaaggtcttcattacgcgctggagttcgactacgacgcgataatactggatgtgatgttgccgggaatggatggctaccgggtactcgagggtgtgcgggcagccaaacagacgccggtgctgatgctttcggcacgaggatctgtcgatgaacgcgtcaaaggccttcgtcttggcgcggatgattatctccccaaacccttctcgctgattgagctggtggcgcgtattcaggcgctggtgcgtcgccgcgctacagatggcgcagacatcactcagttgcagattcacgatctgcatctcgacctgctggctcgccgggtatttcgcgccggaacacggctggaactgaccgcgaaagagttttccctgctgagccttctgacccggcatcagggagagatattgtcaaaaatgatgattgcagagcagatatgggatatgaattttgacagcgatgccaacgtggttgaagtggccattaaacgcctgcgagccaaagtggatgcgccgttcgacgtcaaactattacataccgttcgtggcatgggttatgtcctcgaagtccggtccgaataa

SEQ ID NO: 387242 - DNA, 1050 bp, Salmonella enterica
atgaaattcacgcttataagtgcaatgctgctcacggcaatggctggagtgacctcagtcaatgcggctgattacaaacaaaacccttttacactgacgtatgacggtgccatcaccgagaacgtcaaaggtaaggtcaatattcatccggtgaagtacgatctgcatggcatccagattgctgcgaatgtctatactcctgcaaactacgatcccgccaaaaaatacccggccgtggtggtcgcgcatccaaatggcggcgtaaaagaacaggttgccgggttgtatgcccagcgtctcgctgagcagggttacatcacgataaccgctgacgcagcgtatcagggcgctagcggtgggatgccgcgcagcgtggataaacccgctaatcgcatcgaagatatccacggcatggctgactacatcagccagtatccgggggttgatacttcccgcctcggtctgctgggtatttgcggaggcggcgggtattcactcgttgcggccgaaacagacaagcggttcaaatcgatagcaaccatcagcatgtttaattcaggccttgtgcgccgcaacggttttcagaattcacagctggatagtatccagcagcgtcttcagcaggcttctgatgcacgtgctcaggaagcagccggaggagaagtgctttactccggcgatgccaacctgactgatgaacagattgctaaattaccttttgccttgtatcgccagggttacgagtactattggaaaacccacgcgcacccgaactccacgtttaaatacaccaccagcagtcttctggatttgatgagctttgacgtaacggaccatatcaatctcatcaataaaccgctgttgatgattgccggtacaaaagcggatacgctctatatgactgaagatgcgttcgctaaagccaccggtactaaggacaaagaactcttcctgatcgagggtgctacccacattgagacgtattgggtgcctaaatacgttgaccaggcaatgcaaaagttagacgtcttcttcgaaaaaaatatttaa

SEQ ID NO: 387243 - DNA, 555 bp, Salmonella enterica
atgcctgcccccatcgtcctgatcctcgcggcggggcgtggggagcgctttctcacctccggaggcagtacccataaattagccgtattgctcaacggcaagccagttttagaacatgtgctggaagccgttgaaaccgcgaacctgagatggcatcaggtctgccctcaaggcggaacgtgcggcatgggtgagtctattgcgcttggcgttgaggccacgattcaggccccgggatggctgattctacccgccgaccttcccttaattcagccctcatcattgcagcgcgtcgccgcagagctcgaagaatcttcaatagtcgtgcctcactaccagcattattcgggccatccggtaggattccggcaggaacaccgtgctgagttactcgccctttctggcgatacgggagcaaaagaaatagtgagacgcgcacgacttcggggatgtgctaaagatattttcctgtcggattatggtatcactcacgatatcgataccctggcagatctacaggcagcgcaaaggctaacagaccagtcgcgagcttaa

SEQ ID NO: 387244 - DNA, 723 bp, Salmonella enterica
gtggaggccgctgccgcttttgaagcgctggaggtgatggactcaggttgcgatcgtgaaattcgctatggcgaaagttcgccgtggtttgacatcgttctgccctgcggcggtgggatcacgctgacgctccataaactgcgctcggcacagcctctgctcgccttgctcaaccgcctggaacagagaaaaccggcgggtctgcgctacgatccgcaagcaaaatcgctggtgtgcctgcccacgcaaacccgaacgggctggcatctcaatggctttgaggtggggttcaggccttgcgtcaggctgataatctacgggcgctctcttgaagcgcaggctactgccagccttgcggcggccactggctatgacagccatacattcgacctttttccggcctcagccagcgttcagatcgatgccgatacggcgatcattttgctgtgccatgatctcaatcgggagctacccgtgttgcagggcgcgcgcgaggcaaaacccttttacctcggcgcattgggcagctatcgaacccacactttacgtctgcaaaagctccatgagctgggatggtccagggaggagacagagcaaatccgggcacctgtcgggatattccccaaagcccgggatgcgcataccctggccctttccgtactggcagaagtcgccgctgtacgtctccgtcaggaggattcatgcctgcccccatcgtcctga

SEQ ID NO: 387245 - DNA, 888 bp, Salmonella enterica
atgaggcttgtctttgcaacaaatgacttaaccttgcttggacgttccttcgagggtttccctttattaattggcgcagatggatgcccagttgagccagcacattctttcctatggcatgtactagtcgagtcagcagaatccttcagcactttgacttgggaagcttatggtcgtcgtttgttcgactattttgcatttttagaagccaatcagttaacctggaatgatgaaacccctgcacatggtcttagtgttctttcaaaatacagagattggtcaattggcgaattaacgcttgatccacgcacagttaacaatcgcctggcgttggtcatcaggttctaccgttgggctaaacgacataatctaatagctgttttaccttttggtgagaaactggttaaagcggttccacactccggattactcagtcatgtcgccgcgccaggggcaaagaacacaaagatttccgtgatagtccgcgaacacaagcggccaactaaatttttgaccaaagctcaagtaaaagagtgccttgcacttgaaaccgaccctagctaccaaatactatttcatttgatggtacgtactgggattcgttcctgtgaggcccgatcttttcctctgaaatatgtgtttaatcctaagtttgcgaaaggactacgtgaagggcaaatgatcagtgttgccctagatcctcgagacatgcatataaagtatgatcgtcccagaattatcgatatcccatggtcactgatgaaaaatatgtggtcatatactcttcaccacggcgcgcccgctcggggcgcagatggtggtgcgcgaagatggtcgttactgcgcttttgtctctggcggctgcgtggaggccgctgccgcttttga

SEQ ID NO: 387246 - DNA, 123 bp, Salmonella enterica
atgtttgcgctcgctgacgtgaactcattttatgcaagctgcgagaaggtgtttcgccctgacttacgtaacaaaccagttgtagtgctcagtaacaacgatctgagtggtgagaaacgttag

SEQ ID NO: 387247 - DNA, 1494 bp, Salmonella enterica
atgtcctaccctgataccccagagcaggccgctgttatcgcctggaagggcaaacgtctggttgtcagtgcctgtgccgggagtggcaaaaccaccacactcagacgttttgcagaggaaaatccaaccgagcgaatgctctatgttgcctataaccgggccattcgggatgaggctgagcagaaattccccttcaacgttatttgtaaaacatctcatcaactggcctggccaacggtcgggaagtattacagccagcgtctggtgaatacgctccgtcttacggacgttgcccgggcgctgaactcccgcaactggttgctggccagactgactctcgatgtgctgaaccgctttatgtgcagtgcgtcagctaaaatttctgaagaacttctcccggaccaggacgattgcaaaggactccagccagagagaatactgctttccgcacagaatatttgggcgatgatgtcatcccgtcaggaaacttttccggtcacacatgatacctatctcaagatttaccagctaagcaagcctgacctctctgcccgctataccacggtgctgtttgatgaggctcaggatgctaacccggtcaccagtgccattattcttgagcagccgtgccgggttgtgctggtcggtgatactcaccaacagatctaccgttttcggggggcagataatgccctctgtgctccacagctggagtgtgcagatcgtctgtggttgactcacagcttccgcttcggcccggaaatagcagaagtcgccaacaggctgctgtcactgaagggggagacgcataagattaccggaaaaggcggttccgaccgcgttctcacaatggtgccacgtacgtttggtcatcatgccatccttcaccgttctgtctgcggagtgatccgcacggcacttcactggtctctggccggaaaaaaggtgttctgggtgggggggatggaaagttacaaaatagaggacctgcttgatttgtactggttttcgattgatatgacggaaaggatgcggcacgacaggctgacgcgtgaataccgtgactatgatgagtatctgcagatagccgaagataccggtgatgtggagatgaagcaggcgattttcattctggagcaattcttcccactaccggacaggctaaccacattgcgggagcagcgcgtaaccactgaatcggatgcagatgtgaccgtctgtactgctcacagaggtaagggactggagtgggatcgcgtgcaattatatgatgattttgttgatattctcgatcctgaaatgccagacattaaacgtcatgatgaaatcaacctgatgtatgtggccacgacccgggcgcgtaaggtgttaattctcgacccgatactggctgagcttctggcacaaccttcagcaggagagctttttcctccgttcgtcgaaagcattattccctcaccagatatcgttcagggggaaaacgatgtggcataa

SEQ ID NO: 387248 - DNA, 1629 bp, Salmonella enterica
atgtggcataaactacgaaaaatcctgacgggctcttccgtaaacctaccaggcagacactcttccccggtttcacacccgttccaggatacactcagtcaaagaggttatattgagccacagtctgccacatcattgctggagacagagaacagacagcatttgctccggcagctctgggaaaacagtctgttgccccgggcgcaatatgaacagtatttcctgacgcctctcagaacctgtgtttcactgatgcagcagcttcccgcaacagatgccggacatcatgctgtaccgggtgggatgatcgattacaccctgaaaaccgtagtttatgctaccagactttcccggggatatatgcttcctcctggcgccagtgcggaagaacagtctgcacagagcgcagcgtggggcgctgtcgttttttattcggcattatttcattctctgtcctcactgcgccagattgagggagagctgcttaatggtgagatatggtaccccgggattaatgttccccggcaaccctaccgctttcgtttccggaccacgataacaaatggcgcagcagaagggctgtgtacaatgttgggcatgcgtctgctccccggagaagtcattcagtggctgagtaaaactcctcatgcactggattcacttctgtcattcataagaggtgattttggtaatgcctgcgtaatttttcagatagtgactgatgccatacgacatgcaggaggtaaatcgaaagggattcaggatgaattagcggtgtgtgagtcagtcaatgtccctgcaacagccactgagaatgcgcaggtggacgctggtcatctggaaagtgatatagcggcggttttaccttcagcagagagtgctgatggggcttctttatcgcctgcagtcagattgtcagaacctgttgcaggtaccttaacatcggcactgaatgaaagtattccccttactccttttgttgataccagcctccccggggatgacaaggccgttcatgatgtgatgtctctgatgggattctcaccaactccagtcgttgagaagacacctgctgaacaaactgcaacgactccatgcactgatgagggatctcaaaatacaccgtctttagttcctcctcccggggagcccgatcaggcacctctccaggccaccgcaatggcactgtcgaacatcagcaaggtcgcttcagatgatagtgaaatcagtgaagggtatggccagcagctcctgtcatggctgagtgagcaaatcctttcaggtaccctgactgtaaacaacaaagattcccagatacacatcgttggtgggctggtatttcttccaacacctcatatttttttctcttttatgaaggaaaaaaactatccacctgatctgaagaatgatattcagcgcgagtttgaacgtctggggctgcactttatgcagaaggggaaaggggtcttttcctgcgttaagtatgagtctgaaaatcgccggggacgatatgaaaagatatccggttatctcataaagtcaaagttagtctatgcctcacatgtcattccagatgattcagcctacctgtttgtgtcaaaccgaaatcacagtggaaaggatatttaa

SEQ ID NO: 387249 - DNA, 1017 bp, Salmonella enterica
atgggaaagttaacatttgatcttcttttagaggattacttttttaataaattactacgaccagcgactatctggagctacagcaaagttacccagacctttacgcgttttttggaagatggcgtgagcccggaagatattactcacaaggatgtactgctgtggcgtgaattggtactgcataagaggggtttatcaagccgaacctggaacaacaaggttactcacttacgggcattgtttaattacgggatgaaaaaggggctgttaccacaaacagagaatcctttttatgaagctgtagtgcggcctgaccagaagctgaaaaaagtgctgacggagaaccagattgaacaggtctatattgtgatggcacgctttgccattatggagcatcagggaaaggctccgcatccccgtcgctgtgccctgttgccaacccggttctggctggttgtcctcgatgttctcagatacacaggaatgcgccagaatcaactcatccagttgcggatgggtgatatttcatttgatgatgatgtcatcatgttgcgggcagagagcgccaagaaccataaggaaaaccgggttcccattatttctgtactgaaaccggggttgcagcagctctgtgctgaattacgactcagggggatgagaccacatgatcagttttttaatgtgggatttctattgggaaaagtaagcgcagagtatgaagagatgtcggttcagacgctgcgtgcattttttcgacgtctttctaaagaatgtggatttaacgtgagtccacatcgctttcgccacacgattgcgacggagatgatgaaacagccggacagcaatttacaaacggttaagactctgctggggcattcgagcatcaacacaacgctggaatatgtggatggcaatgtggatacggtgagagaggcgctggaagcaaaatttgtcatgaagaaaaaaaattcttcaccgggttcagggacgccacctgcgttaagactgattgaatag

SEQ ID NO: 387250 - DNA, 408 bp, Salmonella enterica
gtggcgcaagaggtcgcttttgggctgaaactacagcgcttatcggcagaggaaatttcacggcgcacgcaagccgcgcttcagttatgccagctaacggacgtcgccgaggcgcacccgcttgatctgcacgccgcgcagcgccggatggtggcggtcgccagtctggaggcgatggcaccgcctgtgttattgctggacgaacccagccgggattttgacgcctactggctcagtgtgtttgaaaactggctggccgcgtgccgggcgcggggaaccagcgtcgcggcgattagccatgacgccgcgtttacccggcgtcatttttcacgggtggtacaactgcataatggcgcggtcacgccgcgcgctattctcaagaacgagccatccgatattcgcccgtaa

SEQ ID NO: 387251 - DNA, 171 bp, Salmonella enterica
atgcagctatcaatgtgccagcagttatcaaaattaatagctgatacgagtaaagataaatcccatgagggtaactttctgtattctgttggggtcatattaaatgtacgcttaatgccctgccaaaattttgagcgccaccaaaatggactcggtgagcaatttcaataa

SEQ ID NO: 387252 - DNA, 1056 bp, Salmonella enterica
atggaacgttcgtccgataatctggctagtatgactgcatctgcttttggggcgggaacttataccgctatgcggcatgcaacctctacccgaggtattttggagtttctcattaatctttttacctgtggaggggtttatcggagaaatgaaaaacattatcaagagctgatagaagctatggctgagacattgaaaaattcaatgtctgatagaagaaatgctccgttgccagaaaatattatattagataatgttgatggagctcgtatcgaatttagtcttcctggcgctaataacgaaaccggacaggttattgtacgtgtcagtaaaggcggaaattctgagtcgaaagaaattccgcgggacgcttttgaaaaagtctgtcgtgctttgctattcagatgcgagttttcactccctcaggatcctattatcttaacccccctgggaggaatgtatcttaaagacgcggttcttaccggagcaaatctgatggcagaaaatttatgtgacgcagacttaagcggcgcagatttagagggggcagtactgtttatggcgaattgtgaaggtgcgaatcttaagggcgcaaatctgtcgggagcatcattaggcgacagtcatttcaagaacgcctgtctggaagatagtattatgtgtggcgctaccctcgatcacgctaatcttactggcgccaatttacaacacgcaagtctgttaggctgtagcatgatagagtgtatttgctccggtgcaaatatggatcacgctaatgtttcaggcgcaacccttatacgtgccaatatgagcggcgcgacattaaagggtgctattataatggctgctaatatggaaggcactatcttaactcgggcaaacctgcaaaaggctagtttcacttctacgaactttgaaggggctgatttgtctgaggctaatttaaaccataccagttttaaagattgtacgctaacctcttcatgtaccgaagaggccaaaatgtctacgagtacacaaacactctttcacgaattttattgcgatgacgtttag

SEQ ID NO: 387253 - DNA, 2940 bp, Salmonella enterica
atgcattttaataaaaaaattttagcctgtgctgtcagctttataatatcaggttctatatatgcagatgaatcagttgagtatacaaatggttctgttaataccttagcggacaggacaattaactccttatcgaaagtgtatacttttccatggtctgcaataagagttgataaagaatcaacgcatcttaatttgtttgatgtgactattgatattaacgatgaaaagactaatccaggtgggaaaggatggcataccggttacctttatataggtaatggagcaagtgtcgaagcaaaaggtaaactggaaataatcgataatttgaatgccaatgtcgctaaccgttatgctgtttttcttggtaatggaaataaagggtttgaagctgaaaatctaaaaataaagatgcttcttggaggtactggaatctattctgaatcaaccggattcaacgtttctgaaaaccttgacatttttattgatggatctaaaacttataatacctttggtattgttgggagaggtgactctgtaataaatattgatggcaataccaatatctttttggttggtagcaagcaaaacggaagagcattccagggaggcgagttaaatttagctggcatgcataataatataactgtagttgatggtgcctatcagggacttgggtggggaaaagggattcaggggattttatctctgaagaccccgggaagcaacacggatattcatatagaaagtcatacaccggacattgaatggcaactggctggtattgatggatctttagtttcagaaagtggaacgaatctcaatgtaacagtttctgccttaaaaaatgtcagtattggggatgaaagcgttaatgaaaaagctaaaggcattataggtattcttgacagaagcactacaggaattgaaattaaaaaggatgctaatgttactgttaatgttaccggacctgaaataaatagtgatggttatcacgggactgttggtatttctggaaaagtcatttctgacggggatattaaaattaatgtggattcacctaaaggaattggtataagggggcttgattatggtagctcggtatttagcggcaatcttatatcgaattcacctggaggttattcggttgcaattctaaataaattggcacgcgatgatatttctattaatataaagccacatgaaggcaaaacagtcatattaaatggagatatagctattgttggagacagaagtgatgatagaacttcatccataaatatcgatttagataaaggttcatatttaaaaggtgctactggagcgataaagaatattcatgacgctcctattatgggatactctggcactacgaataaagatagtatatctatctcgctcaaaaatggtgcagtatggcatgtaacggacaattcttttgttaataatcttagtattgttaatactggattaatgttctttaatcatggtgataacaataatggtgataattctgataataaattcaggacagtaactgttaacggcgattataacggtaacaatggcggaataatatttaatacaaggctggaaggagatgattctccaacagataaacttgttatcaatggtaatacgagtggtaatacctttgttactgtcagaaatattggcggaatgggtaaacagactcttaatggaatagagcttattcatgtagagggagtctccgatggaaccttcactcaaaatggaaggatcgtagcgggtgcttatgattatcatcttataaaaggggtgagtaataataccagtaataattggtatctgacgaactcgaaacaagaaccacaacctgagccggacccgacaccggacccgacaccggacccgaacccggacccgacaccggacccgaacccgaacccgacacctcagcccaagcccgcgccgaacagccgcccggaaggggggagctatgtggctaacctagcagccgctaatacgctgtttaatacccggctgcacgaccgcagtggcgagacctggtatctggaccccgttaccggtgaagcgcaggttaccagcctgtggttacgccaggtcggctctcacagtaaatggcgtgacggcagtggccagcttaaaacccaggcaaacaactacgtggcgcaactcggcggtgatcttgctcagtggtccaccaatggtattaatgaagtgcatctgggcctgatgacgggctacgcaaacagccatagtagcaccaaatcatcacgtactggctacggttcgaaaggttcactggacggttacagtgttggggtttacggtacctggctagaaaacacaaaagaaaataccggtctctatgttgacagctggctgcagtacagctggtttaataacagcgtcaatggcgaggggctggccggtgagtcctataaatccagggggctgactgcatcagtggaaagcggctataccctgaaactcggtgaaaccacaggcagtaagggcagtgtgaatgagtggtttatccagcctcaggcacaggcaacctggatgggggtaaaagccgatgaccatcgggaaacaaacggcacagttgtcaagggagaaggagacggcaatctgcagacgcgtctgggggtaagagcgttccttcgtggcagtcatgcgaaagatgctgataccggacgtcgcttcgagccattcattgaggcgaactggctgcataacacccgtagcttcagcaccacaatggacggtgcccgtatcagtgaggcgggctcccgcaacctgggtgaagtgaaagcaggtgtggaggcgaagctaaaccctaatctgaatctgtggggaagcgtcgggacgcaggctggtactcgtggctatcagggcagcaccgccaccgtgggtgtgaaagttaacttctga

SEQ ID NO: 387254 - DNA, 573 bp, Salmonella enterica
atggagctaaaaaacgtaaccagatacattcctgacgaccaggactacgataacaactttctgtattttcgtagtgaagatggtcaggacttttacgaatcactgagtaaattcaccaaaaaatataagctgtgcattgactccgaaaatataatccgttccgtttcagaagatgtttcgtgcctttatccggctggcttttcggttgttgaggtcaataaactcccttccggatttaatatctatggggactggcagtattcgaacggcgctgttctggttgttcccgttgactatcaggctaaggccgaaaccacccgacagaaactactggatggagctaacagcaacgttgtcgactggcgaaccgaactggcgctgggtgacatcagtgacgacgataaggccagcctggtaaaatggatgaatacattaaggcgcttaacacactggattttagcgaaaagacgaggccacctgattgctgtgaaggtggcctacattatcacagtaataactactggctggtttctccagccagtcaggatttgtggtatccacccggtttactaa

SEQ ID NO: 387255 - DNA, 390 bp, Salmonella enterica
atgagtaaattcaccacccctgcgattctggagatgctggagcactacaggtggcgggtttacgaaccgtttgagttttacctgagcgatgataacagcgatattattgaggtaccggccggtttcgtcaccgacctcgccaccatcccgcgtatcttctggacaattctcccgcctgacggcaaatacgccaaagcggccattattcacgattacctttacgacaacgcgctacgcacaaagaaagaagccgacaaaatcttccttgacgggatgacggtgctcggcgtgccgaagtggaaacgcacagttatgtaccaggctgtgcgactgttcggacggggaatgtacgggaaagagcaaaatactgtcattgatggcaacagatga

SEQ ID NO: 387256 - DNA, 603 bp, Salmonella enterica
atgacaggtgcagatgaaacacccacaggcatcaccgccgtcagtaccgcacagtacgtgagtgacgggctgatttttgcagccgtacagtttgacggtgccacgaacccggacgggacgccagtgtatttacccgtcacggtgactgacgacgagtccggcccggacgcgtggatgctggcccggataaaatcgctgtacaccattccggtgccgggattcatcctggaggccgcgaggcagaaaaagcgggccgaaattaacgcgtggcgtgacgcccaggaaaacggcagcgtgattttcaccctcaacggtcaccgctgggactgtggtaaagcctcacaaacccgccttgcacctgttgtcgctgttgccaaatctggcgaactcccgccaggcttcttctggacggatgcggacaacatcgatgtcccgatgaccaccgatgaactcaccgcgctggaagcagcgatgcagcagaacatggtgttacagggctttaaaatccacgaacgccagcggcagatgaaggaggaagtggacaaattaacggactataaggcgattaaggattacgccgtgggctggcctgagggaagctaa

SEQ ID NO: 387257 - DNA, 1512 bp, Salmonella enterica
atgccgataatctcaggtatcctgcgtgatggcgcaggaataccgcttacgggatgtgttattaaactcagatcagtaaggacatcacgagatgttcttgccaccacggtagcctgtataagtacgaatacagggcagtaccatattgatgtattaccaggacagtatgaggtatcgctcaggtatgaaggtgcaataacagaaagcagggtgggtattatccacgttcacgatgactctcccgatggcacgctgaacagttttctgaacgcaaaaaacagtgatacccgcccggaggcgttgcggcagtttgatgccctggtgcagcgggcagaaaccgcggcggacacgtcaggcagtggcgcagacagtgccgcggcctcggcagccgtcgcaggccagtacgcggagtctgcaaaaactcatgcaaagcatgcggcggcgtcggaagaggcggcgggcggttacgcgcaggctgccgccggtagcgcatcggcagccggttcatcagcggcacaggcggcggagagtcatacaggcgcacagcaggcgctggaggaggccaggcagattgcgaaagacatggtaaagccacctccggtattttaccgcccggctgaggagcgcggtatctggcagctttcgcatgagaggacgggacgaaaagttaactggcagtttacgggaaaccggaaaaactacgggtattacacgtatttttcagctccggagccctgggaaatccgttacccggtatctgcgccggatgacatggtgaaatacggttgccgggcgagattcaccttttcatttcaggatgacagtgatgcggcactggaggggaaagacctgatggaggtcaggctggccataccggatgacgcgctgccgccagggtggagcgttcctcccgccacaccggacagaccttatctggtgctgggctgtgttatcagaagcgccggaggaaagctgactatatgtgctccggacagcagtgtaacggatccccccctctttaagtcaggaaatgcaagaggcagttctcatctgttcgatatgaccctgagcaaaacggggtattccagcttcattactgttgacggtactggcctctcgttaagcccggtacgtaccggagtaaaactgccgcccggcaccctgtatatccgctctgccagcccggcgaaacagacaaatttcgaatatctggaaatggttattccgcatgaaatgttcaaccatcgcctggtgccggatgatgacggggcaacgttttatattccgtgggggtcgacagttccgtgtcgggtgacagtacccgacgcggaattagcgccggggttcagcgtgcaggtcgctacagaccgggaacagtctctccaggcgctgacggaaaatgataacgttacattcgtcagtgagaagggggcatggacaagctcagttaatcagataaccggtgccggacgtctcattcatgtcggaaataaaatgtggaccataaaataa

SEQ ID NO: 387258 - DNA, 1401 bp, Salmonella enterica
gtggaaaattttcatacactggcagatacctgtacggcagaactgttatccctgaatgcccctgaagtatatgacaaatctattacgctgacagtcaatgaggacctgaccacggactataccggaccgattaccggtcactgcagtatcggtaatccacaaaattacactctggcactttataccagtaccacgctggaatatcagagtgccgccatggtactgaatacagacggaaccttttcttttaaaagaagctggccgggggttaaatcctttaaattgttccgcacgtcaaataacgggctggtgacagtctgggaagacccgttgtgtatacgttcttaccggatgccatcggatgccggggatgaaacggtaagggtgatgaaagaccgtacatacacttatgaccaggcggtgtcagctattgcactgatggctcaggggaatagtcaggtggaacagtttgtccgtggtttgtgcgcaattgtgggtagtggtggtagcgaggggagtgtgccttttttcgtgaatcgcatgtcagcgcaaacatcatcacagtattaccggacaggaaacgcggcgtgggtggggtatgcgctggcgtattatctgcagaaatatccggacggtgaaatggccgttgttgcccgggataaactgacgcagtgcgcagaatggattgaaatgttcagggtcacagatggcagtgatgttcgctctggcttgtatacatccggtagcggacggtatctggatggtgtgttttatccggattttgacgcagactggtgtacatcagaacatcagttcgacctgtggtttttgtttgacctgatggggcgggtaggcttcaccggctacgctgaaaaggcgaaagccctggcggatgccattatagaaaaactatgggtggaagacgaagggcgattttatgccgggatgcggactaccggagtggacaaagcgtcaccgcttgactgctcgagctggggagggttgtttgtggccaacattgatatggaaaaggcgaggcgttgttatgcctgtctggaacgcttctggtatgcgacgcacgacgtgacaggttacacgccataccatcccaactatggttacccgaacaagcagcggggggtatgggttgagggtagcgcaggtgttgcattactggcacgcaggttgggtatggatgataccgcccgcgacatactggcgaggcttgcgccattgcgaacccggtacggatacatcgattcctgcgattatccggacaatgacgatatgccggcgtggccatcttcgtgtaataccgcgtggatgatactcgcctgtaacccacaggggttctggaacgtcaagtcacctgcaataccaggaagctattaccggtactaa

SEQ ID NO: 387259 - DNA, 249 bp, Salmonella enterica
atgctgacagacaatgcatttccttccgccgtttctttgactccgccgtcaatgccaaaaggtggtggcgcgttgacaggaatgggggagtctttggggcaagccggaccaacgggacttgccagcatggcgttgccgctgccaattagtgcggggcgaggcttttcgccatcactctcgctgggttacagcagtggaggaggcaatagtgatttcggtacaaacgcagtggcctgctcgcgctgctga

SEQ ID NO: 387260 - DNA, 222 bp, Salmonella enterica
atgagccagaacgaccgtgaagtgtaccagtacagtggcagcagccgggtgcgcaagcagacgcggacactggtgaacggcggttcagggctgtgggcggttgatgaggtacgttacctggcggggatggagttgcggcggagctggcaggagacggtgagcgggagttcagcgacacgctgtattacgatgccctggggcgcaatatccgcacggtcatag

SEQ ID NO: 387261 - DNA, 198 bp, Salmonella enterica; identical to SEQ ID NO: 10863

SEQ ID NO: 387262 - DNA, 1107 bp, Salmonella enterica
atgtcaatttcattcgaattacaaaaaatagcagaaaaattatcgcccttcgaagatgaagaaaatgaagggcttgatgaattaacaggcgttattgaagatgtatcgaaatcattttctggttcatggcttggataccattcctgtgtatattacagaggattcaatcgccctcctgccggtgctgttttcagtcctgaatggggtttgatggatgtaatgagcatggggagtattggtgattgggttacataccaatatgattatgtcattgattatatttacaatgaagctaacaacattgatttggatgattatagtacatcatcccaaaaagcagaggctgtatttgaaacctgcaaaagtgatgctctatcacttatatactccaataaagaaaacataaaggaagataagtttctcactgacctgattgaaaaaatagaaaaaacagtagtaattcaggaaagccaatttttaagtttgtgtagacctcatgggaaattcatgagtagagacatgaatgctgttaccaatggaataaaaacaccacctcacattgctattctatgtgatgttatggcaataaaatcaccttacacatcatgtaaagagctaaaaagcgacttagtgaaactcgctaaccacctaaaaaacaaggaaaaaacagtggcaattgaagagcggagaggcgttaatgtttttattggccatggtcgctctcatatgtggcgagagttaaaggactttgtccaagataaacttagattgccatatgatgaatttaatagagtgccagtggcaggagtgactaatataacaaggcttgcacaaatgttagatcaagcctgtattgcattcttggtgatgactgctgaggatgaaatgatggatgggaataaacaagccagaatgaatgttattcatgaggttggtttatttcaaggccgtttaggatttgaaagagcgatagtactattagaagaaggttgtgaggaattcactaatataaatggacttgggcaaataaggttccctaaaggaaatatttctgctgttttccaagacattagagaagtgctggaaagagaaaacattattcaataa

SEQ ID NO: 387263 - DNA, 3015 bp, Salmonella enterica
atgagcacatcgctgttcagtaaaaccccttcggtcacggtcctcgataaccgcggcctgaccgtgtgcgacatcgcgtaccaccgccaccctgagtcgccggacgttaccagtgagcgtatcacccgccatcagtacgatgcccgcggatttctgacgcagagtgctgacccgcgcctgcacgacgccggagtagcgaacttcacgtatcttacggacctggccggcaatgttctgcgttcgcagggtgtggataacggcatcactgtggtgctgaacgacgccgcaggccggccctttatcgcggtcagcaacatcagtactgctggcgatggtacgcaggacagtagtcaggcggtaacccgcaccttgctgtatgaggacgcaacgttgccgggccgcccgctgaacattatggaacaggtccccggcgaagccgcccgcatcacggagcgtttcgtttatgccggcaacggtaaagcggagaaggccctgaacctcgccggccagtgcgtcggccattacgatacagccgggctaatgcagaccgatagtgtggccctgaccggtgcaccgctttcggtcacccgtcgactgctgaaggacgcggacaacccggacaccgtggccgactggcagggcgcggatgccttggcctggaacgacctgctggacagagaggcgtacaccaccctgaccaccgctgatgttaccggggcagtactcaccaccacggatgcgaagggaaacctgctgcgggtgacgtacgacgtggcaggcctgctgtcgggcagctggctgacgctgaaggatggtacggaacaggctatcgtgaagtccctgacgtattccgccgccgggcagaagctgcgcgaggaacacggcaacggcgtagtgaccacgtacgaatacgagccacagacgcagcgcctggtcgggattaaaacggaacgtccggccggccacgccgcaggcgcaaaggtactgcaggacctgcgctacgagtacgacccggtgggcaacgtgctgaaaatcagcaacgacgcggaagagacccgcttctggcgcaaccagaaagtggtgccggagaacaggtatacctgtgacagcctgtaccagctggtcagcgccaccgggcgcgaaatggcaaacgccggtcagcagggcagtaatctcccctcagccaccattccccttcccgcagacagttccgcatacacgaactacacccgtacctatacctacgacagcgccggaaatctgacgcagataagccatagcgccccggccacgggcaacaattacaccacggatatcacggtgagcgaccgcagcaaccggggcgtgctgagcacgctgacggaaaatccctcaggtgtggacgcgctgttcactgcagggggacaacagaagcagctccagccggggcagaacctggtctggacgccgcgcaacgagctgttgcaggtgacgccggtgaggcgtgagggtgataccggtgaccgggaaagctaccgctatgatacagacagccagcgactccagaaggtgagtgtgcagaaaacgaagaccagcacacaaacgcagcgggtggtatacctgccggggctggagctgcggacaacctcaaacgggaagaacgaaacagaacgtctgcaggtgataaccgtgggtgagacgggccgggcgcaggtgcgggtgctacactggcagggcgaaacgccggagggtatcagcaacgaccagctaagatacagttacgataacctgaccggcagcagtcagctggagctgaacggaaaaggagaggttatcactgtggaggaatattacccgtacggtggcacggcagtctggacggcctgcagcgcgatggaagcggcctataaaaccatcaggtactcgggcaaggagcgggatgcgacggggctgtattactatggttaccgctactacctgccgtgggcgggcagatggctgagcgcggacccggcgggcaccatcgacgggatgaacctgttcagaatggtgcgtaataatcctgtcacgcttcgggatgcgctagggatggacacagaacaagatgcagcaataaaaattcaatcagcgttccggggatatttatccaggaaagctgtatcagtgaaaagtattcatggagtaattcatacacatatttcttcatccggacatatcaccttgccagaaaatactcgcggtagagaagtgcaaagcagactaagaataggggcttcctatgactctttattggttcaaggcggtgctggtaattttgatgtttaccataaaccagataacgcccctgtcatgaacaccacaagccttttagaattaaacaatgtttcaggaacgaaagcttttttgaatggtggattctttgccaataacgaatcattgataatgccgggtggtgaggtaacaggtgaaaaattcaagggccatatcattggcccggctcccgaacgacacaacaaagttgaaatccctattcagtggcgcaaggattatgccgttctggtgaaaaatgacgtggaattgcttgcgtcgggacctcgtttatctggtgaaagcataaatttcaccagtgacttatatttatatgagggggagagattctcttcacatcctggaggagtaaatcctttgtcaaaattgcaagggaatttagcccatagtggcaacccaaatccgagagctgccctttcactttcttccagcggtgatattcgtatgcatacattgtctaccgatgattactccagagacaagggtgggacaatgacagaatggcgagatatagtaaatgccatggccccaggtgcggacagcgtcaatatggatggtggagcctcaatgagcatgggaataataattaacagcaatattatgcagataactaaaggtggagcagagctcaggtgcattgccaatatggtaacatctggggtcatgaaaaaccaagttccacataatcttcgcctgaagccgtggtga

SEQ ID NO: 387264 - DNA, 405 bp, Salmonella enterica
atgccgttagaaatgctggccgagcgcgtgaagcagaagctggcaaagcagaatagcgtcgtgattctttgttccgaaggctataccagggagtattcccccggctttcagggggcaatcgataccatgattaaacagctcgaaccgcgcattggcgtgcgcattcgtaagacgatagtgggctacggtttacgcagcggcgacccgacctgcgaggagatttatcagggcaccattatggccagtgaagtggttcgttgcattcagtcagggatgaaaaataaagccattataattaattcaagtaataaacctattccgattgatctcgtcagtatgaaaaaacgtctggtagatatcgaaggacaccattacaaacttgccaaacaactcaatattatttga

SEQ ID NO: 387265 - DNA, 327 bp, Salmonella enterica
gtgtacaacaccaagtcaagtgatcgaggacaaaaattacgagaaatcaggaaagctgaagggctaacccaacagcaattctctgatcttacagggatttcactaagcacaattaaaaattatgagaggggacaatacgacgtcggactaagagttctggacgcagtttttgaactagaaaggtttgaaaagtacatgatgtggctcatgaaagggttagcaaagccggaacttggtcagatagccccggctctctcccctgatgggtacgctcattcggaggcaaatcaggcttcaatcgaaacaatcaaaaaatctcgccgttaa

SEQ ID NO: 387266 - DNA, 285 bp, Salmonella enterica
atgcagctaaagaatttgtcacttgaagaattactcgttaagtatcccgttgacggtgtaacgccagcgaaatttggtgagctggttggcaagtcaacaaacgctattgaaatgatgattaagaacaataaattgccgtttgtagagatgcaggacccggggaaaccgaattcaagggcagagaaaattatctatatcgctgcatataacgaagggctgaaacaagcatttttgaacagacctaaagaactcagagaagcatggctttcatggttgtttctgtag

SEQ ID NO: 387267 - DNA, 339 bp, Salmonella enterica
atggcagaacaagaactgaatacaaagcgagtaaaatccattaaattgcagttcccgcaggacctgatctttaatgagctaatcgagtgcatgtttgccatgctaaattcaaaccaggccaaatacatcaacgaaaaaattgagcttgtccaaaatgaatgggtatatcaaacgaccattgatgcccttaacgctataatggacaaagagcaaaaaagtttcatacacaaagaatttaagctgctctacaacgatgaatttgtttatcccaatcgccaggatgaggggtatttgttcaggcaggagattaatcgtatttttaatctcaagctaaaatga

SEQ ID NO: 387268 - DNA, 195 bp, Salmonella enterica
atgaaaaaagacgacttaaggaatttgcaccacgaactaaagaagataaatcgcatgcttaatatcgtgaaaaagcggctgaacgagggtcgttacagggatgctgaaaaccatatgcgaggggagtctgtgatgctaggcaatctggctgacaagttacatgacctgacagaacaacaggacagcaatgtatga

SEQ ID NO: 387269 - DNA, 198 bp, Salmonella enterica
atgagtgccatcacagccatcgttggctttgtacttctgtttagcccatgcgggcacgatgcctgtgagtgggtaccagtaacggaaaaaattaatccgacactggaagcctgtcaacatgtgtcgggcgaactggagaggcgtcgcccgggttacgaatttagctgtggtgaagtttatcgcggagaggatgagtaa

SEQ ID NO: 387270 - DNA, 639 bp, Salmonella enterica
atgcttcgacaacaaaataagcacttgaataatacaaactgcgggtgctacgttttcctcgctgtcacagtgctggcagtcgggcgtgagaacccgggaaatacaaaggcgactccagacgccataagcgtcttttttgttgtcgcagccttattcgccctagagcgcctgatgatggcgcggtgtacgcataagcgcgtgactttcggcctgatagtgagcgttgcgtatcatcgtgctaccatgtctatggtggctctggcggggccgtcttcggatgggccgggttcctttgtgtccggttttctcacccccgtcagggctatcgccagtgagcgtgagaactcctgcgatagctttacgctaatcacaaaggaggctgccttcatggctacgatcccaacaaaaaaacacccaaaattcgcggacccccagctcagttacgactgtcggcgcaggatttatcgtgcgcgaattactgcccttcatatgcatatcgacaccctgatggctgaacatattcagccgcatatcccttatatcttttcctatatccatgatgatattgaggctatagataaggagttaatttctctcggcctttttgacagtagtcttggaaagaggcgacgaaaatag

SEQ ID NO: 387271 - DNA, 165 bp, Salmonella enterica
atgtttttccgggtaaatgatttttgggtgttttgctggggggataaattttttggattttatgacttcagcgcagggatgaactggctgatgcggaatgtaagcaggagtatcaaattaaatgtaacccactcaggagaaaaatattatgcaaataaaaaataa

SEQ ID NO: 387272 - DNA, 234 bp, Salmonella enterica
atgcaaataaaaaataagtcagacctcactccgggcattgctgcaaacaggattcaggcaacgccagaacagagactaataatttatgcagatctggaagctgtattacttaaagcggaggctaacacccgacacaaccagaaagctcaggcgatggaatacgcatggaactggcttcgggtaaacaaaaagcaggctcttaatgaaattgaaaaccgcggagtgggactgtga

SEQ ID NO: 387273 - DNA, 2019 bp, Salmonella enterica
gtgaaaaatattactcagttgatctttaagccgaaaaaaaacgccgttgcaaaaggtgtcgcccgggccggaactatctggtttgacaacgatgatcaggacgaaatcgacgcactgtcgacgctggccatcaaaaaagccggattcaaaagaaacgatgtctttaaacccgttcgcgtggaccatctggttgttgatgacatgcccgcagaaggcgtttttgatactgctttctgcgagcgttacaggctggcagataatggaaaaagctggttgttgccagccgctcagcctgaatcagctgcagccaccagtactgacagcggaaccgccaccactccccacagcaatgtaaacgtcaacggagagcctatgacggaggttgagaagggaatggactggccggcgatggatctgcccttgccggtgcgctgggtttcacagaggggcatggatgacaaggtactcaccctgaagcctgcggaacgggaacagctggcgaagatactggaagatgaaaataacagtcagtacctgaccaatattaaagagatcaccgccagtgaaatggctccggagatcgacaaactgacgctgtaccatctttaccgtctggtcaccgcgtttgacagggtgtctgaaaaagttgagcgcatggggccatttatggctaaacggtttgtccgggcatggctggatacggaatacatcgatcagggcgttctggttaacgagtggtgtgcaggcaggcatgtatcccgtcttgagaaaccgacgccaaccagtgtcagcgacgttactgagaagcagaacaccaaagctgctgaagacacagaatcttcacgcccacgccgtagcgacaaaccgacttacagaacgattaactatgaaatcggctgtgcactctacgagggagaactggatctgcacacgctgagacccgcaatggattttgcaaaacgagtcatcgccgaaggccgtgaggactggaagcgctggtcagcttcgctctgtattatccccaacatcagagactacgacaggcagaccatcatcgatgtggttcgtaaggctcctgttgctgtccataagggtaatccggacctgcgccgcacctggtgcgaaagtttcctggtgattcacggtgtgcgtgatccggactggtacgagcacgctcctgataaagcgcccgcaacccatgaagaaaattcagagactgttcgcagggcgggtaaatgcctgcgagacattgaagccgggagattccagagtgaagaagaaacgcaaccaacagaggtattggcagatgaacaggcagcggctgaaacaatggggcaggactcaactgagcatcatcagaacccacagcaggtggagactgagacacgtgtaacaacggatagcgaagaggtccggaatgaaaaagtcagcgagcaactcgcggccggacgtggtgatttcgtaccaggcaccagcgactcaagcgattcgaagtgggtacacaacgattacagcgcctcaaatgagggagaaaaaacggaagttgccactgataactcagttaacacgaccgacgccaccgatgcagttgaccattcagaggacttttcgaacccctcagagccagtagcagaccagaacgaaccagaaacgccgaaaaccgaaccagtaaccaaaattgctgatggtgtttttgacacatcggtattctttgcgggtacctcaaatcaggttgaaaaagcgggaaatgctccacaccgtaatgatgtccggactacacagcaggcagcaataacccaccaggataatgagaacgaacgtgcgttagcgtccgtgccggccgagggattcacatcagaggttgtcctgttacagcaggcaaaccagacgcttctgcagatccttgccagtcagttaagaatcgaacaaaaccaccggaaaaacgcggcggccatcaaaggcatgctggcgatgatctatgacgctgaaacggacgaggggatcactcatggcgagtaa

SEQ ID NO: 387274 - DNA, 738 bp, Salmonella enterica
atggcgagtaactctgtacttgatgtactgaaagcgatgaagaaagccagcgcccgtgaaatcgctgcccggatggaaatagacctgaccgatgcgatagcgatgctcaatgaacagaaagaacttggtgcggcagagtttcgggacggaggatggtcattgcccggataccggaagcccaaaactctgaacatcacggcgaaaccattaccggttgctcccgtattgcgtcccaaaaaagtcgttcctcaagagaaggaagagaagacagataaaacagttaagactgccgcgctgatatctactatagcagcgcacggggagcagtctgttgaatcgctggcgcaaaagcacggcgtggcggtgaccgggattgcttcagcacttgaatgcgcggtcgggcaaggtgccctgcagcgaaatatccgtgaaggaaggttccggtacggcctgcctgctgaaaggctcctggaatcttcaccggatcctgttactgacgctgaagtgcctgcgtgcgagtccagaggaatcattacacaaccggtggaaggcttcccttccttcactgaaggacgtccggatgatttaatcattccatcccctgttgaagtggccagaatgatccgcaaggcaaaacagcatctgagggagcttgagcaaatcaggacgctgttgatgacggtgagaaagtatcgcaaaacgctgtgccggctcactgacctgaagcgggaggggtga

SEQ ID NO: 387275 - DNA, 243 bp, Salmonella enterica
atgcaaatcgactatcaggatggcggttctgaggcccgactcattattaccagctggtttttcgactggcgagaacataaccggctggtggatgaaatgttacttcgtgttcctcatctgagggcagaagatgaaggttttctctggagaacgaccgtgatgtcaggccttactgcctacgtcttatgtgcagaagtgattgccgaagaaaatgggtttgaagtcaggagggcagggatgtga

SEQ ID NO: 387276 - DNA, 261 bp, Salmonella enterica
atgttctgccttattcagcgcggacagttatatgctgatggtgatggttttccggtggttattcacagttacagggataaccgggtgcgatatcgcagcagggataatcgccttcgttctgtttgcctgagtgaatttaacagcacattcgaacgtctggaccacagggaatactgccagattaaaactgaactggagcgggaagggcatatccgacagttaagaacgatgaggaaatcgggtaatgaaaaactctcttga

SEQ ID NO: 387277 - DNA, 228 bp, Salmonella enterica
atgaaaaactctcttgaggatttacataaccatttgtttgcgcaacttgagcggctgtctgaggagggattaaaaggtgaagagttaaaggcggagttatccagagccaaaggtgtttccgaaattgcaggaaaaattgtggagaacggaaaactggtactggaggcgaaaaagttgctgggtgataacctggttaagtccgtgcccggatatctggagcccaaataa

SEQ ID NO: 387278 - DNA, 588 bp, Salmonella enterica
atggcgcgtttcatttttaccgctcaaatgaaagcctggatgcgggcaaattatatgctgccgctgggagcccttacgattgcctttaatcacaggttcgatacgacatgctcaaatgaagccattaatggtttccggaaacgacttgggttaacgaccggacgtaccggttgctttttgccgggtcatgcccccgctaacaaaggaaagcggggacttacgaaggcgaaccgtggttcgtttggttcaggacatcgaccacataacgcaatgcgtcctggcgacgaagcgctgacaaaggatggttatatcaaagtgaaggtggcggagcctgataagtgggaactcaaacaccgtctggtgtgggagcaacataacggggaaataccagaaggaggtgtaattcgttttattgataataacaggctgaactgtgtaatagaaaatctgatgctggtcacgacaggtgaaaacgcagtaattaacaggtggtattcaggtgcggcaccagaacataaatatacggtactggcactggcaagaataaaatcagtaatagcgaaaaagcagggcagtacagacaattaa

SEQ ID NO: 387279 - DNA, 621 bp, Salmonella enterica
atggtgattatcacgtacaaaaaccgcttgctgccccctgttgtcgtggggtacatttccgctgcatctcataaaacgggtgtcgggattggaaccccgcaggacactagtgcacaaccgcgcaagcggtttttttacgtgcgaagcatagccacaccatttcgctttatggtggggcgtgcaggggagccgcaaggctcgccgggttctagtgtctccggtagttccaaccctgtacgtctcaccaccctaagcttggaacctttgggcggtgagttattaaaatcatcgacactggaggccccatcatggccaactgcaaaccacgccgtacccacgctgacgttaagcgtacccacacgtaaaccgaaatcgatcgccgtctgttccgggccgggcagatatccagaatcatgcgtatcaatatgctgtctgacgacgcatgcaccatcacaccgttatacattgcggccgtattcagctatctggcggacgatctgcgggacattcaaaaactggtgggaacgccaggaaaatagctctcctgaaaaccttacacaaaagcaacactccgcctgctggtggggtgtttgcctgtctgacattcaggaggcgttatga

SEQ ID NO: 387280 - DNA, 1947 bp, Salmonella enterica
atgactgtaccgataaacggcggaccacgcacgccgtcaccggaagagctgcaacaattttttgacgatgtacgccagacttttgctcaactgccgcgctttattgctaaaaaatttaacgacaggataagcagtgcgtatcgcctgcgggctttcgcgggcgctcagacgaaattcagtgacattatgcgtcacgattaccggctggtggagctgacccatcagctgtacgccattgcgtcaggggaattaccaggatatctgtttggcggcctggcatcagattacgcctacggcgcagtccgttcgatgacgttccggtttaatgcgctggtggacggtgacgaaagcgatgccgcgctgctggcgcaggaactgacagaattcctttgtgacgaggtggagcatcttaaccgcacgctgcgggatgaaagtgcgtcggagctgctgggcatactttacagtatggcggcgggcgtcacggagcacttcaaagccgatccccccgaatggaaccgctacacgggtaaaaaactcacgtcggcacaaatgaagatcgccatcagcaggatgctcagtctgcgattctggtcccgtcatttccgtatctttgcccgccgctggcgcgaacacctttacatctcagtaggagatgttcgccgacagcgtgccgtgttctgttcgccgcagtggactcagtgctggctggccagccggaagcgtggccgtgaaatcatggcagaaaccgacatcgaggacgaagataccggagaaacgttgtcgctgttatccgccgtggacgccagcgtatcaaataatgaaaagcgccgtgcggaactgttgacgcgggttaaaggacttgaggagctggccgggctggatagcctggtacaggacagggattataccggcctgtttttcacctggacagccccgcgccagtatcacgcgtggctggaaaccggacgacgtaaccgaaaatggaacggtgccagcccgagagagactcagcgctacttcacccgaacctttaaaaacttcagtaccgcgctggctcgtcgcggtgttcagatgttcgggatacacatcactgaatcccatcacgatggtacgccccactggcacggtattatgtttgttcgccgggagcaggaagccacattgcgcgatgtttttgaggcatacgcaaacacggagaactgttccgctcacaaagtcggagcctcaccggcgcagtctcaactgatgattaagcccattgatacgcgaaagggcagcgccacagcctacatcaccaagcatatctgccggaatattgagggatgtgctccgggcggcaccgacagggagacaggcaggacctggtcagaactcgcccggcatgctgccgcgtgggccagtctctgggggattaagcagtttcagtttactggcggcccgccagtttcagtgtggcgtgagctgagaaaactcagcgaccagaaaaaagccgacagtgttggtcctgtttttggtgaactgcacagagcggcaggcggtggtgactgggcggcatacacccggctgcagggtggcgtgccgacaaccagaaaaaatctcacgatgcgcacatggtacctgtccggcgaagagccggacgagtgcggccagtatatccctgttcttaaaggcgtctatctgccggggagcaaccagcccccggtagcgacacgcacccgtaaatggaaggtcagaaccctccgcaagagtgttaaaccgggctccctgaaaatcagcaggaagccggctttatcgccctggactcgtatcaataactgcactatgcgcagaaaacaacccgaagatcgcccgcctgatccttacctgaagatcccgatccagttagaacttgatctccgtcggggaggaagtccggaaaaacaaattagccatgagaaaaatccgtga

SEQ ID NO: 387281 - DNA, 975 bp, Salmonella enterica
atgcgggccatactgacagcatttccacaaaacggtgccagggtcacactgctgaaatccggaaacctgacccacaaatttcgcgagggtcagcacgttatgatcagcgatgtaccccgacagctggagaatatgccagcgggcgaaatacccgatacagggcaatggctggctcaggatgatgacctgcagtcgttctttgccgacagtaaggtgataaatgctgctggtggcccggaaggtctgaaagcatgggtaagcagaacaccgtattgccagtgcgtaaacggtgatcacgtcaggaacctgacaaccgcacagtcaccggatggcggtgccgtgaggctgtgccatgcgtgtgataacgttcattacatgaagggctaccgcgaactggcggatgttatcaccagaaaccgcgcggagtgggttgtggattatgcccgtatgagtctgaggcttgaacgggaacaccaggtgacgttaccggagttattttgctgggcggtattgcacagcgtgacagaggctatgcccgtgaacgtgatacgccgctttgcctccctgccggaagatgaggtgctcaccggcacactaaaagaagcggatataaacccctggcaactcagcccccgtcagctggtggacaaaaaagcaggtgagggtatgacagttatcccccctgatatctgcgagcgtacggcgctgtcgatggtaccggggcgcgtaagtcctgttaagcctggcaacgctcgtgacaaggtacgtggcgacgcagtaaaacccgtactcaggctgtccattgacggtgacccgcccgcggggcacatgcgtaacccaacgatgctgcgcctccggctgcctgaatacactcagtgggtaaaatgccggtcatgttgcggttgcggtatgccagcagacgacccgcaccatatcatcggccacggttttggcgggaccggcacaaaagcctga

SEQ ID NO: 387282 - DNA, 714 bp, Salmonella enterica
atggctggtcagaacgttaagcagagcgacaggcattggtgcaataacggcagcgggggcgaaacagtgataccacagacaatcacctgggtaagaaacaacgtcatttttgcactgaactgtggtgagaggccgcagcagggacaactggccgcattcgggggatttgcccgcgccaccagtaaacgctatggccgtcaacgggaacgtacgctcaaaataggtaagcgatggtactgtcgggataccgagcctgtttatgtgctggagacggtaagggcccggaagcagaaagaaatgataacgccggaggcgttcagcagcgcctcatggcgtcgggcgataaaccggctggatgattaccacagagcgtgggtattgtactgctacggtggccaacagacttatatgaatcacatgctggtttgtgaatacctgtggatgcagatgcagggacgtcttaaagggaagcgggtgacaaacgatatgacggggaacctgattacgctgactggtcttgtggtctggaatgcggggcagataatgagtcagagggaaaacattaccacttacccatcaacgtacgccgctcaggaaattggggtaagcgccccggcgtggtcacggcactacaaaaaacactggaagtttatgagtgatcagtgcgcagaactggattatgcagcccttgtgtcactgatgaaaaaaatctaa

SEQ ID NO: 387283 - DNA, 495 bp, Salmonella enterica
gtggcggtttttttaggaataataactggagttatttctgcttttgttaagtcaggcactgaggccattcttcctccacgtacgcctgacagaatcgcccctccattacaaatgctaaatgattttgggattgactggcataaactggtttacagttattcagaacagctggtttattggggaggaaatgcaatacatatcattttttcaattgtggcagcaatcatctactgtgtcattgccgagatctttccaagagtgaccatgtggcaggggatcatattcggtattctgtttgccattgtttgtcatgggatagcacttcctgtacttgggttatctccaaatctcgcacgattaccgctggatgaaattgtttctgaaattgtggggacatgtctctggatttggataattgaattattgcgcgttgctctccggaacagaatgtttgaaaaaaatacttatgtgagtgatgaaaaatattcactttag

SEQ ID NO: 387284 - DNA, 303 bp, Salmonella enterica
atggataaacacactacctggctggcctatctttgggcggcaattgcgggatatttcgcacactggacgttggatgattacggcgcactgattggtatcgttctggcggtggccacgttcatggtcaaccgccactacaaaaagaaatcggagcaggcacaggcaaggcaggcggccgcgctggaagaacgtaaccggctaatcgcgcggattattgagaaaaacgatcacgacagcacgctgaaaatgctggcggtctcagagatgccggaggctgaaagtggcaataaattcgaaggttaa

SEQ ID NO: 387285 - DNA, 540 bp, Salmonella enterica
gtggcaataaattcgaaggttaaatacggtctctctgctgctatgctggcgctgattactgcgggtgccacagctccccggttgctggaccagttcctgcaggagcgggaaggtaacacgctggtggctattcgtgataacggcggtgtgtggtcggtatgccgcggtgtgacccgcattgatggtaaacccgttgtcaaaggtcagcgcatgacacaaagccagtgcaaccactataacgccatcgagcgggataaggcgctggcatgggtgacgaagaatattcatgttccgctcactgagcagcagaaggtgggtattgccagtttctgcccgtacaacattggtccagggaaatgtctgccgtccacgttttaccaccgactgaatacaggcgatcgcaaaggagcctgtgaagcgctgcgctggtggataaaagacggtggcaaagactgtcgtatccgttcgaatggttgttacgggcaggtgatacgccgggaccaggaatcggcgctgacgtgctgggggatagactggtga

SEQ ID NO: 387286 - DNA, 528 bp, Salmonella enterica
gtgctgggggatagactggtgaataaaacattggctgtgtttctgctggtggcaagtgcgtttatagccggaagcgtctggaacaaccgtggctgggaaaagaagtggggcgagcgtgacagtgcggaatcatcgcaaacagtgaatgcgcaaaccgcagcccgaatgattgaacaagggcgtaccattgcccgtgatgaggctgtaaaagatgcacaagtacaagccactaaatctgctgtcgcctctgctggtctgtctgccactgttagccagctgcagcaacaggcaacaaaactcgccacccggctggacgccgcaaagcacaccgcagatcttgccgcttccgtcagaagcaaaacagccggagccgacgccggaatgctcgccgacatgctcggagatattgcagcagaagctaaacgttatgctggaatcgctgacgaacgatatgccgctgggatgacgtgtgaacggatttactactcattgaaggattttagaaccaaaggagtggctgaaagatag

SEQ ID NO: 387287 - DNA, 228 bp, Salmonella enterica
atgaactccttccatctctcaactcgtttcgtcatgatggcaatgccagtactcccgctcagaatctgtaaggttagctgtgagagtataatccatacgggaggtatggttcgcttagtcggggtcgaaccagaaacattcaattatgagttggattcaccactcccttcaaaatcaaacaactcacaaacccgtttgagtatagaaagtagttttaattatttgtga

SEQ ID NO: 387288 - DNA, 402 bp, Salmonella enterica
atgaaaatgaagatgttctgtaaagccattgcttattttgcactactgacttcaactgcatttgctgcaggtaaaaacataaacgtagagtttacaaaagggcacgacagcgctcaatatacgggtgtcataagaggttacgattacgacacatataaattctatgctcagaagggacagaaaatacatgcaagtatttcgaacgatgggacatacacttacctgtttgggccaggaattagtgattcagttaatctgtccagatactcaacggatctcaatgaaaataatcagtacacactccccgctaccggtagatatgagctaagagtacttcaaatgcgcaacgacgcccggagaaataaatctaaaaaatacagtgtcaatattcagataaagtaa

SEQ ID NO: 387289 - DNA, 546 bp, Salmonella enterica
atggaggtcaacaaaaagcggctttctgaaatatttggtgtcagcgtgcgaaccattcagaactggcaggatcagggaatgccggtagcacgtggcggcggaaaaggtaatgaggtcctctatgaatcttccgcggctatcgaatggtattccgcacgcgacgcggcgattgagaatgagaaattacggaaggaggtggaagaccttcgtcttgcatcggaatccgacctccagccaggtacgattgactatgagcgtcaccgcctcacccgggcgcaggcagacgcccaggaactaaaaaatgcaaaagattccgctgaggtggtggaaaccgcattctgcacgttcgtgctgtcgcggatggccggagaagtagccagcattcttgatggagttcctctgtcggttcagcggcgcttcccggagctggaaaaccgacatattgatttcctgaagaaggacatcattaaggccatgaacaaagcagctgcgctggatgaaataataccggggttgctgagtgaatatatcgaacagtcaggttaa

SEQ ID NO: 387290 - DNA, 1923 bp, Salmonella enterica
gtgaatatatcgaacagtcaggttaaggggctgcagcactctgcgcgcgcagggctactttcgctgtaccgacctgagccgcaaacggcggttgaatgggcagacgataattactatctacccaaagagtcggcctatcaggaagggcgctgggaaacgttgccgtttcagcgcgcgatcatgaatgcgatggggaacgactacattcgtgaagttaacgttgttaagtctgctcgtgttggctattcaaaaatgttgctgggtgtttatgcgtattttattcagcaaaagcagcgaaactcccttatctggctgcccaccgatggtgacgccgaaaacttcatgaagtcgcatgttgaacccacgatccgcgatattcctccacttctggcgctggccccctggtatggtaaaaagcaccgggacaatacactcagtatgaaacgcttctccaacgggcgtgggttctggtgtctgggtggtaaagcggcgaaaaactaccgtgaaaagtcagtggatgtcgctggttacgatgaactggcggcattcgatgaagatattgagaaagagggctccccgacatttctgggcgacaaacgtattgaggggtctgtctggcccaaatctattcgcggctcaacgccaaaaataaagggaacctgccagattgagcgtgctgccagcgagtccgggcatttcatgcgtttccatgttgcctgtccgcactgtggtgaagagcagtaccttaagttcggcggcaaagagaccccgttcgggttcaaatggacgccggacgaaccctccagcgtcttttacctgtgcgaacacaatgcctgcgtcattaagcagcaggcgctggatttcactgaagctcgttatatctgcgacaccaccgggatctggacgcgcgacggtttatcctggttttcatcaacaggcaccgaaatcgacccgccagacagcgtgacgtttcacatctggacggcatacagcccgttcaccacctgggtgcaaatcgtcaaagactggctcaaaaccaaaggtgacgtggggaaaaggaaaaccttcgtcaacaccactttgggcgaaacatgggagccaaaaattggcgatcgcccggatgccgatattttggctgagcgtaaggagcattttgattcagccattccgggccgggtggcctacctcactgcaggtatagattcccagctcgaccgttacgaaatgcgtgtgtggggatggggaccaggagaagagagttggctcatcgacaggcaaattatcatggggcgtcatgatgatgagtccacgcttgcccgtgtagacgacgcgattaataagacctacacccgacataacggcgtagaaatggcgatatcccgtatctgttgggatatcggcggtattgatccgactattgtctacaaccgttcaaaaaagcacgggctgttccgtgtcattcctgtcaaaggtgcatcggtttatggaaagccggtggcgaatatgccccgcaagcgcaacaaaaacggcgtgtatctgactgaagtgggtacggacaccgcaaaggaacaaatttacaaccgtttcacgctggttgctgaaggtgatgaaccgatggccggcgccgttcattttcccaacaatcccgatacttacgatctttctgaagcacagcagctgaccgcagaggaactggtcgaaaaatgggtggatggtaagcgaaaaattatatgggacagcaaaaagcgacgtaatgaggcgctggactgctttgtttacgcgctggcggcgttgcgcatcagtatttcgcgctggcaacttaaccttgattctcttctggccagtctgctggaggaggacggtgatcgtaagaataacaagaccttggcggactacgcacgggcattatctggaggggattaa

SEQ ID NO: 387291 - DNA, 207 bp, Salmonella enterica
atggccacactgactgagctggatgccgcgcgcgctgcgttacatgacctcatgatggggaaaagggtggcgacagtgcagaaagacgggcgaagagtcgaattcactgccacctccgttagcgatcttaaaaagtacattgccgaccttgaatctcaggttggcaccacttcacgacgccgggggccggcaaggttttatgtatga

SEQ ID NO: 387292 - DNA, 1590 bp, Salmonella enterica
atgaaaacaccttctttagttggtcctgatggcaaaacatccctgcgagaatatgccgggtatcacgctggtggcggcggtttcggtggtcagttaaatgcctggaatccgcagagtgaaagtgcggatgccgcgctgctgccgaacttctcgcgtggcaatgcgcgggctgatgatctggtgagaaataatggctacgcggctaacgccatacagcttcaccaggatcatatcgttggttcatttttcagactgagctactgcccgagctggcgttatctcggtatcagagaagaggacagccgcgcatttgccagggaggttgaagccgcatggtatgagtttgcggaggatgatttttgcgggattgatgccgagcgtaagcgaacgtttacgatgatgatccgtgaaggtgtcgcaacgcacgcatttaacggtgaattgtgtgtgcagccgacctgggacagcgactccacgcgtctctttcgcacgcagtttaaaatggtcagccctaaacgcgtcagcaacccaaacaacactggtgattcccgtaactgccgggcaggcgtaaaaatcaatgatagcggtgctgcactggggtattacatcagcgatgacggttatcccggctggatggcgcaaaactggacctatatcccacgggaactccccggtggcagaccttcatttatccatattttcgaaccactggaggatggtcagacccgtggagccaacgtgttttatagcgtgatggagcagatgaaaatgctcgatactctgcaaaacacgcaactgcagagcgcaatcgtgaaggcaatgtatgcggcgaccatcgagagtgaactggataccgatacggcgatggactttatcctcggcgctgacagtaagcagcaaaataagctgactggctggcttggcgaaatggcctcttattattctgcagcgccggttcgcctgggtggcgcgagggttccccaccttctgcctggggactccctgaacctccagtcggcgcaggatacggataacggctattcaacctttgagcagtctctgctgcgttatatttccgccggtcttggcgtctcttacgagcagctttcacgtaactacgctcagatgagctactccactgcgcgcgccagcgctaacgagtcctgggcgttctttatgggccgtcgtaagttcgtggcggcgcgtatggcctgccagatgttcgtgtgctggctggaagaagccatcgttcgccgggtcgtcactctcccgtcaaaagccagattcagttttcaggaggccagaacagcctggggtaacgccaactggattggttcagggcgtatggccattgacgggctgaaggaagtgcaggaggccgtcatgctgattgaggcaggactcagcacgtatgagaaggagtgcgccaaacgcggagatgactatcaggaaatcttttctcagcaggtacgtgaagcgatggagcgccggcaggcgggacttaaccctccagcctgggcggcagcggcttttaacgcagggctgaaaaaaacaaacgaggaggagaaagatgacgcccgagctgcgtaa

SEQ ID NO: 387293 - DNA, 1347 bp, Salmonella enterica
atgacgcccgagctgcgtaatcttccgcatattgccagcatggcctttaatgagccgctgatgcttgaacccgcctatgcgcgggttttcttttgcgcgctcgctggtcagttgggtatcacccgactgaccgacgcggcatccggcatcacccttggtgctgaacagattgctgagccgctggcgctgtttggtgatgatgaggacatggggtcccggccatcgcgtagctatcaggtgacgaacggcattgcagtactgccggtttccggcacgctggtcagcaaaacccgttctctacagccttattccggtatgaccggctacaacggcatcattgcccggctgcaacaggcgatgagcgaccccggcgttgaaggcatcctgctggatatggacacacccggagggatggtgtccggtgcatttgactgcgccgatattattgcgcggatgcgcgatattaaacccatctgggcgctggcgaacgacatgaactgcagcgccggtcagttgattgccagtgcagcatcgcgccagcttgtgacccagacggccagaacgggctccatcggcgtcatgatggcccacagcaactatggggcagcgctcaaaaccaacggcgttgaagtcacgctgatttacagcggcgatcacaaggtcgacggcaacccttacgaaaagctaccaaaagatgtccgcactgattttcagacgcggattgacgctacccgtcagatgtttgccgaaaaagtatccgcgtataccggcatgtccgtgcaggccgtgctggatactgaagctgccgtgttttccgggcaggagtcggtagacgtcggtctggccgatgagctggttaacaacacagaagcgctgaatgtcatgcgcgatgcgctcaacaaacgaaaaataatcaccactggagggaatatgactcataccacggcacccgctgctaccactcaaccatcagcaaccccgactgcaactcagaccacagcatcgactgatccggtcatcaccgccgaagtggcaaccgagatcgttgcggctccagcagacgtcagtgccctggtctctgctgcagtcgttgcagagaattgtcgcattatgggcattctgaattgcgaagaagccaaagggcgagacacccaggcgcgcgtactggctgaaacgccgggaatgacggttgagagtgcgcaacgcattctggcagctgcaccgcaaagcgctcaggcacgtactgatacggcactggatcgactgatggaagctgctcctggcgcattgtcggcaggaaacgcatcagctgaaacaggcgacgatttgttaaacaccccagtttaa

SEQ ID NO: 387294 - DNA, 333 bp, Salmonella enterica
atgtcaaataccgaagtctttacccatcatcagccgctcggtaacagcgacccggcacataccgcgtatgcacccggcgaactaaaggcatccactgcagcgatgacgccgctgatgctggatgccacttccggcaagctgaccgtctgggatggtgctcatgccggtgaagcaatcggcatcctggccgttaccgcagaccagagcagtgacgagctggcattttataagtccggctctttccgcattgaggatgtgctctggccatctgcagttactgatgaaagtatcaagcgtaacgcgttcgccggcacggcactcagcatcgtctga

SEQ ID NO: 387295 - DNA, 1026 bp, Salmonella enterica
atgtcagtttatacaacagcccaactgctggcggtcaatgagaagaaattcaaattcgatccgctcttcctgcgcatcttcttccgcgaatgctatcccttcagtaccgagaaggtctacctgtcgcaaattcctgggatggtcaacatggcgctgtatgtctcgccgattgtttccggcaaagtgatccgctcccgaggcggcagcacctctgaattcactcctggatatgtaaagccaaaacacgaagttaacccgcagatgacccttcgccgcctgccggatgaagatccacagaacctggcagatcctgcctatcgccgtcggcgcatcatccttcagaatatgaaagatgaagagctggccatcgctcaggtggaggagaagcaggcagtctcggcggtactcagcgggaaatacaccatgaccggggaagcgtttgagccggttgaggtggatatgggccgcagtgccggcaacaacattactcaggctggtgccgcagcctggacttcccgcgataaaaaaacttatgaccccaccgatgacattgaagcctatgcgttgaatgccagcggggtggtcaacattatcgtgttcgatccgaagggatgggcgctgttccgttcctttgatgccgttaaggagaagctcgatacccgccgtggctccagctcagagctggaaaccgccgtgaaagacctcggcatggcagtctcctacaaggggatgtatggcgatgtggccattgtggtgtattccggtcagtacatcgaaaacgacgtcaaaaagaactatctgcctgatatggcgatggtgctgggaaacactcaggcacgcggcctgcgtacctatggctgcatcctggatgctgatgctcagcgcgagggtattaacgcctcgacgcgttacccaaaaaactggattcagacgggtgatccggcgcgcgaattcaccatgattcagtcagccccgctgatgttgctgcccgatccggacgccttcgtgtccgtcaagctggcataa

SEQ ID NO: 387296 - DNA, 441 bp, Salmonella enterica
atgacagaaaaagaaaaactgatcgcccgtcttaatgaactgggcgtggcgctaaaccgtgaagtcagcaccagcggcactatcaaggagcttacgatgcgtatcgcagagctcgaggaggagctggaggaaggagaagaggtgattgacgatgaagccggtgccaggaacgatgccgatagtaccgacagcaccgacagcaccgacagcaccgacagcggtgccggcagtagtggtgaaaaaacatcggacgatgatgctggcaccagtgccgcaaccggcgatctggtctgcgtagaaacgatggccactctgcatattgatgccctgcatgccactcgggatgagcgagtcaccattgtagagcctggtgtgattatccgtgtatccgaccaggatgctgacattctgattgctcaggggctggtccgcgaagcctga

SEQ ID NO: 387297 - DNA, 360 bp, Salmonella enterica
gtggctgatttcgacaacctttttgatgctgcaataacacaagccgatgacactattcgacaggtaatggggacatcggcaacggtaatatccggtgcgatttctggcgtcactttgagtggtgttttcgatgatccggaaaataacggttacgccacacccggcatccgtatcgaggggaccagcccgtctctgtttgtgaaatcagccacgattgggaaactggcgcgcctggatacgctggacatcaacggtaaatccttctgggttgatcgtattggtccagacgattgcggctccagctatatctggcttggtagtggatctccacccgcggatatgcgtcgtcgaagggggtaa

SEQ ID NO: 387298 - DNA, 402 bp, Salmonella enterica
atgaacaaacacacccaaatccgccaggaggttctggcaaaactcgatgcgctgtccgggactgcggtcaccctgtttgatggcctgccggccttcattgagcctgaagacctccctgcgatggccgtatggctgactgatgcccagtataccggcgtcatgactgatgaggatgactggcaggccgttctccatgtagcggtatttctgaaagcgcaggcaccggatgcggagcttgatacgtggatggaggagaaaatctatcctgcacttgaggcggtcagcgggctggaaagctttatcgatacgatgacacctctgggttatgactaccagcgggacagtgaaatggcaacgtggggcatggcggaaattacgtaccggatcacttacacccactga

SEQ ID NO: 387299 - DNA, 744 bp, Salmonella enterica
atgaaagcacccaatccactggcaaaaaccaaaggggccggaaccacgttctggctgtataccgggcacggagacgcgtttcacaatccgctggccgatgatgactggctgcgcctggcgggtatcaaagatctgcagccgggtgaaatgactgccgatgcggaagatgatgattatcttgatgatgaagatgccgactggaaaagtaccacgcagggacagaaaagtgtcggtgacaccactgccacactggcctggaaaccaggcgaacccggacagaagacgctggttgagttgtttgactccggcgaggtccgtgcctttcgcatcaaataccccaacggcaccgtcgatatctttcgcggctggctgagttcactgggtaaaaccattactgccaaagaagtgatgacgcgcaccgtgaaaatcagcggggtggggcgcccggtcctggcagaggaagacgccccgggcgtggtcagcgtttccggggtgactgtggtgccgttaaatacgtcggttgctgtcggcgccaccaccacgctgacctttaccctcaaaccggatgatgccacggacaaatccctgcgtatcgccacctcggatccgaagcttgccaccgtcacgcaacaggacaacgtggccactgtcaggggtataaaatccggtactgtcagcatcgtggggatcagcacggatggcagccttgtcgccgtggccccggttacggttaccgccccttaa

SEQ ID NO: 387300 - DNA, 405 bp, Salmonella enterica
atgtttctgaaaaccgatacctttacttacggcgatcattccgccgtgctcagcgagctgtctgccctggagcgggtggactacctgatgtttatccggcagcgaaccgcggaatatgatgcgctgccggaaaccctgtcggaacaggagcggcaggccgcgtttatgcagatgggcgtggatatcaatgcctggctggtgtcccgttcactgtgcgaaagcaaaaaggaagaggatgcccgtccattatatgacgcggtccgggtgcagtggtcttatgacgcgctggggttgggggcggatatggttctgatgctcagcggcatggtggtccctgttgcggatgatgccggtgaggatgaagactcttctgagcaggaagtgctgacaccggaaaagccctga

SEQ ID NO: 387301 - DNA, 318 bp, Salmonella enterica
gtgatgcaactggcgcgggaattccgccgtcccgactggcggcggatgctgtcagaaatgagtgcgtcagagctgggggagtgggccgcgcatttttccctgaacagtttcagtgatgccctgctcgatgcggagtttgcgacgctgaaagcgctggtgaccgggctggtgacgggggcagtgcaggatgcggacgactttcgtctgttaagtgcctctgaacctgtccccgaaaaaaatgatgatgaactgatgcgcctgggtgagggcataaccggaggtgtccgttatggaccagatagcgaacctggtcattga

SEQ ID NO: 387302 - DNA, 3108 bp, Salmonella enterica
atggaccagatagcgaacctggtcattgatttaagtgtcgatgccgcagactttaaaaatgaagtgccccgcgttaaaaaactgctggatgaggtctcgggtaaaaccgacatcgtcacacagcggcaaaaaaatctcattgaggccctgaaaaaacagggtcgtgcatatgtggacgggagtatcgccgcgtctgatgccggcacgcgccagaaacaggcgatggtcatggcagcacagggttatgaccaggtggctcagcgtgtcgatatgacacagcggcatattacggcgctgagccagagaatgcaggaagaacgggcgcagtctgctgcggtggcagcagcccaggaccaggcgagtgcggccttttatcgtcagattgacagcgttaaatccctggagaacggtctgcaaaagctgcagcatatccagacgcaaatccgccagactaaaggacgcggtgatatttcgcagggcgattatctggcgctggtctcggaggccgctgcaaaaactcgagaactcgccgaagcccaggagctggccacgaggaaaaaagccctgttcctccgtagtctgaaagagcaggtgaccagccagaagctttctacaactgaacttttgcgggccaaagccgcagaactgggcgtcagtaacgcggctgatgtgtatatccgtaagatggaggcggcggccaaatccacccatgagctgagcctgaaaagcgcgggcgcccgtcgcgagttggggatcctggttggtgagctggcccggggtaatttcggggcactgcgcggctcaggtattacgcttgccaaccgggcgggctggatcgatgcgctgatgacgccgaaaggactggccgtgggcggtatggttgggggcgttgcggcagcggtctacggtctgggtaaagcctggtataccggctcccgggaggccgtggagtttaacaaacagcttatcctcaccggaaactatgcgggaaaaaccacagaccagctcaatgaaatggcgaagtcgctcgcaggaaacggcgtcacgcagcacgacgccgcgggcatactggcacaggtaacggggagtggcgcgtttaccgggaccgccgtggaaatggtctcccgcacggcggccagaatgcaggaagttgtggggcagtccgtggatgaaaccgtccgccagtttaaacgcctgcaggacgatccggttaatgcggcgaaagagctggacagaaccctgcattttctgaccgccacccagcttgaacaaatcagggtactcggtgagcagggaagaacgtctgacgccgcgaacatcgccatgtctgcttattcggaagagatgaataagcgcatgacagatgtccacgataaccttggctgggttgaaaaagcatggaaaagcctgggcaatgcggcgaaatgggcctgggatcggatgctggacattggtcgtgaagatacactcgatgaaaaaattgcggcactgcagaaaaagatcaacaacaacgggcttcaggtggggaaggcgtttatccctgtcagccagcaggaccgggatgagctgaagcgcctgcaggaggagaggttccacaacgaccttcagtctgcaaaagaccaggctgagcggaattaccaggaaacgcagaagcgcagaaacgagcagaacgcggcgctcgaccgggaaaacgaaacggaggccatgcgccatacccgggaagttaaccgtatcagtggcatgcagtatgccgatgcgtcaaggcgtcatgccgcccttgagcgcgaaaacgaccgccataaaaaggctctggcccgtcagacgaaaaaaacacccgcttatcacaacgacgaagccagccggctgcttctgcagtacagccagcaacaggcgcagacggaggggcagattgtcgccgcaaaactgtccgccacggaaaaaatgacggaggcgggcaggcaactgctggcttttcagcagcgcattactgacctgtcgggcaaaaaactgacggcggatgagaaaagtgtgcttgcccacaaggatgacattgagcaggcattacacggactggatatcagtcaacggcagctgcagcaccagaccgcccttaatgagctgaagaagaaaacgctcacgctgaccagtcaactgacggaagaagagcgtagcgctgcacaacagcaggcgctgacgctggccacccagggaatgggcgagaagcagcgcggacgctatgaggaacggctgaagctgcagcagcactaccaggagcaactggcacagcttcaacgggacggtcgggctaaaggtacgctggactctccggaataccttgaggcggaaagcgccctcagaagcagtctcgaacgtcggttatcatctcaacaggattattacgcacagcttgacgccgctcagaagaactggaaaaacggcgcatccagggcgctggataacgttatggcccagggaagcaacgtggccgggatgaccgaacaactcttcaccacggcttttaatggtatggctgacagtatcgccagctttgcgctgaccggaaaaatgaacttccgtgggttcgcggtatcccttctgacggacctggcaaaaatggaggcgcgtattgccgcatcaaaagcgctcggtgcgctgatgaactgggggatgagtgccatggggggcggggcagctgctggagcaggtgcaaatgccctgcagagttacggtgcgggcttcagctttaacgccgccggaggcgtttatcgttccaccgatttgagccgccacagtggcagcatcgttaaccgtccgacgttttttgcgtttgcaaaaggtgccggggtgatgggagaggccggcccggaggctatcctgcctttacgtcgtggtgctgatggcaaacttggcgttgtggcggcgggcggtggtggtggcgttgctgcgtttgccccccggtatcatatcgttatccagaatgacgggacgaacggccaaattgggcctcaggctctgaaggctgtgtatgacgtgggtaaaaaagcggccgctgatttcctgcaacagcaggggcgggatggtggtcggttaagcggagcgtaccgttaa

SEQ ID NO: 387303 - DNA, 330 bp, Salmonella enterica
atgcgagtgtttcactggaaaatcaggccgggaatgcaggtggattcagagcctgccgtggctgtcgtgaagttcggggacggttacgaacagcgacgcccggcggggctgaacaacaaccttaaaaaatataacgtgaccgtacgcgtcagccgggaggatgcgctgcaggtggagtcgtttttatcctggcacggcggcgtgaaatcgtttttatggacgccgccgtatgactggcgacaaatccgggtggtgtgccggaagtggagtgccggcgctgagctgacgaaaaccacctttacggcgacgtttgagcaggtggtgaactga

SEQ ID NO: 387304 - DNA, 696 bp, Salmonella enterica
atgcaggacataccacaaagcaccctgaacgagaccacaaagacggagcagtctgcccgcgtggagctgtgggagtttgatttgaccctgatcggcggcgacaggtattttttttgttctgagccgaatgaaaaaggaaccgcggtagtctggcaaaaacgtgaatatcaaccgtatccgattcaggcgcaggactttgagatgaacggtcaggggccgtcgccccgggtcagtctggtggtatcaaatctgtttggcctggtcaccgggatggcggaagatttacagggcctcacaggggcgcgggtggtccgccgccaggtgtatgcgaagtttctcgatgcggtgaattttgtatacggcaatcctgacgccgatccggagcaggaaattgtttcccgctacgtggtggaacagctgtcacagctgacttcaacgacggccacgtttgtgctcgccacccccactgagaccgacggcgcggtatttcctgcccgtatcatgctggcggatacgtgtccgtggggataccgggatgaaaactgtggctacaccggggggccggttgccgatgagtttgataaacccacgagtgaccctgccagggatcggtgcagcaagtgcatgcaggcgtgtaaaattcgcggtaacgaggggcgtttcggcggcttcatttccatcaacaaactgtcatag

SEQ ID NO: 387305 - DNA, 738 bp, Salmonella enterica
atgccggatgatgacattattgcgcacgcgcagcggtgcgcccccgcggaatcctgcgggtacgtggttaaaacagcgttcgacacgatttacctcccctgtaaaaacacttcccttgagccagccatgtactttcgcatgtcgcctgaagattatatccgggcgacatttctgggggaggtcatcgcgctggttcatagccatcctgacggggagccataccttagctgcgttgatcgtacgctacagatgcagacggcgttgccgtggtggctggtctgtgatggccagctccataaattccgctgtgtaccgccactcaccggacgttggtttgaacacggcgtgacggactgctacacgctgtttcgtgatgcgtaccatctggccggtattaatctgccggatttccaccgggaggatgactggtgggcggcgggcaaaaacctgtatctggataatcttgatgcaaacggtttttaccccgttactgcggataaggcgcagcccggggatgtactgatttgctgctttggttcatcgaccgccaatcatgcggcgatttactgcggcaacggtgaattactgcaccacgttcctgatcaactgagtaaacgcgagaggtataacgataaatggcagcgacgaacgcactcgatatggcgacaccgtcaatggcaaccttctgcctttacggggatttgcaacgatttggaaagcgggtcaaccttagtgtaa

SEQ ID NO: 387306 - DNA, 513 bp, Salmonella enterica
atggcggaaggctggtatcaggtcagaatttccgggcgggatgtttctgaagatgacgtgacggcccggcttcatgaaccgttatcttcgggagcggttatccatattgtgccgcgggcagagggggcaaagtcaggcggtgtgtttcaggttgtgctgggggcggtggcgatagcggctgctttctggaccgggggggcatcaatggctgcgtggggagcactctctacaggattatttacagccggagccagcatggtactgggtggcgtggcgcagatgctggcaccacagcccaaagccccgcaaatgtctcacgccgacaacggaaagcagaacacgtatttttcctcactggacaacatgatagcccaggggaatccgttgccggtggcctatggcgaagtgatgactggttcccggcgaatttcacaggagctgagtacccgggatgagagttctccggataaggtcgttaactacggaagcaggaaaggaatattgggggcatga

SEQ ID NO: 387307 - DNA, 3039 bp, Salmonella enterica
atgagtaaaggcggcggcaaggggcacacgccttatgaggctccggacagcctgaagtccacgcagcaaatgaatttgatcgacgccatcacggaaggaccggttcaggggccggtgaacggcctgcagagtattttcgtcaataacacaccgctggtgaacgccgacggcagctacaacgttcacggggtgacggtggtttaccgcgtcggggaaaatgaacagacgccgctggaagggtttgaggagtccggtgcggaaaccctgctgggcgtggaggtgaaaaatgataaccccgttacccgcaccattgtgtcaaaggagattgatcgcctgcgcatcaccttcggaacgccgtttcttcaggccagtaacaatgacggagaccgggaagagactacgctcaacgtacagatacagattcagctcggcggcaactgggttactgaaaaagacatacatatccacggcaaaaccacgtcacagtttctggcctccgtcgtgctggataacctgccgccgcggccgtttaacgtgcgtatggtgcgcgtgacgccggacagtacctctgaccagttgcagaataagtccgtctggtcctcatttaccgaaatcattgacctgaagcagacgtatcccaacacggcggtggtggggcttcaggtcgatgcggagcagttcggcagccagcaggttaccgtgaattaccatattcacgggcgcattgtactggtcccgtcaaactacgaccccgcaaccaggacctataccggcctgtgggacggcacctttaaaccgtcctggacgaacaaccctgcctggtgtctgctggatatgctgacccacccccgttacggtctgggcaacagcatcggcgtggcggaagttgataaatgggcgttgtatgccattgcgcagtactgtgatcagatgatacctgacggctttggcggtaccgaaccccggatgactttcaatgcgtatctgtccacgcagcgtaaggcttacgatgtcctggcagatttctgttcggcgatgcgctgcatgccggtctggaacgggcagcgtatgacgtttgtacaggacaggccgtctgacaaagtctggacctataccaacagtaacgcggtgacggatgcgcagggtgtgcagtttcgctacggatacagcgcccgcaaggacaggcacaatgcggctgaagtgcgttataccgacccgcagaatggctggaagacgtcaacggtgctggtggaggaccatgcggccatcgtccgtgacgggcgtaatctgctgaaaatggacgccttcggctgtgccagtcggggacaggcgcaccgggcggggctgtgggtgattaaaactgagcaacttgaaacccagacggtggacttctccgtcggtgcgcaggggctgcgccacaccccgggcgatatcattgagatttgtgataacgactatgctgtggccactatcggcggacgggtgctccgtgtggatgaggccagccataccctgactctcgatcgggcgctggaacttcccggcagcgggaccgccgcgctgaaccttatcggggcggatggaaagccggtcagcgtgaatatcacggcgcagcccgcaccggaccagttgaaggtgagcgcactgccggaggggataaccggatacagcgtgtgggggctaaagctgccatcactgcgccagcgcctgtttcgctgcgtacggataaaagagaacggcgacggaacctttgcgattactgctgttcagcacgcgcccgaaaaagaggccatcgtggacaacggggcccactttgatccgcagtctggcactcagaatggcgtgatcccacctgcagtacttcatcttactgtagatactgaggctgaagaggagcagtaccaggcaaaagcacactgggatacgcccagggtgctgaagggggtgcggtttattgtcaggctgactaccggcagcggggacgagggagatcccgttcgcctggtcagttcctccacaaccagcgaaacggaatatgcattccataaactgtcgaggggaagttacaccctgacggtcagggccatgaatggcttcgggcaacagggagagccctcatcggtgacgttcagaatacaggctccggaggcgccagccaccattgagctgacgccgggctattttcagataacggtgaccccgcatcagacctattacgatccgaatgtgctgtatgaattctggtattccgccacgcagctggtgaatgcagaagcaataacttcacaggccaggaagcttggaacggcggcgtactgggtgtgcagtggggattttatgaagcccctgcaggaccattatttttacgtccgcagcgtgaatattgtggggaaatctgtctttgcggaagcggtgggcaggtccagtcaggatgctcagggctacctggagttcttcgacggtcaaataaaaaagacccacctggcggaaatgctgtggcagcagattgacaatacacagcttaacgatgagctggccgacatatcaaaaacggtcagtgacacgaagaacgagattgagcagacggtcaataaaactctggaagagcagagtgccactatccaggaaattcagaaggttcagaaagacaccactgacgacctggaagcgatgtgggcggtgaaacttcagaaaatgaaggatggccgcctttatattgccgggatcggagcaggtatcgaaaacacgccggcgggggtacagagccagatcctgatgatggccgaccgactggttatgatcaacccggctgatggtaatacggtgccgttgtttgtggctcagggcggacagattttcatgaacgaagtgcttatgaagaaggtctctgtcgagtttggggaggtaaccggcaatctgcgctctccggggtttggcagattgggggatggtggatgggatttgagtcgggagctgaactgttttcgcagtgacgacagcaataatgtgatccgagtaaaaatggggaaactgtcgtga

SEQ ID NO: 387308 - DNA, 354 bp, Salmonella enterica
atgtatggctggcagattttcgatgaaaacggcacgctgaagtatgaccattcggtgattatgtcccactggattggctcgtttgatattccttttgtcacccggccggggtggtcgcacaccctcagcggcatacctttcattggtgggactccatacgcgttctgcgtgcctaattcagcactgaggacgcctgcgggcttcgcttacgcctgcaccacgccggatattctcgttggttcagattttatcagactctcttatccgtcagcactttttaactatccggatgacctgggcgtaggcctggctttgggagggctgacgcttcactacggggtctacaacgcatga

SEQ ID NO: 387309 - DNA, 774 bp, Salmonella enterica
atgagccgctacggtattgaattacgaaacgaccacaactacgtggtggcggattcggaaaatcttaattttgtcctgagaagtgccggtcggattcacaataccaggttctctgagggaaattttcagaacccgatcagttgggcattcatggatctgtcaggttttaactgccccctgatcttcatcaaatcagtcaatgctgaccagcgcgtggctgttctgccgggagcggcagatttccaggcagagaaatcacccgtctatcggcattttattgtggcgaaatggtggaataaaaatgtcggtgatctgcagtattacatttttgaccggtggctaccgccggagcgctcaatatgtggtatccagatgtttgacggcggaggcaggataacctttgacagcggctggaattttttaaaattgcgaaatgtcctgtggctcgatcccggctaccctaatcattcaggcagtgaacagggggaaaactggacaaatattggcaatgcgggggcgggcaatctggctctgagtatgccaatacccagagcgtgggatttttacgggagaggggccggaagcggattcaggctgaacgaatgcttccaccttgaccgtgccaacaacgtttatttatcccttgtcccttatggaaagtacctcgatatgccgccgcccaccggctgggcacatgccggttcgcgttctcagattatggtggcggacgtatcgggtcttcccacgtcgttaaatcctgtacccatttactga

SEQ ID NO: 387310 - DNA, 1218 bp, Salmonella enterica
atgccagtcatctcaggtaccctgaaagacggtgccgggcagcccattgcaggctgcaccattcagttaagagccttgaacactaccagtgtggtgataagaaccaccacggcacgagtaggggcgaatactggtgcgtatcgtattgatgcgcagcccggccgctatgaagtggtactcgccatagatgattaccctccacaaaaagtcggcatcatcgatgtttatgctgactcactggacgggacgctgaacgattacctgacggtcgtcagcggtgattatctgatacccgatgcgatgaagcagtttgagcaactgacgcagcaggcgaaagcgtcggcctggcaggcggaaacctccgcgaagggtctggaacagctcagggaagatgttcttgcagcgaaagatgttgtagtacagtctcaaaaagacgccatcgaccaggcccggctggccggacagtcagctttatcagcttcacgaagcgcaacagatgccggtgattcagcccgccagtcggcagctggtgctgttgcatcagaagatagtagtaaagcgtcagcgctgtcggcaaaggccgcagccgtgtcagagaaaagtgccactaccagcgaaaagaacgccggaacctcagagagaaatgcaaaagccagcgaagacgcggctgcgcaaagtgtggcaataatgaccgaacaggtctcacttgcgcagaatgctgcgaaaacggcggcaacagatgctgtggctgtggtggtgccggaggtaaccagacagataaaagatgatatttctgccgacgtcaaccgggcagaagccgctgcctcagcagcagagaccagtaaacaggatgcacagcaggcgctgaaagcggcacaggacatagccaaaacacccggcccctccgcatatgatgtctggaagtcacagcagcctgacagcacggataccacaatggccgcttacctgaacaccatgaaggggaaggataccatcattcctcgccccggtgaggtggggtcttatgtactggcactggcacaggggggcggggcaggattcggtggagaaatagagggagagtatcttaagcccacggcttttctggggggagatttctggattgaggagggtgtctctctggcgggaacgtgggccgctgtggggtattttagcgacacaggtccccagagaacgcttttcctgcgcatacgttga

SEQ ID NO: 387311 - DNA, 570 bp, Salmonella enterica
atgataaccatcacagatgcccgtaacgggcaatataacgagaacggcacgatttcagttgaggtcaggttcagcgacagtgataaatatctgccctatacagctgcggccagggaccctgcagattacgggcagcagttgtataccgaccttgttgccgggaagtacggctatgttgccccctttattaccacgccggagattctacaggcggcaaaggcgcgaaaaagggatgaaatcaaggcctggcgtgatgcacaggagaacggcaatataatttttacactgaagggccagcgctgggattgcggtaaggcctcacaggcgcggcttgctcccgtggtcgcggtggcgaaagcgggcctgctgccgccaggatttttctggacggacgccgataatactgatgtgccgatggcaacgggtgaactggtggaactggaaaaggcgatgcagcagaatatggtactgcagggttttaaaatccacgagcgccagcgtcagatgaaagaagcggtaagtgcacttggctctctgggtgaggtccgaagctatcgggttggctggtag

SEQ ID NO: 387312 - DNA, 2775 bp, Salmonella enterica
atgaacatcgaaacaacatcgcagaccaatagaaaaaaaataataacattcgccttactttttgcatcactccctggaacaatatatgccaacaacgctatggcccaatccgttacagggagtggtgatgttttagtttctcccaatgctgcatctgatgcccccacagaacccgcacctataaccagtccaaactgggtgaccgggaaagagctgattgtcggtcaatcaggagtagggaacattgacataaaagatggtggctcaatttcagccaccgctctcaataccggttttaaaaactcatcaacaggtagagtaaacgttgacggatacgacgtctccacagggaaacactccagcctggaaatattcaggctcgatgtcggtaatcagggtaatggtgaactcaatattagtaatggcgggcaagtgaccactaaaaatggtgctaccacgattgctatagccgggggaccaggaataatcaatatcgatggtgttgcgcctgatggcgtatcatccacccttcgtacaggaggattggtaataggtaacggctcgcatggaacagtgaacgtcaccaatggaggagaactgtattctgattatgcaaatctgtctcaaagcgatgtgggtagcgggacagcgactatccgtggagtacacccgagcgggacagcctctgcctggaaggcagtgagtgtagagcttggaactctgggggatggtactctgaatgtttttgatggtggctcggtccttgtaaaagaatatatcaccgccggtgcactaggtggcacaggaaccctgaatgtgagtggtgtaaagatgggtcacccctccaccattaaaaccggggaagaggtattaatgggcacatccggaatttttgtaatccccggttcacacagcacaggaacattaaacctgtcagatggtggcatttttgaagccccacttatacagcttggcgtagataatgatacgacagggaccatcaatatcggcaccggcagtatggccggcatactaaaaacccccatagtgacaacgggtacaggaaatgccaccgtcaacttcaaccatactgacaatattgagtttagcccgaagttaaccggactgatgactgttaccaaatccgcagccggcatcacgaccctgatgacgacaagcgactacaccggcaccaccaccgtttccggtgggacattaaaggctggtgcagcaaatgtattcagtcagcgctcggatttcacattatacgcaccaggcgtgttgtcagtgaacgaccatgatcagattataaaaaatctgaacaacgccggtacagtagaccttggacaggtagcaggtaccacgctaaccgtccgtaataactatgccggaaacaatggtacactgttactccgaacaaaactgggggatgacacttcagtaacagaccgtcttgtagttaacggtaacaccaccggcacaacaaatgtgcgagttaaaaacgatggtggcgtcggagacctcactaataaaggcattgagataattcacgtcaacggtaaatcggacggtaacttccttttgcagggacgagttgtagccggagcctatgattattttctgcataaaggcacacctgaatccggaaatggtaactggtatctacgctcggaattacccactcaaaaaccagaaacaccggttaaaccagaggcacctgaaagtcctgtaatcccccctgaatcacctgtcgagactcccgaagtgccaacgacaaaaccgtcttttgacgtccttcgaccagaggcgggcgtttatacggcgaacatcgctgcagccaatactctttttaccaccaccatgcacgaaagattaggggaaacgtattatacagatgtactgaccggagaaaaaaaagccaccagcatgtggctgcgtaatactgggggccataataactggcgtgatagttccggagagctgaaaacacagagtaaccgctatctccttcaaatgggaggcgatattgcacaatgggtgtctcctgacaacagcaggatacatctcggggtaatggctggatacgccagtcaacaaaccaagacccgctcatccttaactaactatcaggcaaaaggttctctcagtggatacactgcgggtatatatggcatatggcaagaaaacgatggtattgataacggtgcttatgtcgatacctgggcccagtacaactggtttagtaatcaaattaatggtgagcaaatcgacgatgagtcgtataaatctcgggggatcgttgcttcacttgaaacaggttataccattaaagtcggagaggtcgtcgaaagacagggaagaataaatgcatggtacatccagccacaggcacagttgacctggatgggcgtaaaagccccctcccatacggaagcaaacggcacagacatcaaatcaatgggtgacggtaatatccaaacgcgattaggtctgcgcacatatataaaaggacattcttccatggatgaagggaatgaacgtaatttcgagccctttatagaaatgaactggctgcacaatacgaaaaattttggagtcagaatgaatggtgctgagatataccagaacggagctagtgatttgggggaaataaaactgggtactgatggacaaatcaattcatctctaaatctctgggggcagattatcactcagataggaggaaaagggtataacgatacgcaagcaacgctaggtattaaatatattttttaa

SEQ ID NO: 387313 - DNA, 561 bp, Salmonella enterica
atgaaaaaattaacctcaatggaattagatttaattgcaggatctggtatcggtcttggtgaagcactggaagatgttgctgaagcaattattgaaattgcacatggcggagatggtggcgtagctcttggagaagccttggatcatgctccagctgaacatgtaactcactcaggagtcacacatgataaagacattttaaatattgacatgatatctgcgaatatggatatgcatgatattcttttccatcacggcaattcagtgggtttgcagaaagatttgaatgcccttacttcagatcaacgtgttcattatgatgttcatctgggaggatatctggctggcccaggaacattatttcatgatgatgtccagataaaaagagaccctgaagttttaaatattgatacttattctgtaaaccttgatcgcagcgaaattttatccggacatgcaacaccatctgatcagactgacatcaatcaactggttcatgatcacagaactcattatgatgtcaaggagggtaaatttgttgccgggcctggagaaagataa

SEQ ID NO: 387314 - DNA, 273 bp, Salmonella enterica; identical to SEQ ID NO: 387110

SEQ ID NO: 387315 - DNA, 588 bp, Salmonella enterica
ttgcttttgaataaaaagttaaaaatatatgatgattataatcagactcagactcaatataaaaaacaaatttatgatttaaaccagaaaataagtgcagagtctgacagtcagtactacgtaattacttcccctgtggaaggatatgtatccggcctgactaaaactaatggcgatagtgtttctccacatgaaaaaatcttaacaattatatctgacacacgagaaatggttgtttacctctttctggatagctcatctatagccgatgttacttctggaggaagagtgaccttaaaatatgatagctatccatttcagaaatatggtgtttatcaagggattattaaggatattggcaggtatccgatagaccccagtgtaatagagtcaagttatggtcttaaatacagctcacccatgtaccgaatcaccattcagccagacagcaatgatgtagtatatgctcaacatttatacttaataccatcaggaagtcatgtgcatgctgacatccttcttgacagaaaaatgcttataacttggttacttgagccattaattaagttttttaaggataataagtag

SEQ ID NO: 387316 - DNA, 270 bp, Salmonella enterica
atgccgctaagttttccaaatgtatacttaaatacccgagggagaatagagacgttatctctgaatattctcgacagtatacgaaatgcagccagggagatgcctgattcaactgatattcaggtacaactacgtgatgcattatataatgtgcgttatcaacccgctgaggacacgtttcgtgtggtcccatttcttgcagaaggtgaaacttatagttatctttgggctcacgatgtggcaacgcagagaggctgtccctgcaattaa

SEQ ID NO: 387317 - DNA, 276 bp, Salmonella enterica
atgcttcaatttttttatgtaattggtcagattgcatttctaaatcatttatgtcagattgaattcctaaagcatttatggcagcctggtatacataaggatttaaaaatctatctattattggccctggcaaactccatcgctcatttaattgcagggacagcctctctgcgttgccacatcgtgagcccaaagataactataagtttcaccttctgcaagaaatgggaccacacgaaacgtgtcctcagcgggttgataacgcacattatataa

SEQ ID NO: 387318 - DNA, 1122 bp, Salmonella enterica
atgtcccgcagagtctgcagagtgcgttcagacagtggattcctttccagacttactcttgcggatgagggcagacctctgatactttccggcaggcgggtcagttggcaattacgggcaaacagccattgtagttctgacggcagctccggcaggctggtcagctgtgggttattagagacaaacagcgtctgtagtcctggcggcagctccggcagtctggtcagatgtgggttcccatcgaccgacagcgtctgtagtcctggcggcagctccggaaggctggtcagtcggttatcagataccgacagatcctgtagttctggcggcagcgccggcaggctggtcagctgtgggtttccatcaaccgtcagcacctgtagtcctggcggcagcgtaggcaggctggtcagttggttaccagagaccgtcagcacctgtaatcctggcggcagcggcggcaggcgggtcagctggttaccagaggcccacagcgactgtagtcctggcggcagcggcggcaggctggtcagttggttaccagagacctccagctcccgtagtcctggcggcagcggcggcaggctggtcagttggttaccagagacctccagctcccgtagtcctggcggcagcggcggcaggctggtcagttggttaccagagacctccagctcccgtagtcctggcggcagcggcggcaggctggtcagttggttaccagagacctccagctcccgtagtcctggcggcagcggcggcaggctggtcagatggttatcaggaataaccagtgttgtaatatgcggtggtaaacggtctggtaaggtggtaagacctgctcctcccacgttaagcactcgactgctattattcaggcagtcacgcattttctgtaccgttgctgcgcggccgggtgactcttctgctggcgcagccctttcccattctgaccagacagcatcatattctgctgccgtctgtggagccgttgcgtcaaggagaaaggatgtccggactatcccggatgccccttccgcgtgtcctgtgcattcctctccctgtgctgtgtccagggtgaggcgatgtgtttcattgtccccctggcaattcacggtatag

SEQ ID NO: 387319 - DNA, 189 bp, Salmonella enterica
atgagaagcccttcctggcgttgcatttgtctctgtgttttccatagccctgaccatgatgacataaaaacgccgcttgatacacgatgctttatcgtacgcaggatcccccgtagcgcccttaccgcgcaggtcagcagcattattatcgatgaggactacgaagacagtagcagcacttccgtttag

SEQ ID NO: 387320 - DNA, 402 bp, Salmonella enterica
atgactatttcaattgttaagcatggtgcgccttttgtcgttcaaaatgaaaatcgtatcagttccggagcaagtcactcatcatcactttttaaatcaatccgtcatatcggcaactcttacgagaaaataaactttgtaagttgctatagcgcaaatggaagctgtttttctaatgcacagatgttagcaaatgcctctggaaggcctgtcacagggtactatggaaaaataaatattttaacagccaaactgccgactagtggtcgtacattccgcccacaacataactttattgctcatatttgttctgtgggtaatcgacttctgagctgtccaattcaaattgggtttggtttaaaacatttggtaacccgtccctcggatgacaatgtcaggtaa

SEQ ID NO: 387321 - DNA, 243 bp, Salmonella enterica
atgtgctgtcacatcgaatttacccttcaaaagcatgaaaaaacagctttgccgttttttctgcgaacgcgtgttaagtcaatggctcaatccgctcagggcccttatttttcacattttccacggagcgcgacacggcagtcagataaacttatcgacaggcacggcaccgttgacggctatcccttctgcctctctcccgtcaatatcctggcgcatccattccgttgctacctctggtga

SEQ ID NO: 387322 - DNA, 264 bp, Salmonella enterica
atgaccagcaatgaacccgcactgaacctcacctacgacgaactgtatgaagaagcccaggcgatgttaagtgtgttaagcagaaactgcagctctcccccggatacttttgacaggggctgtcgcaggggagtcatcacactctggtattccctggccatgtcgataaaggattcgggacgggactatcatgaagatcgccgacagcttcttctggccggtctgaccagcgaaagccaggaaccacctgcagatgtccgctga

SEQ ID NO: 387323 - DNA, 405 bp, Salmonella enterica
atgaagaaatactatctggccggagcactgcactgcggaacgggcaaagtcagctacgtgggcggcaacagcaaaagtccggcgctgttcgtcagcctgctgaagcggcttaaagcgacgtaccggcgggcgaaaaccatcacgctgatcgtggacaactacattatccacaaaagccgggaaacagagcgctggctgaaggagaacccgaagttcagggtcatttatcagccggtttactcgccacgggtgaatcatgtggaacggctatggcaggcacttcacgacacaataacgcgcaatcatcagtgccgctcaatgtggcaactgttgaaaaaagttcgccattttatggaaaccgtcagcccactccccggaggcaaacatgggctggcaaaagtgtag

SEQ ID NO: 387324 - DNA, 147 bp, Salmonella enterica
atgctcagagaaccttccccgcagcagtaccagtttgaaaccatcaccctcgcgaactcgtcccccaagaccatctggtccgcaaaatcgacgccgctatcgactttgaatttatccgcgatgccgtggcccacctctatgcactga

SEQ ID NO: 387325 - DNA, 483 bp, Salmonella enterica
atgcggcagtctgtctgtctgtatgctgagcgtgcagctgaaaagctgcgcggcgagcgacagttctgcaagcatattgctgtatttgtgaagacgtcaccgcgaacggtgaacgaaccgtattacgggaatgtggccagtgtgaagctgatgactcccacgcaggataccagggacatcatagccgcagcggtgaaagcactggatcggatctgggtgaatggccatcgatatgcaaaagcgggttgcatgctcaatgatttcactcctaccggggtttcgcagctgaatctgtttgatgaagtacagccgcgggaacggtgcgagcagctgatgcaagtcctggatggcattaaccattccggtctggggaaagtgtggttttcgggacgaggcattgctcctgagtggcaaatgaaacgagaaatgctttcaccagcctatacgactcgctggtctgaatttccaatagccaaactatga

SEQ ID NO: 387326 - DNA, 327 bp, Salmonella enterica
atgatcgggcgctatatcagtcatatcccggcgaagcactttaagatggtgcgttactacggttttttatcaaaccgtaaacggggagagttgttgccaaaggtgtatgaagccctggagatggaggcgcggaaaaagccggagctgccgggcttcgccaccctgatgaaggggttcctgcgcacagatccgtacaaatgcatcctgtgcggcaatcgactgcgatttatcggcgcacaggctggctggcacgcgtcggaactcgtggcagaaaggctgcataacattgaccgtaaacgatggcttctgggacagactgcaggatga

SEQ ID NO: 387327 - DNA, 561 bp, Salmonella enterica
atgtatattccgcaccccgcaaaattgctgtttaccatcgatgacagctggaatacgtttctcgaaaaattcggcgacaacgtcactccctggacccgcctctgcgtcgagcgtatgctcgcctgcggtaccgccagcatgggcgtgcgtcgttactgctgcgcatcggccgactgcacccattcccgttttttctgccagagctgtaagtcaaaggcctgcagcgcctgtggctttaaggccaccgagaaatgggtatcgcagcagagccataccctccccgactgcgactggcagcacatcacctttggaagcgcagtacaggcgacgctggaaggtccattttgcgaagaagacccggggcacctggaaaagtgtcaaatacctcggccggtacctgaagcgaccactggtgtcggcagcgaagctgaggcactacagcggcggtgccgtggtgcatcactattacgatcaccgtacgcagcagtaccggcagcagacgctgatgcaggaggagatgatcgggcgctatatcagtcatatcccggcgaagcactttaa

SEQ ID NO: 387328 - DNA, 615 bp, Salmonella enterica
atgacgcgtcaggccataagccagtgcggtgcaacttcagcatcatctcagtggtcatcaatcgactggcatcaagttgaagatgatgtatttcgcttccagatgcgtatcgccaaggcagtcaaagcacagcgctggaataaagtgcgtgtgttccagcgacttctcacccgctctcatcaggcgaagctgctggctgtaaaacgcgtcacgtcgaaccggggacgtaacacgccgggcatcgacggaacgcgatggataaatccgcaacaaaagtggcatgctgctatgtctctgacctgtcggggctatcgggcacaacctttacgacatatatatattcccaaaaagaacggcaaaacaaggccactggggatccctactatgcacgatcgcgccatgcaggcactctttctgttagcaacagaacccgtgactgaaagcacagcagatcaccattcgtatggctttcggccaaaacgctcagccgcagatgcaatcgaacggtgttttgtggtgctggcgcaaaggtcatcggcacaatggatcctcgaaggggatattaaaggctgtttcgataacataaaccactactggatgttaaagcatctctga

SEQ ID NO: 387329 - DNA, 594 bp, Salmonella enterica
gtgaaaaagagtatggcaggtcagggtgcagcaggggcgttactgctggcagggctgatgatgagtgcgggcgcaatggcggcctccggcgacccggtacagggcggttcggggtctgtgaccatcaacgtcccgatagtgacgtcaacctgcagtgttacggtgccgacggagataaattttgaccccgttgacaaaaattcactcacgaattatacggcgtttatagccatcaaggagctggatatgacactcagtaactgtagtggtaaaatcctgcagatgagtgcgcatggtcatgctgtttctccgaataatactacgtatggatactttagttccggagatccggatcatgcgctgatatataatatttatgttccaaagaatgcggggattactagtggaggggagggatcatcctcacattggatagtgagcttggataatactcatccattgacaattaacccagacagtgatagcgatattatatcttctgctattgtactgactgaagtctccaggccaaatattacaaatctgggttctgccgtcagcggtggttttgattatgtttttacctaccagtag

SEQ ID NO: 387330 - DNA, 210 bp, Salmonella enterica
atgaaatcttacgatctgttactgactatcatcagctttactgctgatttccgatccggatatcgtttaaacggaaccatgctgaattacaggtgctacgaagaattttatatctggatcggtatgtacgtgttggatgaaacagagatgatggctgtacgtgagtttgctctgaatgaaatgcaccggctggcgatagatgccgattga

SEQ ID NO: 387331 - DNA, 627 bp, Salmonella enterica
atgataattgtattaggtagtcaaaaaggtggtgttggtaaaagtacacttgcggtatcaatagccgcatatctgatgtcattaggtaatcgcgtgattattgtcgacgcagatgaccagaaatcagtattaacctggtacaacaaccgccctgaatatctcccccatattccggttacaggcgcaacaggcaacatcaaagcaatgttaaaggaacacgaaaaatcctatgattttgtcattgcagactgtgccggccgtgatagtgcagaaatgcgtagtggattgatggccgcagatgtattcatttctcctttgcgtccttctcagatggacctagatgttgtgcctcatacatgctccgtttttacagcagcaaaagattttaatgaggatgttcggggatatctcgttttaaacatgactcccacaaacatgtttgttaatgaagccaatcaggcagctgaagtactaaaggattaccctgaaatgcatctggcaaactccagagtatgtgatcgtaaagcatatcgagatgcctgggccgaatcaatgacaatttttgaaacgcaaaatgataaagcacagcaagaaatcgaagcgttagttaaagaggttattctgtga

SEQ ID NO: 387332 - DNA, 597 bp, Salmonella enterica
atgctgtgcggattggataatgactggctgcgtcttgccggtcggggagcgtttccgctctttggcctggtctgggccatgaacctcgcccgccatccgcgcattcagcagcgcgtcctgaaccggctatgggggtgggccgtggtggcgcagggcggctggatactgtccggactgcgcccggacctgggcaatatcctgtttgcctttgcggtctgcggacaggcgctggcgctgatgcagcggcacgggccgcgcgcatggccgctctccctgatgctggttctggcctggctgccgttttcggcgggaagctacggtctggcgggggtagtcatgctgatgctggcctgcggcgtctgtatgacgggccggcgtaccacacgcacagggctggcgctgtgtctggcgctggcgatactcgcgctgaatgctgcggacagcgccgcctttgccatcgcgggtctggtgatacccggcgttaccctgacggtgctgagccggacctgcactctggtgccccgcttctggccacgcgaatttttcccgctgttctacgccgtacacctggccgtcatcggactgatggtgatgtga

SEQ ID NO: 387333 - DNA, 684 bp, Salmonella enterica
atgaaagagcaggggcgacccacgctgacgctgcgccgtaagacagagtcagaaggtcagcgtgccgtaaacaacagcagtgaaccggacggtgcgggaccgggccgggtcacgcgtaaaaagaccgtggtggtgaatgcgacacccgcctggaaggtcaggaagcaggcggtggatgagagcgcgaaaaaggcgcaggcagatgagaaggccgcccgaaaagccgaaaaagcccggctgtgggcagagcgacaggcacaggagcgggaggccatgcgtgcggccaggcgcaaacctgccccggagccggtttacctgaaggtcatgccgctcgcggacgcgctcgtgctcctggagcgttgctggccggccctcgttaaggatggccagccgcagctcttggcggtcaacatccgggaggcgatggtcagtgacattcgccagcgtgggctggatgtctcggttaagacgctgaagcgctgccttgctgccgtcactcgctcggatgcgtatctgggcgccatgacggcgggcgcgtggcgcaaaaaccttgccggtgaaccggtcgcaccggtgagtgcggaggaggtagcgtatgccgtggcgcgcagggctcaggatcacgctaaacaacagcgcagggcgaccagggaagcacccacgcccgcacacgatacgaactga

SEQ ID NO: 387334 - DNA, 792 bp, Salmonella enterica
atgaataaaaccctttcagtcatgcttgccgcaggccttctggtctccggcgtggcgggggcagcagagaaacctgccgctgcctttaccccggaacaggaagcccgcattggtgaaatcgcgaaggactacctgctggcccatccggaggtgctggttgaggtcagccagaagctgcaggcgcaacagcaggagaaacagcagcaggcgatgacggctgccgtggttcagaatcaggctgcgctgctcaacgataaaggcacgccgtcatatggccccgccgatgccaaagtgacggtcgtggagttcttcgattaccagtgcatctactgtgcccgcctggcccctgaactggagaaggtgataaaagccaacccgggcgtgcgctttgtgttcaaggaatacccgatatttggtcagcgctggccggcgtcgctgagtgcggcgaaaacaggactgcaggtctggaagcagaagggagccgacgcttaccttaactatcacaacgcgatttacgccaccggtcacaacgagggcaaactgaccgatgctgatatcagtgcggcggcaaaagccgtgaaatttgatgcgaagacagcccatgatgttcagggaaccctggatggcataaacacgctcgcacagcagctgggcttcagcggtacgccagccttggtagtcctcccgtcaaccggcgccagcgctgataacgtgacggttatcccgggatacaccagtgcggaggccctgcagcaggccatccgtcatgcagccggcgatacaaaaaaataa

SEQ ID NO: 387335 - DNA, 546 bp, Salmonella enterica
atgcgtaagttcacctttcgccagctggccgtgtccggtctggtctgcctttcgctgagctgtattcagcccgcagttgctgctccctccgttcagatcggtttttcacctgaaggcagcgcgttgcagctggtccttaagactattgagtcagcacagcacgacattcggctgatgggctactcatttacgtctccggaggtggttagcgcaattgtcagagcgaaacaccggggtgtggatgtgaaaatcgtgcttgatgagaagggaaacaaaagtaaagccaaccaggcggcgatgaacgttgtggtgaatgccggtattccgctgcgtaccaacggccactacgctatcatgcacgataaagtcattattgttgataatcagacagttgagtcaggcagctttaatatgacccgctctgcggcctcgagaaatagtgagaacgtgctggtgattaatgacgtgccggaagtggcacaagcctaccttcagcactggcagtcgcgctgggacgggggaactgactggcattcttcatactaa

SEQ ID NO: 387336 - DNA, 279 bp, Salmonella enterica
atgtcgcaggtcgaaaatgcagtaacttcctcatcgaaagaaaagcgttcttaccgaaaaggtaagccgatgtcggcaagtgaaagacagcttgccgcgattgcgcgtaaacgtgaaacacataaagaagtgaaggtttttgttaaaaatcctcttaaagattggatgattacgatctgtgaagaggaaggactcactcaggcgcagtttattgagaccttactcgaacgtgaactttctgaacgtggtgttctggatgtaaagacttcacattcttga

SEQ ID NO: 387337 - DNA, 597 bp, Salmonella enterica
atgtcacgagtttttgcttactgtcgggtctccacgcttgaacagacaacggaaaatcagcgcagggaaattgaagcagccggttttaccgttaaaccacagcgcctgattgaggaacaaattagtggttcggtagcggccagcgaacggcccggttttgccaggttacttgaccgcatggaaaatgacgatgtgctgatagtgacaaaacttgatcgtctgggtcgtgacgcaatggacgtgcgaaagaccgtagagcagctggcagcgtccggtattcgtgtacactgcctcgcgctgggtggcgtggacctcaccagcgcggccggaaagatgaccatgcaggtcatttcggcggtggcagagttcgagaaagacctgctgattgagcgcacacattctggccttgcaagagccagagcagcaggcaaacggtttggtcggccaccggtgctgaaccaggaacagcggcaggcagcgattgaacacctgaaagcaggtgccagtatcagcgccattgcccgcgagtttagtacctcacgacaaaccatcatgcgcctgcgtgacgatgcagtcagcccggagttaccagaataa

SEQ ID NO: 387338 - DNA, 231 bp, Salmonella enterica
atggcacttgaaaaagcccatagtggtagcaaaaaaatgacattcggtgagaatagagaccttgatagggtggtttctgcgccagtcctgtcaggaaaagttaagcgtgttaacgtcaattttgatgaggataaacacaccagatttaaagccgcctgcgtgcgaaatggaacttcaataacggatgtcatcaaccagcttgtagatggttggcttaaagaaaatgaataa

SEQ ID NO: 387339 - DNA, 201 bp, Salmonella enterica
atggacagagaaatgctggcagagtggctgcgggatattgcccaacatatagaagaggaaagtccactgattcgtgatgtcagtgtggatgatgccctttccgatgagaggctggccagaaagatcatcaccatcacgttcaatgcgcctggtcgcgccccacagcctgaagaggacgccagcagtatccctcgacactga

SEQ ID NO: 387340 - DNA, 258 bp, Salmonella enterica
atgccaaaaatacagacttatgtgaacaataatgtttatgaacagatcaccgatctcgttaccatcaggaaacaggaaggtatagaagaagcatcgctttccaatgtttcttcaatgctgctggaactgggcctgcgcgtctatatgattcagcaggaaaagagagaggggggggctttaatcagatggagtacaacaaactcatactggaaaacgtttcgcgggtacgtgctatgtgtacagaaattcttaaaatga

SEQ ID NO: 387341 - DNA, 132 bp, Salmonella enterica
atgagcgtcttaaaccaggagtcgattgccagcggtaattttgattacgccgttatcaaacctgctattgataagtttgccagagagcaggtcagtatatttttccctgatgatgaggatgatcaggagtga

SEQ ID NO: 387342 - DNA, 450 bp, Salmonella enterica
atgcctgttattgacccagtacattttatgtatgaacgtaattattttccatccttgacagataaagagtttgaaacgttgattttatactgtcagatgatgaatgttcagatggttgctgattatcagaatcgtaaccctgatgtcatcatcaaacatttaaaaagttgcaagaaaaaaactggcgtagaaagcgatttcgaactttacttcgtggtgataaataaatttgttaattttgaaaaggcgttcccggagttaacattgcaacagattaatgttctggctgcgttttccttttatcctaaaaggtcatccattgcgagacgttatggtgtttaccgtcgtgatatatacgatgaacttgttaagattagaaataatctcggcattaatgaccttaactcactcaggatgttcttttttatgaggatcaccctgttttcatga

SEQ ID NO: 387343 - DNA, 210 bp, Salmonella enterica
atgagctttttggtgcttttaatgttgtttttggaaatgtttttctttgatctagatcaatctatattccatggaatttgtgaagtagttcaaattttaaaaaataaacgtatgttttttctgcttaaaaacttttttgacaaagtccttgaatggggaaaatggccgttttctaatatctctaacgcaaatcaacacaggtgtgagtga

SEQ ID NO: 387344 - DNA, 159 bp, Salmonella enterica
atgaaggagccaaaatctaatatcagaaatctaattgaccttggagagttaattggaaaaaaagtaaatattagctgtagtctggatgaagctattgatgaaattttaatggaaagtgctatcaaaagtggaaggagtaaaaaagagaggctgaattaa

SEQ ID NO: 387345 - DNA, 741 bp, Salmonella enterica
atgaaaaataaccttacggcattatggctgggaaccgccatgataactgccgcaccggcaatggtgctggctcagtctccagcaaccatcagtttcccacagggggggcagttccggctcagtatcagcaataccgaccccaacctgatatttattcccggcgataaagtcaccgccatcaccgcccagggcggcatgctggccgacaaaaagctgacctcagccggaggggtgctgttcacctcagtggccacgcgggctttcacgctctatgtcgagacagcgctgggccagaccttctctgtcgtggccatgccagtgaaaggagagggccgcacataccgtctgatgagtgccgaacctccagcccgcccggacacccgcaaatgggaaaccgcgcaggcttacgaaacactgctcgtcagcctcagccgcgccgtcctgacgggcacactgccggatggttatggcgaagtgaaaccactgcctgacggtgtccgtgtcccgggcggtttttccgtcacgccactgaaagcctgggcaggggaccggctgcgcgcggaccggtatacgctgcataacaccaacacctggggtgtgacgcttcgggagcaggacttctggaagcccggtatccgggctgtgatgtttgatcacaacgcgcagacgcttctcggcgggggaagcatggccctcaccgtcattcgggagaacggggagggcagcgatggccaacgttaa

SEQ ID NO: 387346 - DNA, 225 bp, Salmonella enterica
atggccgacgaactggaccatttacaggtacaggaagacctgcttacccggctgcatattcaggccgcgcggcagcagctcatcagggacggggaaagcctcagcgagtgtgaatgctgtggcaacgacattcccctcagacgccagcaaacgatacccggggtacggacctgcacggaatgccagcgggtactggaaatccggaacaaacactaccagaggtga

SEQ ID NO: 387347 - DNA, 642 bp, Salmonella enterica
atggaaaacagaacaggcaatgtgatggccgtggggaaaccaggcatcggcaagaccgtcatcagtgtggaggttattcagacctttttatcagcgcgacaacgcaatgactgcgcgaattacgccagggcatgcagaagaacgggaaaaactcgggggatgagcatcatggcaaacaacggtaatggcggtccgggtaagacccgtcacctgaacgatattgcgacctgcagcggaaacaggggaatgcgggtcatctgtgttcatcccacagagaacgacgtctggctttcatcctctgtgccgcacatttccgccctgggcagtagaaccggggtttttcagtgtgtactgcagcacggtgggcactgtctgttcctgggaaaaccgggtacaggtatgagcgccacaaaacagcagatgacccgggttttcctggcgatgtctgacgtcagccagattaaagcactgtacagcggtgaggacgggaagaggctggcggaggatatccgtcagaactgcaacatcgtgtatccactgagaccgctggatgaatggcataccgcctgcgccgaactgccggagtctttaatttttcccagtcatccactgaaatcctgggacgggcatcatgataagtaa

SEQ ID NO: 387348 - DNA, 465 bp, Salmonella enterica
atgataagtaaggccctggttcttatcgcatattgtctgcgctggctggtatgggcattccattatctggttatctgtcctgccggcacgctggtactgattgtcgccctgttgtcctgtcttgataacactacgccaggcacggtaacggtggattatctgcagaaggccggcagtatcactgacggtcagcgctggacgtggcgtgaatgtacgaaacagccgcctgctgaacttcctcccccatctgcatttccagaacgtaccggaagtcttcagcaggacgcatgtccggaagtggtatcggatgcccggggctatgcagcctacatcgaccgttccttacaggggcctctaatcgggctatgggttctgatgggactgacgtatgccggactggcatggcttctgcgaatcagaccgtatttcccccgccatgtgtttgtacagtgcgggaaacgataa

SEQ ID NO: 387349 - DNA, 441 bp, Salmonella enterica
atggacgttacttcattacttctgcgggatttcagtgacctgacctggcccgaactgattaagagacgcaaaagcgtggagatattgcgggccaacgtattgcatacccacgagcatatttctccccgaaaacagcagtctttagtgattgccattgcggtgctgatagtgggatacgcgttaacccattttctgcttctcgccggggtggctgcgctgggtgcacatattatcgtcctgcgctattccacgttgccgttgaactggcagacacagctggcaggcaaaatacaaaaactggagccattacggcactcaccgcttcggcaatggggcagtgataccgatttctcgtgggaatacgcgcagttctgcctggataaagaaatcaccctgatccatatctcgctggaatctgcacccacaccttttgacgcctga

SEQ ID NO: 387350 - DNA, 642 bp, Salmonella enterica
atgaaaaaatacacctttctgctggcaggcagcgtcctgctgctgtccggctgtgccggtgtcaaaagcagctttgactgcgatgccaccacctctgatacctgtatgaccatgacgaaggccaaccagctggcccgggacaaggcggccagacaggcgggaaagccggctgcgggcggactgcctttcctggttaaccttccgccgcaggcaaacgcgcagcagatacctgtccggtctgctatcagtgcgccgtccccggtatctgctgttgcaaacccgtccgtggtatccccgttaacggcgacgacctcccggacacaggccacatcccccgttcgctcaggcggcctgttgtctccccgtccggtggcagccgcgccggtgagtaccaccgcctcacatccgatactgaccacgccgcccgttcgtcccgttaccccggtgagcgtgcccaccccctcgtgccagaccgtgcgctgtgacagccccggttcagtgcacccgggccgcagccaggaccggattgcgacggtctggattgcgccctgggtggacagcgataacgttttccatcagcccggacgcgtgtcctttgtcgctgacccggcagactgggttctcccgtcccgcgtgaattaa

SEQ ID NO: 387351 - DNA, 450 bp, Salmonella enterica
atgacaacgaaattctctgaaacagcacctcagactgacgatgcggcatcacaaccggcgccagccagaaagcccctgacacagcgtgatcgtcgcaaacggcgctgcctgctcagcctgctgctggtcgccgccactctgctgtgtgttaacgcggcggtcacgtcactgctgattagctggcgcatgccgacggttgtggcctttgatatgaagggcacggtcgatcagttcactgaccaggtgggggcacagtccctgaatgagacgcagagcactgccctgacagagcgctttatgcagacactcagcgctgaacttcaggaataccagcgccgtcatgacgctcttatcctggtgacgccggcggtggtcagcggtgtcgctgatattaccggcgatattcagtcggcagtggcacaaaaaatggccgccggagggggacagtaa

SEQ ID NO: 387352 - DNA, 360 bp, Salmonella enterica
atgtttgtgagcaaaaaaaagtatgactttctgctcgaccgctacgaacaggccgcctcccgtgcggacctgctggagcgccagcaggcagaactgaacgtcgccctacagaacaatggcggcccgtacaaatgcattctggaatgccgggaagcagcgatggtgctgtcattgtcagggcgtgaaccgacatggcagacgctggagcgtctggcgtttgttgaccgatggataagcggtctgcttccggcactgacacgacagatatctgtccgggaatggcaagagatgctggacatttgttctgcggatcacgcctacggtatgtcacacctcccgtcacagggggaaacgcgatga

SEQ ID NO: 387353 - DNA, 615 bp, Salmonella enterica
atgagacgagtaatgatatcgctggtcctgcttctggccagcggtggctgcatggcgaatggccatacggagaaccgccagtttattcacgaccagctgcagctggaccggcagcgctttcgtgccctgcagaccccggaatttcttcaacagcagcagtcagtgggggcagaagaccaggcgtttctggacgcgcaggcctcgcagctgcgcaaatccatgcagcccggggagcgtccggtcgatgcggccctggtgtttgtgtccttctcgatgccactggatgaactgaagcagcgcgtgaaggatgcggcggaactcaatattccggtggttatccgggggatggtgaacggcgacatgcgggccacggcgaatgctgtagctggtctggtaaaagagagcaataccggtggggtacagatagacccgaccacgtttcgtaaatacaacatcaccgccgtgcctgtgctgattgtggcctgcggcaatcagggtgataaggtcgaccgtctgcagggtgacctgacgctgcatcaggctctgaaacgagtggcggaagagggcgactgtgctgacacggcccgcaacctgctgggtgagggggccgaatga

SEQ ID NO: 387354 - DNA, 1830 bp, Salmonella enterica
atgaagcgatactttcctttactgatagcggctgcctctttctgtctggtaacgccgcttgtcgcgaacgacaagttcaaccagggcatgcagcagggtagcgccagcaaagggcagggggccagcgccatacaggggtttaagccggcggaagtgattcccagctataccgactcgccagctgaaagcggctattacgggggcgtcacgtcgtccggggtagacatgacttcgcccggttcgacggcgctgaacacgtctgaggccgggaaaaccatcaccgaatccattctgaacaccccgccggataacaagccgtcgctggatgcgccgtttatttcagaaggactggcgatgaaagacaaggcggagaccatcaccggcggcggttttgacggatgtgtggatcagcctgcgagttttaccgaaatcaccacacatcagtgtctgcgggacacgaaaattgagcagtactgcacccgcacagcgaccattgtcggcgactggaaggaaaccacagaggttaaaacctacacccttaacgcctttaatttcagccgttccggaaagcagattatgttcagtgtggctgcccctgaagccggtattatccacagtgcaagcctgaacgtgaccacccaaaattatctctggaattcccaggccagctttatgaataccacattcaatctgacctggaatgacaccattgtactgggaggcgcgacagggatggtgctgaccaaaggacagattctcagcgggacaagctgcagcgggaacggtagttgtaccggttcgctggatgacctcatctttaaccagttcgtcgggggtagctctcgtttcacgctgacgctggtgatgcaggtgaaaagccgggaatgggtgccacgggtagaatggtctgaaagctgcccattcagtaagatcgaaggggccatgaccggctcacagtgtgtggagccgggggagacacggaccgtcgttgtggacggtaaaacgtacagcattcatcaggactgctggaaatggcaggacacctacctgacccagaccgagaccgaaggcacctgcggggagttcataaaaaatccggcctgcacggtgacccgcagcgagtgtgccgatacggtcgacggtttctgcgtcagccagcaggtgacgtactcctgtgagcgtaaaaaggagggtaacggccagatttgcggcggggaattcttctgcaaggacggcagctgcgcccaggcgcagacgggaaccagcaacatgtttggtcaggccgtctcggcgctcgcggcagtggccgctgctggcgaggatgtggccgcgctcaatggtgtggacgtccgcgcctttactggcgaagcgcagcactgcaagaagatggctgtgggcttcaataactgttgcaaggactccggctggggccaggatgtgggcctgtcgagctgcagcagtgaagaaaaagcgctcggcaaggcgaaagataaaaagctgacggtgtatgtcggggaatactgcagcaaaaaggtactgggtgtgtgtctggaaaagaagcgcggttactgcgtgtttgactccaaactggctcgtatcgtccaggagcagggacgtcgtgaccagctaggtgttggtttcggcggcggaaaatcgccggactgccggggtatcactgtcgatgaactgcagcgactcgactttggcgtgatgaacttcagtgatttctacgacgacctcaatgccggaagcgacatccctgaagaccaggcgctgctgaaaaaggcgcaggacatcatcgccgaaaaaatgaaggatgccgcgccatga

SEQ ID NO: 387355 - DNA, 777 bp, Salmonella enterica
atgaaacgacttgccagcctgatgctgcttttatccgccaccctgcacgcggcacctgatgaggttctgacgtctaactatgcccgggaagagggctggcagtggtataacccgaacgccggtgagcaggagccggaacccgcgtcggctctttccccgcaggaacgtctggccagcatgagcccgtcagaacaaaagaaggtgctccagcaggccacgcgtgaagcgctcgacaccgccattctttacccgtctgcggagaactttcgccgctttatgatgttgcagaatttctggactgatcgggccaccgacttcacccagacttcgaaactggcgcgccttaaatacccggaactcgactacaacgtgaaacgcagccactacaacggctcggtggcggcgcgtctgaccgaagagaagaaagtgcagagtgcggtgataagccaggtggcgcagcgttacggtctgtttttcttctaccggggcagtaacgccgtcgacaacctgatggccggagtcatccgcacattctgtgaggaccggggtatcacgctcatggccgtcagcgtggacggtaaaatcagcgaccagctgccgcagagccgcccggacagcgggcaggccgaacagatgcgcgtcactcatttcccggccacgttcctggtcgacccgaaaacgcaccagtggcagccgctggcttggggctttatgagtcacgatgacctcgataaccagatggtcagcgtcctgacgcagttcagggccacttactga

SEQ ID NO: 387356 - DNA, 606 bp, Salmonella enterica
atgaatatccctttactgaagaccgccatcctgatggcggcgatgctgtccggttgtgttcaggccgggacgctggatgatatccgcgcgctggaagccggaaaaaacggacgaacagctcccgccctgggcggactcgccctgccggaaagccaggctcctgcgacagctcaacgcccggctcagaatacagcacccatcaggtacccactaagcgacggacggcaggtgaacctgcaggactggaaggtggtgttgtttatgcagtcgacctgcccgtactgccgtcagtttgcgccggtactgaagactctgtctcagcagaccgggctcagtgtcttcccggtgagccttgacggaaaaggcgacgccgaattccccgatgtgctcccggccacccccgatgtgatggtggagtattttcagagcggagtgccggtggccaccccgaccacctttctgaccaacgtcaacacgatggaaacctggccgctgctgcagggggcggcgggggccggtgagttccgcaaccgccttgatgaggtgctgcgtatggcactggaccgtcaggcagggaaatctctttcacctccttctcagggataa

SEQ ID NO: 387357 - DNA, 558 bp, Salmonella enterica
atgaaaaaattagacttggagttggatattaattctttgattgaaagtattaaaacaagtgattatgaaataccaaaaaactcagatgttatgaaggttattttaaaaaagttgatgatagttgttttgattcaagttgtaatgcttttttttgattttgttatgtacggtaatgaatggggtggttttattggtaaggttttattctcctgtgttggggtgttggttttctcatttgtttttatttttactttataccaacctgttagcatgatgttgtcgataaatgatgagataaaaaaatcttcattagttatgaaattgcttgttgataaaataaagaaatactggcaaatgttagtgtttgttaatttagttataggggttgttttgctttttagtgatgatggttttgttatagggcttggaggtgcatggttttcaacatttattattagtgtaattttatttcagatgtcattgtcccgttacatgactccggcagtagtcagtagtctgtcaaaagtgaaagagttgcttactgcatccccaaaataa

SEQ ID NO: 387358 - DNA, 333 bp, Salmonella enterica
atgaaacataacgttaaactgatggcaatgactgccgttttatcctctgtcctcgtgctctccgggtgtggcgcgatgagcacagcgattaagaaacgcaacctcgaagtcaaaacgcagatgagtgaaaccatctggctggagccgtcttcacagaaaaccgtgtatctccagattaaaaatacttctgacaaagacatgtccggcctgcaggcgaaagtgaccagggcggttcaggataagggctataccatcacgccctcaccggacagcgcacactactggattcaggcgaatgtccttatggcggataaaatggatatgaggaggtga

SEQ ID NO: 387359 - DNA, 645 bp, Salmonella enterica
atgaatcagatagttacaggaaaagaaaaagggatgacaaaagaaaatgatttttcttttccaggcatacaaaaagaaagcgttagagagcgtatcaagcttcttatgagagggaggagtaagagcgctgtagctaagttgtgggggctacctttctcaaccttaaataattattttgaaaaggatgcaatcccatcactacaagtagctagtcagatcgcagcagttgaaggtgtaactatagactggctggtcttaggaacggagaaccagcaaactcaaacgcaatctctaccacagcagccacagcagccacagcagccacagcagccacagcagccacagcagccacagcaatatgaggcagcaagagataatgatgtgcaagtaattctagccatttggcaaggccttgaacccaaagagcgggaggatctaagtaaactactatcgcgccgtggcggtgattttcttgctatcttgcttgatcagcacatacaagagttgcatgagcttatgggggttcgacgtctgcttgccctggaattaaaaaacatgccagaagaacgcgttagagagatttacgaagaatatgaagctgcaggtgatcgtttaaatttaactgataagcaggctagtgcgtaa

SEQ ID NO: 387360 - DNA, 234 bp, Salmonella enterica
atgatcagaaatgaagtagtgggaaaagattggcatcctggtcaaatagtgggagagattcgcgctcagggtctgtcgctgcgtaagttgtctctccgcgcaggtctcgcccaggataccctcaaaaatgcgctctatcgtcacgtgcccaaatatgaatgcatcattgctgatgcaatcggtagaaaacctgaggagatttggcccagccggtatatccgtaaggtggcgtga

SEQ ID NO: 387361 - DNA, 2079 bp, Salmonella enterica
atgtttgtgtcggttaatgagcttattggattgcccggagtaccgggaacggtacaagggataaggtacgcaataaaaaaatgggcttctactgaccattataaacggcaacgcccaggcacaaaggccatagagtacagcgttgattgtttaccggaggtgacacaaaaagcattacgtgagcgttacgtggctcagttgatggaaaccgagccacaggaaaccacaaagccagttgtcagacgtcggcgcgatcctgatgcgatatcaccacttgaggcttatcgcgggtcgcctcagttgatggaggagcgtttgaatacgcttacagagaatcagcgacaaattgccgacgcacggatcgcactggtacacgaagtattgcggattggtagcgaacctggttttacctgcgctaaagctatccggtttatcgtcaggcagtcagaacgcggtgaactaaacgagcgcatggcggggtttgtggctgtcgctaacgccaaaaaagggaaaacgcgcgccctgagcgctattagtctcaagcgctggatggcggagtacaacaaggccgaaaacgccgccgaacggctgctcctgctggctcctggcaagcgggaggaaatgaaggtagaggaaattagctggctcgctgacttcctggcggaataccgacagtcaaacggtcgccccatgaccgaggcttacgaggattttgtggcggagtggaaccgtcggcacgcggaggagccctatatgttgcagataattccctcatacgacgcgatccgccgcgtgatgaagaagctaccggaggtcgtgaagcagaagggttgggtgacgggcagcgaatatcgccagatagagggctttacgcgtcgtgactgggacgcaatgccggtgaattacgtctggatcggtgacggtcacggtatgaagctgaaatgtgcgcacccgatacacggacgcccgttctcgccggaagtgacctttgtgatcgatggcgcgacccgctttattgtgggctggagcctggatttagcggaaaacgtctttgcggtggccggtgccattcagcacggcatacgcaaccatggaaagccgtttatgtactactcggataatggttccggtgaaaccgctgatgtgatggataaggaggtcgtcgggatactcccgcgtcttgggattagtcaccctacaggcattcccggtaatccgcaggggcgcggcattatcgaacgtctcaaccgcacattgccgatgcgtattgcccgcaagtaccgcacgtacttcggtaaaggcgctgaccgcgagacgttacgtaagacgaaccgcgatttacgatcggcttttaatgcccttcaaaaagggaaaacacttaatgcagtgcagcgggcagccatgcgcgatttgccctcctgggctgagttgattgaagccattcgcgacggcgtggagtggtacaacaaccgcccgcacagcgagttaccgatgaaggctaacgggaagcactacagccccgccgagcaccgcaaaaagcgcctggcggaagaagatacagaaattgagtggttgtctgaggtggagctgcgcgacatgttccgtccgatggtggaaaaaccggttcgccggtgtgaaatccactggctgaataacatttattacgcgccggagctgcgtgacgagcatggccgtaaggtgcttatcagctatgacattcacaatgccgaaaaaatcattgtgcgccgcctggatggttcctttatctgtgaggctatctggaacggcaacaaacgcgccgccttcccggtcagtgcggaataccacaaacatcaacagcgtatcaaagggatgcgtaaacgcgccgaggagaaaatacgggatgccgaggatgaaggtatcaatgttctggagcacaagcagccggagctgtgggtcggaaacatttaccagcctgtcggcaatgtggtgaccgttcagcaggcggagccggaagttgaagaagagtacgccggggctaaagacgattaccgtcgcgggctggcgctgattgcagcacgcctggaagaagacgagtga

SEQ ID NO: 387362 - DNA, 924 bp, Salmonella enterica
atgaccgatattaatgaagtaatcaacaccattaacgatttgattgcgcgtgatgtatttacgcaggtcactatcgcaaaagaaatgggcgtcgctgatgccacgctgtctgcctttcgcaacggtaaatataccggggataacgagcgtctcgcggctaaggcgcacgactggtacgacaactatcagcagttggtgacgctgccggaagcgccgcagtttgtggtgaccgagacggttcgggatttgcaggagttgttccagtcggcccgccttatgcgctgtattaacgtagtggtgggtgagcccggcgtgggcaagacggcggcagcgcgggattactgctcaaaggccaatacctggatggtgacactcgcccccgcgcactccagtgtgaccgagtgcctgcaggagctggcggtggcgattggtctgggggaaattaagggcggcaaaggtccactgtcccgcgccatccgtaaagcgctgacgggtaaaaaaggcctggtgattattgatgaggctgaccacctcagcatcgaggggtttgagcagatgcgcgccattcaggacgccactggcgttggcatggtgctgattggcaacccggaggggatgtcggatatcaccggtcgccgtaatgacagcctgacgcgtctcgtcagccgcatggcacgtacctgcaagctggacagcgtacaggatgccgacgttgaggcgatcgcggatgcctggggtattaaaggcaaagatgaactggccgagatgaagtccatcgcgaagaggcccggcgcgttacgcatactgaccaacgtgctgaatcaggcgtggatcatggctgccggtgagcgctcccccctgcgtaaaaagcatattaaagcggcttataaaaagaactacggcgaaacgttaaaaggaatgtga

SEQ ID NO: 387363 - DNA, 243 bp, Salmonella enterica
atggcagcaattaatattcccgatatttacggccgaaattacctcattaatttcgatacggttaaatatattcaggtttccgacaatgaggaatgcggtgatttaattattacctttacggataaatcccggcaggtcatttcggtcggtcttgatcgtgaaggtgccgctgatacgttcgaacgcattagtcgggttgtggggtcggccagttttaccggtcaaaataagttgtggagataa

SEQ ID NO: 387364 - DNA, 225 bp, Salmonella enterica
atggcaaacctgtttgattcactcaatgcggcccgtcgtcttactgagctttccggtgccgttctggagcgcagtaagcgctatccgcagcgctatgccctgcgcaccactccgccgaaatgtcagatgccgggcgaagttgaaattactgtctgtaataaaggtcagcgccgtcgcgttcatgcggcccgtgtgagcggctgtacggtgtactgggaagattaa

SEQ ID NO: 387365 - DNA, 288 bp, Salmonella enterica
atgagcaataaagtacaggtcattttcacgttcgaactgataaaccgtgaagaaaaagaggttcaggggggggttctcggtatggtgacggccagcgtgggaagtaaggggctgagtaaggggtgtcaccccggccctcaacacctctacgcacttatccttaaacgtaactcacccaatattattcgttttctgaccgatgaggtgaaagccagtgctggaaagttcggttttgaaataaatacgatcagcgaagaaattacagaaacacctgacaatattcactga

SEQ ID NO: 387366 - DNA, 639 bp, Salmonella enterica
atgcaggctcaaaaagataattcagttacggttcaaaaaatccctgacgggtatcgctgtaatgcaatggggcatctggtgccggtggataaaatcaagcccatcgaccttttgcgtgatgagatggttaatgagctttacgaagaggcgcgcgagctgcgtcgtaaaatggccgagtttaagttacgctccatgcagcgtatcggtgattttgttgacctgtcggcgtctgagtacggcgtgacgtatggcggcaccaagggcaatgtgacgttacccagcttcgatggttcccgccgtgtggtgcgcgcaacgggtgagcaccgcgtgtttgacgagcgcattcaggccgctaaaaagaggattgatgcctgtatcgccaaatggtcaacgggtgcgaacgaaaatctgattgctatcgtcaatcgttcattccgggcaaacaagcagggaatgattgatgttaatgaggttctcgcgttgcgcgaccttgatatccctgatgcggaatggcaggaagccatgcgggcagttgtggactcaataaccgttaacggcagcagcacctacctgcgcttttatcagcgtgaacatggcaaggaatataaacagctttcgctggatatcgccaaactgtaa

SEQ ID NO: 387367 - DNA, 546 bp, Salmonella enterica
atgaaatacgcttattttaaacttgatgctgttgtcactgataaatacgtttccatgtataacgcagacgttaaaccgtcacgcgagcatattctttgccggttgcaggcctcgctcggcgcggtgggttttaaagttattgacgggtcttttaaggtaaaaattaaaggggtttattttgatgcagtgccggagtgtggctgggaaacagaagacacagacctgcttgtagaggggaaatcgctgtttctggctgtaccggataccagttgtgttgaaggtcgtctcctgcaggaggagatcgaacagactgaagaaaggctcaaggcttatccgtcgtttgaaaactggatttttaacaagctgggcattgtgggtctggctggtatcttctggcacgaccgttcggcgtggttaatagcgttttcacgtaagcgtgacgttattctttttcaggcctcactgcgcgagggagtcgtttgcggggtgcctgatgaatgcattcgtattaaacactccgaatacgtggcgctgctggaggaataa

SEQ ID NO: 387368 - DNA, 579 bp, Salmonella enterica
atggcaatgcaacatcgttattttaaattaaatgaagtggactcggttaaatattataaggaatatcaggaaaaaatcggtaaaccccgtaaaaaggctgtacgtgattttctgagtgcgtgtaatgcggtcgggtatttgtcatatcaacattttggtactgagcatatcagtgcgctactgatgcgtgagaatgtggattgcggcagaaataaacgcacccgcagtgactcttttgatggtgacggtcaggcattgtttaaggtcaggccagaccgccgctacagcgaaggaaagcagcttgcggcccgtctggaaggggtaaacgagaaattacaggagttaccgctgttcagtgactgggtgatcagaaagctgggttgttatgcagacgcaagttacgttaaccgcggacagtatttaaccacctggtctggtgccggcttttatcctgagaagaaagcgctggttgtgcgtattcctgtcggtgagagaggcgaaaaagccctgcctgccgatatgagtaaggcgcttactgaaattaagcgctccgaatttattgctattacggaggaataa

SEQ ID NO: 387369 - DNA, 528 bp, Salmonella enterica
gtgacagtagataacaaaatactgaaaggtgtaaacgcccttattagcgcctacgggaaactgacctgtggtgtgctggctgacaagctacaggtgctgccctcttcaatgatttatttcctgcgtgatgcagtggatgccggtgtgttgacggagtgtaacggcttttatgatattccccggccgcgccaaagctcacgtaagccccaccaggagcctgagccggtggtctggtgtgattttcgtaagtccctgccctggattgagggtaatagtatcccgccactggtgaaggattttgcgatgggcgttctgacctgcgagacgacgtatatcgtggcagaggtggatgaagaagcccgtaataaaggcgtaccacacttcaccttcgcctgtatcgatgtgcgtctggggcggtttattgatggcatgagtgggtgggaaataacaaggtctgttctgcgttacctgattattgatcgctcccctgtacctgagttcatccctgtttccgtggaggtggtgtaa

SEQ ID NO: 387370 - DNA, 519 bp, Salmonella enterica
atgttctttaaaacttctcatcctgacgtgttaaccgcgtgggatcaatatgtcagtgactgccagaaacttcactcagaagccagagagcttgagcgtgtgctgggatgcggtgcccgcgccttatttcgtacctccgtgagtgaacgatgttttaaaggtatctgtttttccgcctccgcgcgtccgttcgcccctgaactgtggacggttcagtgtatggtgaccggctggagttgtgagccgcgccggtcacgtattcccaaagcgttgaaagcgcaggccaccgaactggcggcgttgtgggcggaaaacgttccacgtacccgcgccgactttactcccggactgaatgcgatggggctggatttcagcgttacgctgtttggctcttttacgcgttttcgtctgggcgatgtggtttacatcgaaaccggcatgaagcctgcggcccatatgaccgaaattctgtccggggagtatctggcggccagaaaacaggcggagggctcaacatga

SEQ ID NO: 387371 - DNA, 534 bp, Salmonella enterica
atgataatattgccctcgtttggcgtgccggggaaatgcccggcacacgtcagaccctggacgcaggacgacgacgaattactgatcaccctgtatccgtcaatgacctacgccgaaatggccccacggttaaatcgtggtgcaccggcagtcagacacagagccaggctgcttcgcctggccggaaaactgccctataaacaccgcccctttacgccggaagatgacgcgtttatccgggataaccgtcacagcatgacggcggaggaaatggcggtacatctggtcagaacgcgacaaggcatcaatttccgggcctgtataatcggcgtcagcctgtttaagtgtggggatttaaatccctgcacgaaacatgccgatgaagacgtgatgcttatccgggcgctgcgtgatgaagggatgcgatttaaagagatcgctgaaaagtttgacatatcatcacacgtcgcaaggtcgttgtatcaccaccgtctgaccgctgctgatgttatcgcaagggagttactgccatga

SEQ ID NO: 387372 - DNA, 330 bp, Salmonella enterica
atgataactacttggtttgttgaatccgaagatccgcttatctgcgctgccggtatgcctgtctgtggtggtaagttgactggcgtttactttggcgatctgcgtggtcacccctggcattcgctgaatgattgctttccgccagacatggaggcggtagtgctggttgtgcagtacggctaccgccaggagttgcgaatcggtcatatgggttatgaggggctgttcgtggatgaagagaccggagcctgtattgaagatgaagacggtcaggtgacgcactgggcgtggattgcagccttgccggaactggtggaggtggaagcgtga

SEQ ID NO: 387373 - DNA, 558 bp, Salmonella enterica
gtgagagactacatcgagtttaaaaagctaaaaacaatcagtgactgccttactcttctggcaaaaacagagggcagtattgaagaaattaaattccagcttgaatacgatccacagggcggtgatgaatggcgtaaagccgcagtcagggcactgtttatctgcaataaaaaacgcagggctgtcaccgctcgtcttgccgttttgcgacaggaggaaaaagagagaaatataagagctcatcaacgtgttaatgattttctggtaaaagaactcagactccgtgtacctgagcgggtatttcatgagtgtgaaaatattgccagggaacaggctatattgccgttacctgcgccagtaacgccggaggatttgcgccgttcacttgaggccgtggcacgactgaataatgaaatgtatcgctggacttcctgcctgtcttacaacggttcgtatgttggcgagccagagggattgcttaaacgtaacattcgcgagattgaacacattatggatacctgctgcgccgccatgcttgaagggggtatcaacagatga

SEQ ID NO: 387374 - DNA, 753 bp, Salmonella enterica
atgacaattaccagagaatggatagaaaaaactatcgctgaatttgaaaacactcgcgacgatattccgtttggccttgacgatgatgatgccaaaattctgaaggtgctgaagcaggtgctggcatcaatggacgctgagcctgtggcgtggactgatgaacaagagttgcgtgacataaaaagagacggtttaggttatctgtttacggttaaccccatcacgccgcacgttgaccctcgccgcgtcattaagttgttcgctgtcccgccagcaccgggcgtttacgatgatgttctcaatatcatcgacctgctggaaaacaacaaatggaccgagcactgtacgaatacagttttaggttcactcttgggatcagaaataacacgtctggttggaatgacgcagccagcgccgagcgagtcaacatcacagccattaactgatgccctgcgtgatgtcattgcagaacgtcaacgacaaataagcgttaagggatggacgccagagcatgatgatacatatatcggctgcgaactggctgcggcggccattagctatatagagcctgtggaggctgaaaattactggcctgctgactggcatgatggcagtttcagaccctcggactaccggcgcaatctggttaaagctaccgccctgttggttgctgaacttgagcggctcgatcgaatttctgatacgtcagtgttatcggaggtatcagacggtgatgcgggggacaggcaatga

SEQ ID NO: 387375 - DNA, 288 bp, Salmonella enterica
atgattgtcaatacactggattttctgttgcggtttgcggggtcttatctgctgtttcggtggttagtcaggtggtttgttagtcgttaccttgataaagaccatttactgacgttgtacgcggagtggctgataagtgaggttaaacgttgtcacggcatagcgggatgtgcccatataaagtttcgggatggttacaatgttttcgttttttcaccggaatatcaggtgctgcgtgatggtgatgattatcaggttagtctccgtaaagtatatggttcggagtga

SEQ ID NO: 387376 - DNA, 519 bp, Salmonella enterica
atggaacgcgataaactcatctccaccatccatgttgctaaacgggaattacggctggatgaggatacttacaaagatgcgctgcatatcgcgacaggtaaaaccagttgtcgcgatatgacactggcggagttatcgaaagcgctggcggcattcaaaaaacgcgggttcaaagtacgttcaaaaccgcaaaacagggctttaaaacccgctaccgtcaccgctaaaattcgtgctatctggcgtcttatgcgtgttcagggttttctcggtagtgacagtgaggtggcgcttaatgcctgggtcaggaagcaaacggcatcggcgaacggcggcgaaggtgtggcaaactaccagtggctggagagggagccggcgctggcgtctgatgtactggaacgtctcaagcgctggcatcgtcgcgaaatgcttcgctccctcggtctgtctgagcgggaaaaaatcagctacgagcaggcctgcaagcgctttgcaacgcgaaaggcagtatatccttaa

SEQ ID NO: 387377 - DNA, 438 bp, Salmonella enterica
atggctgaggtacaaatggggatgtttgaagatgatgagcgcttaaacgcgctgattgatcatcttgatcgtattcccgaagatgaactcaaaaagagctggcccaaaatgctctttgcgctggttgaggtcgtcagtgctgaacttcgtcgccagggtctggagccggcagaggctggtcgccttgcccggaagactattgctgcgcaggccggctatatgggtggtcgtgcctattacctgccgatgggggaatccctttttgccgaactgcgcaaccatgaaatttactcccgctggtcaaacagggagcggatcgagaatctgcgccgcgagtaccatatgtctgaaacccagatttacgccattattcgcgaacagcacaaacgctaccgccgacgcattcagccagatatgtttgacgctaaccatcactga

SEQ ID NO: 387378 - DNA, 501 bp, Salmonella enterica
gtgccgaaacttcccccggcgttacgtaaaaaattggttgcccttgtgctggccggtgccggcacggtcggtgttgccacctcgtacaccgcgtactgggaggggaaatcgaatgagacctacatcgatccaaccggcacaccaaccatctgttacgggcataccggcccggacgtgaagcccggtatggtcaaaaccgatgccgagtgccttgttctgctgaaacaggatatggcctgggcgttcgcggccattaagcgctacgtcaaagtaccgctcacgcaggggcagacggtcgcccttgcgtcgtgggtcttctgggcgggtgaaaccaacttccgcaactccacgctgctgcacctgattaatgaaggaaagatgccggctgcctgcggccagtacattcgctggatctactccaaaggtcagaagctgccggggctggaggcgcggcgttctgcggacgagtggttatgtcgatacgacttaccgcagtcttag

SEQ ID NO: 387379 - DNA, 372 bp, Salmonella enterica
atgaaaagcaacgtaatacgcaggcaagcgaagctgtcagggctgaaatccgtccggttctggcggcagagcctgcagcccgcgtggctgtgcctgcccctgttgctgaccgcgtgcgcaccgccgtcagtgaaatacgtgcaggtgccgccggtgccgctccccgctgagtggacggcggactgtattgtgccaccgctgccggagccgttcaccttcggtgcatcagtggactacaacctgcaactgctggcggtggtgaaaaactgcaacgtcgataaagcgaacatccgccgcgctgaggaacaacgacaatatgaatttactgacatggccggaacggctgataagtcgtctcaccggcgaaaatga

SEQ ID NO: 387380 - DNA, 366 bp, Salmonella enterica
atgaatttactgacatggccggaacggctgataagtcgtctcaccggcgaaaatgaagaggaaaagacaatgactgaacccacccggacacaaaacgcgggtattgcggcaacatctgattcggcggctgttgcagatacatctgcgaccgcatcgacaacacctgcaacagcatacgatccgatgcagtccctgatggcagcagataacgcccgtgtcacggctgagcatgacccggcgttgacgggtagcctggattttgaagtgctgcgcggaattctggccgccatcgggtacgacattccgcgggacaggtttgaatctgcggttttcctggcaacgtcagacaccaaagcgcatggatga

SEQ ID NO: 387381 - DNA, 309 bp, Salmonella enterica
gtgtggctcagcgtctttaaagattatgcggtcccgattttatcggctaccgcgacggccggcggtatttttatggcgctgatgcgccggacatttgtgccgcgcgaggcgttcgaaaagctgcatgaccgggttgaaaaggtcgaaacccggatagcgaacctgccaacgcaggatgaagtttcccgtctgcacatcgagatcgcgacgttgcgcggcgaccttaaagagacggccgccaccctgaaagcggtctcgcatcagaatgaattattgctggaacaggctgtaaggaaatccccgcaatga

SEQ ID NO: 387382 - DNA, 291 bp, Salmonella enterica
atgagcaattttattaccgaagaccagcgccttgtgatcctgcgctcgctggctgactacaacggcgaactgggggaatccgtgctccaggactgcctggatgattacgggcataaggtatcacgcgacaccgtgcatacccatattgcctggcttgctgaacagggactggtacgcctgcgtaccctgattaacggctattacatcgccgaactgaccggacggggccaggatgtggccgaggggcgcagcactgcgccgggtgtgaaaaagccgcgtgcgagggattaa

SEQ ID NO: 387383 - DNA, 585 bp, Salmonella enterica
atggacaaacagcccacccgcggacgtgtgaaaaaagccgatcttctgcctgacagtatccgtaaacccctgcttgagatgcttcgtgagaaacgtttcacgcaggtacaggttcgggaggagattaaccgccttatcgaagaggccggacttcctgatgaaatgaaactcagccgcggggctgtgtggcgtctggcgtctgaaaacgaagaagtggcgcgcgaccttcgcgatctgcgtgagcagacaaaagcgatggtggcggaactcggcgacaaacccaccggcgacaccaccacgctcattcttgaaatgacccgctctctgttgtttcgcaaactccgcgccgcccgtcgtgacctggaggatgacggcgagatcgatattggcctgctcaaaaatatcatgctggccgttcagcgcctggagagtgccgccgagcgcagcatgaagcgcgaaaaagagatccgcgcggcctacgccgaggaagccgcaaatgcagtcaccgaggaactgcgtggcacagacggcatgagcgaagagctggaagccagtattcgccgcattcttctgggtaaagcgtaa

SEQ ID NO: 387384 - DNA, 1698 bp, Salmonella enterica
atgaccaggaaaaaggaacccacgctaagggcaattggtgagccccgactgattgatctgaaagaagaagctgaaaaactcggtgtggatatcaccaccgatatcagtgatgcaaaaccggaacaggagccggttttcctggggtatcagcagaagtggttcctggatgaaagcggcgtggttattggtcagaaaagccgccggaccggtatcacctgggcggaagctggccgcaatgtcattaatgcagccaagcccaaaaagcggcatggccgtaatactttttacgttggctcgaaacaggaaatggcgctggaatatatcgccgccgttgcgttgtttgcccgtgctttcaataagctggcgcaggctgatgtgtatgagcaaaccttctgggacagtgagaaaaaagaagaaattctcacctatatggtgcggttcccccgcagtggtttcaaaatccaggcgctgtcttcccgtccttccaatctgcgtggcctgcagggggatgttgtcattgatgaagccgcattccatgaagggttgcgcgagctgctcaaagcggcccttgcaatgcgtatgtgggggtgtcgggttcgcattatttccacccataacggtgttgataactacttcaacgaactgattcaggaagtgctggccgggcgtaaagattactccctgcacaccatcactattgatgacgctatcgctgatggtctctataagcgtatctgctatgtgacggatcaggtctggtcaccagaggcgcaggttgtctggcgtgaaagcctttaccgtgatgcaccgacccgcgaggatgccgatgaggaatacggctgtatcccgaaaaaatccggcggtgcctatattccccatgcgctcattgagctggcgatggtgcgcggcgttcccattctgaccttcgaagcgccggaggattttctcagccgtgcggcgtggctgcgtgagtccgagattaacgcctggtgtgaagaacatttaaaaccgcttttaaccgcccttaatcctcgttcgcgctacagcttcggcgaggactttgcccgtcgcggcgatctgacctgctttaccgtgcttgaaatcaccgaagacctgcagaagcgcgaggcgttccgcgttgagctgcgcaacatgccctacgagcagcagaaacacatcatgctctacatcctggagcgcatagcgcggctcatcggtgcggcgttcgacgccaccggcaacggcggttttctggcggaagcggcccttgagcgcttcggccccgaactggtggactgtgtgatgctctccgcgaagtggtacggcgagtggatgccgaagttaaaagcggagtttgaagaccagaatatctttgtcgcccgtcaccagaccacgcttgacgacctgcgtcatatcaaggtggtggcaggcaccccacagattgataagggccgcaccaaagacgagaacgcgacggctgccggcagccgtcgccacggtgactttgcggtggcgctgtgtatggcgaaccgcgcggcttatctggatggcttcgtgctcgatgacgaggcgtgtcaggcgatgccggaacgcgggcgcacgatggaaaacgccgaagacaggggccggttctttatgacaccggaggaagaagacgctgacagcgcgtatcacgagtttgagcaggggtgctggtaa

SEQ ID NO: 387385 - DNA, 1578 bp, Salmonella enterica
atgggcagaattatagaccttgacggaaaaccgttcgactttgatcccgacctgcagacggcggttctggatattccgcagatagccaaccgttttattgaacacccggcatcgggcatcaccccgaaccgggcggcgcagtgtcttcgcgctgccgaacagggcgacctgatggcgcagtctgatttagccgccgacatcgaggagaaggacactcatcttttcgccgaactcagcaagcgccggctggcgatacagagcgtgccgtggagtatcctgccgccgtcgaacgccactgcccaggaaaagaaagacgcggagatgctggacgagtaccttcacggcgcggactggttcgacgcgatgctctttgatgcgaccgacgcgatcctcaaggggtattcctgccaggaaatcgaatggggtcgtatcggccgcgcgtttgttgtcaataaggttatctggcgcgatgcggcgcacttctgccttaatccgcaggacttcagcgagctgcggctgcgggatggcagcgttgagggggtgccgttccagccgttcggctggatagttcaccaggcgcgatcgcgtaccggttacgccggcgcgcagggactggtgcgcacgcttgtctggccgtttatcttcaagaactactcggtgcgtgatctggcggagttcctggaggtgtacggcctgccgatgaaggtcggcaaatacccggccggtgcaaccagagagcaaaaagccgccctgatgcgcgccgtcatggaaatcgggcggcgtaccggcggcatcatcccgaccggtatgagtctggaattcgaagcggcggccagcggtcaggcggacccgttcctcgccatgatgcagtggggcgagcgctccatctcaaaagccattctgggcggcacattaaccaccgatgccggcgataaaggcgcgcgcagcctgggtgaagtgcatgacgaggtgcgcaaggagatccgtgacgctgacctgcgccagttaaccaccacactgagccgcgatctggtctatccgctgtatgcgctcaataccactcacgtggtggatattcgtcgcctgccgcgtctggtcttccagacgaaagagccgggcgatatcaccaaaatcaccgctgccgtcgtgcagctcggtgccgggatgccggtgccgctggcgtggatccgtgaccagaccggcattcctgagccggtcggcgatgagccggtctttaccattgccagccctgaaatgaccctgccgccgccggagcgaccggagcgtcaggaaaagcaggcggcgctttcggcgcagttacccgcgccggtcacaaccggcccgcgcgatgaactcgacgacctgggcgattccgtccccgccagcgtcctgcaggcggcgattgatccggtgctggagccggttatcaacgcgattaaaacgaaggggctggcggaggcgctgtctgacctgccggcgctgtatcagcagatggacgataaaaagctgatgacactgctgacagatgcgatgtttgcagcagaaacaaagggcatggtggacgaccttgagcgttga

SEQ ID NO: 387386 - DNA, 1368 bp, Salmonella enterica
atgcgatgtttgcagcagaaacaaagggcatggtggacgaccttgagcgttgatttaggctatgccgccacgcttgcgcccaaagaggctgtcgcgtatttccgcgctaaagggcagcatatcggctggaactggtacgagacggccgcagacgttcacgcccgttcgtttacggtggcaaaagccgcgcgcgtggatgtgctgaccaccattcagggtgaagttgagcgcgccatcgagcaggggctcagtcagcaggagtttattgataccctcgcgccacgcctgaaaaaactcggttggtggggtaaacaggtggttgtggacagcgccggcaatgccgaagaagtgcagcttggcagtccccgccgtctggcgctgatatataacgtcaatacccgcgtggcgtataacgtcgggcgctacgcgcaactgatgaacagtaccgacacgcatccgttctggcagtacgtggcggtgatggacagccgcacacgtccttctcacgcggcccttaacggcctggtattccgctacgacgatccgttctggaaaacccactacccgccgaacggctggaactgccgctgccgcgtccgggcgctctctcaggagcgcatgagtgcgccgggcctgcaagccacgcagggcgataaatacctcaccacgaagaaggtacaggcggcggtggataaggcgacgggcgagatgattgagatggacgtgaccacctttgccgacggtgcgcgcgtgatgaccccggacgctggctggtcatataaccccggttcggcggcattcggcctcgatcagtcccttatccgcaagctcattgaagtgaaaagccctcagcttcgcgagatggtggtaaaagagatgaacaacagcccggagcggcaactggcgtttcgtatctgggcgaagaacatcatggaaacccgtcgcgggggtaacgatatccgcacgctcggttttatgtcggagtctgtagccgatgcagttgagcagcgtaccggcgagccgcctgcacgcctgctggcaatgagcggtaagaatgtgctgcatgcggacagcctcaagcaccatgcggatgagattgcgttaagtccggatgattttgcgttgctgccgtcgctgctggcacacccgaaggcggtactgtgggataaacgccacaacaacctgatgtacctgattgacacgaaagatggcaccgcaaagattgctgtcaatgcgccttacagtatcaagcgccagccggatcagcttgacgttatcgtaaatgtctatcgggtggaaaacatggataagctgaaatcagatattcagggtgggcagcttgagttgcttgaaggacgtgtggattaa

SEQ ID NO: 387387 - DNA, 477 bp, Salmonella enterica
atgtcgcagattgatgccgcagtagtcattgatgttaaacgcctgcagcgggtgtttctggaactgcaggcaatgggtgatgacggtaaagggctgacccgttccgtggcagccagtctgctgtcgtcatctgaaatggcctttgaacaacaaagggaacctgatggtgatgcatggcatgaatggtctgagccgtggcgggcatggcgcacaaagcacggttatgtgccgggtaagatcctgacgttacacggcaagctcgccggtgaaatgaccaccgactacggtgatacgtatgcgatgattggctctaatgagccctacgccgctattcaccagtggggcggcacgcctgatatgcgaccggggccggcggctgttccggcgcgtccgtacatggggtttgataaggttgctgagaaggagatcctgaacctcatcaaaaaacgctttgagaaggccgtggacgcgtcgtaa

SEQ ID NO: 387388 - DNA, 1236 bp, Salmonella enterica
atgacgatcgcatccgatccattttttctgtcctgttttttactgatttaccgcaaacccactccctcgcctgaccgtcataagctgccggtcatgacgacgaataccttaaaaacgacaggcgcatcgcgccgtacagagaccgcggctctctcggcttcactggcatcatccgatgacgggtggtgccagttgctgccggccggtcgggtcagggcccgcgacggcagaccgaaaaagcctgctgcgggctggctgattaataaaacgtcctgtgaccgtattaaggccaatctcgccgcccttaaacagcctttgctgattgactatgaccaccactccgaaatcgctcaggaaaaaggtgtcaaagctgtcgctgccggctgggtgaaagctgaggatgtggcgtggcgcgaaggccagggcattttcattaaacccacctggacgccgcaggcgcagaagcatatcgacgatctggagtatgcctatctctcggcgaagctggagtattacgtggataacggcgagccggcgtccattcgaattgcgtccctgacgaacgatccagcgattaccggtatgaagtccgtcgcggccctcagcgctgacgacctttatgtaacaaccccctctacggagttaacccccatgaatgagcaattacgccagttactggcggcgctcggcctggctgtgcccgacgacggcgaactgacgcctgaacttggtacggcggccctgtcggcgctgacggatattcaggcaaaagcgggtaagcatgacgagctgaaaacgcaggtcgccacgctgtctgctgaactggacaccgcaaaacaggcgagcaccacagtaaccggtgatgttgacctgacgaagttcgttccggttgagacctacaacgccctgcgcacgcagtacgtctccctgtctgccgagcacggcacagcctctcttgaacaggtgctggacaaggccgaaaccgaggggcgcgtgtttaagtccgagcgcacctactacgaaggtcttggtaagcagattggcgttgcggcgctgtctgcgcaactggacgcccgccagccgattgccgccctgaccgcaaagcagacggacacgctgccatcgccgaaaaaagaaaccgaatctgccgcgctgtctgcagaagaccgccaggccatgaaactgctcggcaagaccgaggaagagttccttaaagctaaaggggttaaacaatga

SEQ ID NO: 387389 - DNA, 972 bp, Salmonella enterica
atgagtacacctaccacccccgccatgattgaagccctttttacggggtataaatctgacttccagaacggtctgggaatggcggcctcgcaatacaaacagattgcgatgaccgttacgtccaatacccgctccaatacctttggctggctggggcagttcccgcacttccgcgagtggatcgggaagcgcgtcatgcagcagatggcggcgcacgggtattccatcaccaacaagacctgggaagatacggtcgccatttcccgcgatgacttcgacgacgatattctcggcatctattcccccatcttccaggagatgggccgcgcggcgggttgcttcccggatgagctggtctttcaggcgctggcgaacgccgacaaaaccgcctgctatgacggccagaattttttcgacaccgagcacccggtctacgagaaagtggacggtacgggaaaaatggtgccgacctccaacctgtacaccgcgaaagtgggtgcagcgggctccaccacggactataccggccccggctggtatctgatggactgtacccgcgtcattaagcccattatttaccagaatcgccgcaatcctgagctggtgatacaggccgacccgaaaacggggccgaccttcactgataaccagattgttttcggtgcctccctgcgctccaacgtcggttacggcttctggcagatggcacagatgatgaaagcgccgctcaacggcgacatgttctgggaagcctggcagtccattaccgaccgtaaggccgacggtggccgtccgctggggttgcgtccgtccgttctggtggtgccgccatcgcttgagaaagtcgccaccaagctgcttgagcgcgagctgaccgttgatgagggtgccaccaccaccaacgaactcaagggcaaggtctcgctggttgtcgctaactggatgccggctgcgaccgctgccacggtataa

SEQ ID NO: 387390 - DNA, 483 bp, Salmonella enterica
atgtcagatcaggaaaacaacgccgttttacccggtgaggcagcggataaccagagcgctggcggggatagcccggtttctcagtcaggttttttcctcgttgaggttcgctgtccgcgtgagcgttacatccgcgccggcatccgctttatgcgcggcaaacagacgctggaaaacgtaccgcagtccacactcgatatcttacaggctgacccatgcctcattgtggtgtcggttcagtcggcagccgcgccatctggtgaggctggcgtgcaaaacctggctgacgttgtcaatacaggcggtgatgtgacggtcgctgagattaacgcggcgattgatgtgctgattgcccgtgctgacccgcaggccttcaccaaatcaggtgtgccgggcgtgaaagccgtcggcgatgaactgggtcagcctgtcaccaaagcgcaggtggacgccgcctgggcggcgcgtcaggagcacccgtaa

SEQ ID NO: 387391 - DNA, 414 bp, Salmonella enterica
atgctgtatgccagtgcgcaggatatgcgcgaccgctatgacaatctcgacacgctgctgtttcagcccggctcagacacccccaatgagaagaagctgacgcaggcgctgaatgatgcgggtgcgctggcagacagttacctgtcggcgaagtatgccctgccgctggccgtggtgccacaggtgctggttcagcactgttgtgccattgcgttctactacctgtgtgatcagcaggccaccgaccaggcgcgcgatcgttaccgcgaggcgctcacctggttacgtgaggtgaagagcggcagtattcctgtcggggtcgatgaggccggcagcgcgccggcgtctgacgacctgccgcagatgcaggccgaagccccggtattcgggcgcaaccagaagggctttatatga

SEQ ID NO: 387392 - DNA, 537 bp, Salmonella enterica
atgattgcggataccgaacaggcttatctggatcgcattcgctccctctttggcaatcgcctcagaaaggtggacacgcatccgggcgactggagtgaggccaccctcaaaaagctgatgctgacaccgccggcagtctacgttgcctggctgggtgccggtgaaccgcgtacgcgtcaccgcatggtgagtcactgggtattttacgtggttggcagcatgttaaacggccgcgagacaaaccgtatcggcctgtatcagatggtggcggttctgctgtccggtctggtgggttttaaggcgggttccgcctcgccgctggcgtttaaaagggctgataacctggcttctgtaatccagagttctgcgggcgttgtgctgtacgccctgcattttacctgtgaagaaatcatcgatccgctgaccgatatcagcacgctcgacgacttcctgcgtcattacgagacgttcggcgagcctgacggcacggccccgtttgaggcgcatatcgacctgccggggcctgaacatgaataa

SEQ ID NO: 387393 - DNA, 147 bp, Salmonella enterica
atgagcattaacaaaaaagaggaagaagtcactcttcctcgtgagattgattactcatggatacccgcctggtgtcagcaggttgatatggatatcggagagatgcttactgaacggttccattctggggagggcttttctgaataa

SEQ ID NO: 387394 - DNA, 270 bp, Salmonella enterica
atgtccgggaataatcccacctcaatatctgaacaagtcgcagctatggaatatgcagccgggtttgttgccgcgcttgttacctttacccttctacttgaccaacacagggttattcctttgtttgataccctgaaagctcttcgtgattctgtggctcaacttgaaactcaggagcaacacgccaaagccaaagcaatgcggcatattattctcgccctggaggaaattattcagaaaagccctccccagaatggaaccgttcagtaa

SEQ ID NO: 387395 - DNA, 228 bp, Salmonella enterica
atgaagaccttctttattaaacccgtaccggggcgcatggttcgcgaccccgacacgctggagtttctgcaacctgacggtgaagaaaagcccttcaccccgtactggtgccgccggctcgatgacggtgatgtgattgagtttgatccgaacgcgacgccagccgtcaccgccggaaaagctaaagcgactgacgctaacgctgatgccgtggagaaaaacgcatga

SEQ ID NO: 387396 - DNA, 1503 bp, Salmonella enterica
atgattggttttaatgaaattcagggcgacagccgtattacgctgacgcaggttgagttcgacaactcaatggcggtggtcggtacgccagcgcagcatcagacggtactgatgttcggccaggcgaacctgaaaggcgataaggttgacgggaccggccagcttgacacgccggtacgcatcacccgcgactctcaggcggtcagcctgtttggccgtggctccatgctggcgtggatggtgaaagaattcatcgccatcaacccggacactgaactgtacgtcattgctcagggggccggggccggtaaagctgacgccggcagcctcaccctgagcggcacggccaccggtgacggcgtactccgcgtttatgtgggtggacgccgctaccaggtggcagtcaccagcggccagaaagggaaagagctggctgacaaactggccgcgctgattaatgccgatcgcgatgcgccttttaccgcggcgtctgcggctcccgccggcgctgatgtaggtgccacaagcagcgtggtatcgatgaccgcccgctttaccggcgagtgttccgctcatgatatccgcctgaactattacgacggcgaaaccaccccggacggcctgacggtgataattacgccgccggcggcaaaagccgctaacccgggtatcacccgcagcgtcgcgaatatgggcgagcgtcagtacaactatgtggtgatgccgtacaaggaccaggcaaacctcaacatcctcagcgctgaactcctcaaacgctggggaccggtcaaaatgtccgacggcgcggtgtggatggcgcacaccggtacgcagggcgaaatcaccgcgttcggtgagtcccgcaacgattttctgttcacctgcagcgccgttcccaaagcgcccgaaccggattacctctgggcggcatcggtctgcgcgacctgcgcgccgtcactgtccactgacccggcccgaccgctccagacgctggcggtgtcatcacgcatggcccctcagcttgctgaccgcctgactcaagaggaacgtaacctgctgctgcacggaggcattgcgaccgtcaccgtggccgccggcgacgtggtgcagattgagcgccaggtgaccatgtaccgcgttaataaatacggcgacgttgatccgagctatctcgacattgagaccatctacacgctgtcgtacctgcgctactccctgcgcaccttcgtcacacagcgattcccgcgccacaaactggctgatgatgatacgcctgtggcaccgggacagcccattgtgacgcccaaaatcatgtcgctgcagcttattgcgcttggtgaggagtgggtggatcaggggctggttgagaacctggatacgttcaaaaagaatctgctggtagagcgcaacgccagcaaccgcaaccgtctggatgtgctgtgtacgcctgacctggttaaccagttccggttcttcgccgcgcagctccgtttcattctgtga

SEQ ID NO: 387397 - DNA, 366 bp, Salmonella enterica
atggcaggaaatcagtatcagggcgtggcaaccgttcgcgtgaacggcagcgaatacgccacgctggaaggcgcaaccttcacgccgtctggctttgaacgaaaggtggttaaggggcccagggtgtatggctataaccagcaggcgaaagaggccacgctggaatgcaaattccctgccggtggcgatgactccccggacagtgacgtgatcaacacctggaccagcgtcactatcgaatttatcgccgataccggcgaggttcacatgatgacaaaggcgtggagttcggagccggcatcgcttgctgctaacggcgagatctccgcgaagttcgccagtgcaaaaagtacccgcgtgcagtag

SEQ ID NO: 387398 - DNA, 486 bp, Salmonella enterica
atggccgcaaaaacacgtaaaaccccgaccgcagtaaaacaggacagtgacgaggcggcgctggctgccattcgccaggcgctggacggtgacgacccgcgcacggccgggctgacggagcaactcgctaagggctacgtcgatttactcgatggtctgccgttcggcgaggggcgtgtgtaccgcgtcaccttccgcgaactgtcggcaaaggacagcattgacgccgagaccgaggcggaacgcgtgatggacacccgtaacggcccgattctgattgcctctccgtcgctgcgcggcgtggcgctgctgcgccgccagattgccgctgtgggcgaaatcgaagggccgctctcgatgctgcaaatcgggcaactgagcgagcgcgacctgtcccgcctgatggtggcggttaacctgcgcgatacggcgctcgccggaaagctggcaggtgacaaggggcgactgggagcggtgccggagtga

SEQ ID NO: 387399 - DNA, 2127 bp, Salmonella enterica
atgccaaaaagcctgaaagcctcactgattgtcgatttactcggcaatatctccaccacatcccgccagtggtcgcaggaactgggtgcgttttcgcacgccgggcagcgcggactcggtggtgtgggaacggcggtgcgccgtctgggcggtgatgcggagaccagcagttcccggatgcgccaggcattccggggaatgcgcagcgggatacatgcggtctcggcggacatggatcgcctgaaactgagcgcggaaggtgtgtttggttcgcttacccgtctgtacggtctgattaccggcggcgcgctggtttacgggttcaagcggctgtttctcgatcctgctgctcacatggaaagttttcagacccgtatcacgtccctgaatcatggagatgcttcggcgacagcggatacactcaaatgggcgcaaaggaacacccagcaggccccctggagtcttaaccagatcctggaagaatattccaccacacgaggctacgggatgagtgacgccgaatcccgccgttatgtacagatgctggaggaccaggcgggccgtcacggctggaacaagcaacaggttgaaggggcatccctgcaactgcgtgagatgtttgcacgcggtaaactccagggacaggatgccaaccagttgtccggctacggcatcaatgcctatcaggtgctggctgagaagctacacacctcggccagtgccattcgcaagctgggtgaagccggcaaactcggccctgagaccattcgcctgttgttccagacgcttcgcgagcaggcgagcggcatggctgaaaagtccatgcacacctgggccggtatgaccatgcggatgcaatcagactgggatcagtttgcgctgaaggtcatgaatggggggccgttcaagttcctggagaaacaactttctggtgtgctcgaccagattgcggtcatgcagaaggacggccagctcgacgacatcgcgaacgatatcggtcaggggatgctgaccgcgtttacatccgccagagatgccgtgacctggcttgttgaaaaaatcaaagccgcccgtcaggcgctgaaacaactgcgtgacgacggctacggcaaaaccctggacaatatcgccagcggtgccaaaaccctcgctaaatacctcctccttgtctacgcggcccggactgccctgcggctggggcgagcggtcggcatgggggcattccggctggcggccaccccgctgcgctacggtcttgccaccgttggcgctgtcacatcccctttccgcaagcgtcagcccgttatgccgggcgaactgcccggacgtggtggccgtttcatgaatttcctctccggcgttaatcccgccgctgtgcagccggtcctggtgaccaactggccggcgggtgcgctggccggtggcggaggtaatggcggtaataccctcattgaggacggcggtagcggcaaaaagcgtcgccgcgggcgcaccaaaaaaggccccggcaaggggcgcggtatgtcgacagtggtcacggcgggcgaagaactggcggaaagcgccgccaaaaaaggtttcttcgggcgtatggcatcccgtgtcggcggctggttcggcaaaatccccggcctcagcaaagccggcagtctgctttccgctgccggcaataagctggggctgggtaaagtggcaggctggctcggtaaaggcggtaagtttttagggcgcgccggcggtggtgcgttcggtgcgaccctgctggccgcgcccacgctgcttgacagtcaggcgacggcccacgacaagggggcggcggtcggttccgggattggtgcggtggccggcggcgcgctggggacgttcgcagggccggttggcaccgtgattggctccacggtcggcagctacctcggtgattacctcggcggctggctcactgatgcttaccagaaaatcaccggtggtaatgacaataataacccgcccccgcaaaaagcagaggcccgcgtggagctggtcgcgccgccgggatgggacgcccgcagtattgatataaatgactccgatccctttggtctggatctgaatttctacagcggaggtaactatgtcccctacgggtaa

SEQ ID NO: 387400 - DNA, 1440 bp, Salmonella enterica
atgtcccctacgggtaaagcgggtaaaggcagcttccgtaatgttcccttccttatatataaggagcagcgcgagcgcggcggtcgcaatattgttaagcgcgagtacccgctgcgcgaatccggcggggccgatgacctcggccctaagctgccggcgttcacctttacggtgattgtccagggtgacgacgcgcaggcgcagcgtaagacgttgcgtgatgcgctgtatgcgccgggggccggtgagttaattcaccccgattacggtacgctgaatgtccttatagacaactttgaaagccgttataacgtgtctgaacagcgcgtggtggagttcacgatcaacgccacgccacaggcaaacgacaccgccccggatacgcagaaggacacagccacggcgctgacagcaaaagccggcggcggtcttaacagcgtttttaacacgctggctgacggctgggcagtggtgtccgataaccttcacgatctgcaggcgatggccgataccgtcagcgagaaaattgacgcgctggaaaacacggtcagcagcgtcggcattatgcaggatatcagcagtttttccgcttctttttccgccatgaagggcaatattaccgcgctcattaccagtccgttacggatggcgcagcagctcgccgggatattcagcggtctgattgcgctgccctcactgccgtcactgtccctgctgggcggtaaaaagcgctcccggcctggcggtgtccgtaccggaacggggcagtcgtcagtacagaacgcgggtatcactgccggcattaccccttccgggagcctcaccgcgccggatgaagcggtaagaagccagagcgggacgcagttatatcaggcgctgttgtcgtttcacgacacgctggtaacgcaggacagacagcgcgatctgaacggtctgacaccggcggcgcaggctaatatccgcctgctccagtcggtactgcaaagcgccgtagtactggctcaggtgcagacggcgggcagccttctgacgattgccgtcgcgcagtcagccacgccggcaggtgccggcacggatacgacaacagacgccccgataaccgttccgttactccagagcgccgccgacgtacagacggtcagtcatacgctcggtcagtccctcgacgctcaggtgctggcgttctccgggcagggatatacccgtaccgcgctggcgttacgtgaagcccgtctggcgctggttgaggatttaaccacgcgcggggttcagttgccgggtgtctcgtcggttgcggttcgcacgacagagccggccctggtgacgctctaccggacgaccggcaacagcgtgcaatggcagcggttcgttcgtcgtaacggcgtgatccatccgctctttgtgccgggtggctcggtcgtggaggtcatagatgaatag

SEQ ID NO: 387401 - DNA, 1125 bp, Salmonella enterica
atgaatagccgtattgagctgtttatcagcgggaaggtattttccggctggacgggcgtcagcgtgcggcgctcgctggagcaccttgccggctcctttgagctggagttaatgatgcccggtcagcccgtcccggacggtatctcgccgggtctgccgctgaaattacagattaacggcgtgacggtcattaccggttatctcgataccgtgaagcacaaaatcaccgctaccagtaacaaaatcagtatcagcggccgtgataaaaccggcgatctggtggactgctccgctgtctttaagggcagccagtggcacaaccgcaccctggagcagattgccggcgacctgtgcaagccctttggtatccgggttatctggcaggttgacgacgccacggccgcaaaacctttttctacttttaccctgcaactgtctgaaacggtcagtgatgcactgacccgcgccgcccgtcatcgtggcgttctggtcaccagtaacgccgacggcgacctggtgtttacccgggcaggcagtcagcagaccgataccctggcgctgggaaagaacctgctggacgcggactttaccgacgactggcgcaaccgctacagcgagtacctggtaaaaggccacggcggcggcggtggtcatcagggcgaggcaaaagcggcggcgctgctggccgcccccaaaggcaccactgacgataagtctgtcacgcgctaccgtccgaaggtcattctcgccgaccataaaatcaccgcagacggtgcgcggcagcgggccatccgcgaggagcgccgggccatcgccaaatcggagcgctttatcgccagtgttgcaggctggttccgggagagtggcgcgctgtgggatgtgaatctgctgacccgcgttattgccccgcgcgtgaacgtcgataagcgcgatttactgatttgtcaggtggaattcacgctcaacggcaaggaaggcgaagtgacccgcctgacgctggccccgcgcgacggctttattgtgccggcggagccggacagcagcggaaccggcggcgaaggtggtggcgttgacgcctggatcttacagcagatgaagaaacagggaattaaattcgatgaatga

SEQ ID NO: 387402 - DNA, 630 bp, Salmonella enterica
atgaatgatgacattctccagagaatgctggcccccctgatgcgcggtgtccgcctgctgttcgggcgcggcattctgaccggcacccgtgacggactgaaaatgcagaacgtgcagatgacctcgcttgacggcgagacatttgatgatgtggaacgcccacagcagtacgggcaaatcagcgtcccgctgtcgggggcggaaacgtttttcggttgcctgctgggtgaccgcgatcaggcggtgattctggtggttgaggacaggcgctaccgcccggtgggcctgcctgctggcgacagcggtatctaccactatgaaggccaccgcctgcgcctgacaaaaggcggtcgcgccatcctgacgtgtaaaacgctggaggtgtacgccgatgaccatatcctgtttgacagcccggagagcacgtttaccggcaacctgacggtacagaagaacctcacggtgcaacagaacacccatattcagggcaatctggccctggacggcaccgggaacgccaaaggccatttcactatgccggatgcgaccattgccggcgtgacctacagcggccacacccatcacgagaacggtcgcggcagcaatacgggaggcccacaaaatggctga

SEQ ID NO: 387403 - DNA, 438 bp, Salmonella enterica
atggctgatattgcaattatctggcgtaacggtcgcggcaacctggcgctgaacggccccgacctgctgacggataacagtattgaaaccgccgtcattatctcgctctttaccgaccgccgggcgcagccgtccgacccgataccggacggcaccaccgaccggcgcggatggtgggcggacagctttcgtaagcgtcccattggctcgcgtctgtggttgctgaaccgcgaaaagacactggcatccgtcgtggacagagcggcggcctatgcggacgaggcgctggcctggctgaaaccggcagggctggtgaagtctgtcacctgtacggctgcgcgcgtggcacatgaccgcctgcagctttctgtattactggttatgcctgacggcgcacgtcgcccgatggcgtttgaagcggatttagaaggggtttaa

SEQ ID NO: 387404 - DNA, 1083 bp, Salmonella enterica
atgccgtatcaacccacacctctggcgcaactgattaaccagacacagcaggatatcagccagcgtctggaaggcaccctgccggggctggatgaaaccacgctgcacgccattggttatgcccaggcgggactctccgcccaggagcatgagcacctggcctggattgcccgccagattatcccgtctgatgctgacgagactgagctgctgaaacactgcgcgtggtgggggattgtccgcaagcccgcctcacgcgccggcggtccggtacaactgaccctgaccgatacggccaccgccgatgccggcgtgcagctccagcgcggcgacggcgtggtttaccgtatcaccacatcaaaaaatgccggcgcgggtacgctggaggttgacctggaagcggttgacgccggcgctgccgggaacgcggcggcgggtacgttgctgacctttatcaccccgcaggcggggattgtgcagacggccaccgtcaccgggtcagggattaccggcggcgcagacgtggaatcattatccgaattgctttcccgcctggtgtttcgcgtgcagtacccgccgtcaggcggcacaaaatacgactttgagcgctgggcgcgcgaagtgccgggcgtgacccgtgcctggtgtctgccggagtggccgcaggcgggcagtctgggcgtgacgttcgtcctggacaataacccggatatcttccccggcgacggggacgttgaccgcgtggcggagtacatcaaatcacaccctgacccggccacaggggagcctgtcggccaggcgctggggccggtggtgaagacctttaaactcaccaaccaccctgtcgcgtttcagataaagattgcgccgaatacgccggagaaccaggcggcggtcagacaggcactggttgatttgctctataacgaagcgaagcccggcgggattattctgccgtcggcgttctggcggaccgttgccggcgtgaaagcgctgaacgacttcgaactcaggtcgccgctggagtccgtcagcgccggtgcgacggagctgcttaccgtgggggatatcacatggctgtaa

SEQ ID NO: 387405 - DNA, 555 bp, Salmonella enterica
atggctgtaaccctcacgccttaccagcgcgcactcctccggttgctccctgacgggctggcgtggaataaagcgccagactctgtgctggccgcgctgtgtctgggcttaagtcagtccacggcccgcgtggactggacggggcagcaactgctcgatgagcgtttcccggaccggtcgcgcctgctgctggatgactgggagcgctttctgggactgcctgaatgcgatatgaccggggccagtctgcaggagcgcaagagctatgccggcaacaagtaccggatgaagccgtcagttaaccgtgagttttatatccggctagcggcgggtttcgggtttgatatcgatatccggccgtccccggagtcgcagtggataagcatcatcaatgtcaaaacgaccaccggttaccggcatatgaacgtactggacaatattttaacacctctgcgtatttacgacgccagcgccctggaatgtattctgaaccgttataagccagcgtggcagacgtttcgttatgtctatgaaagtagtcagtcgcacgagtaa

SEQ ID NO: 387406 - DNA, 1362 bp, Salmonella enterica
atgttttacgttgataataactcaggctcacccactatgccgccgttatcgccggcgcaaagtaatacgcctacctggtttaccgagggtgataaaaataaaggtataagctggattggtcaggactggctgaatatcctgcaggcggagttactgaatattctgagtgaagccggaataaagccggataaggggaaattaaaccagctcatcctgtccattaaagccattattacaaaaaatgcttttatacagacgaataacctgaaagagattttcgatgccggtattgcggctcagtccgcggcgcgcggccatctgggtctgggaaagctcgccacaaaagacagtcttggcccgacggatgttaatgccctggcaaaagaccagaacctggccgacgtccccgataaagcgctggcccgtaacgccctccagctcggcaacagcgccaccctcaatgttggcaccaccgcaaacacagtggccgcaggcgacgacgcccgcatccttgccaccaaaaaagccatcgacgacacccagaccggtcttgcttggcagcctgttatgtggataagcaccgccgatgatttaagtagcctgccgtctggtgctcgccggtttgccagcaataaagctccggcaacaatattgccggtaaacgattatgttttccttgaggtgctggcaaagcgtgatattgcaaacggctgtgtcgttcagataacagactcaaccggtaacacctggactggcacgcgttgggacgcaaccaatggctccagttttacctggcttcccctgatgtcgtgtccgcccggcgttccccttccgtggccgtctgacaccatccccgccggttacgccctgatgcaggggcagcccttcgataagtctgcttacccgttactggcgcaggcctacacatccgggataatccccgacctgcggaggctggttattaaaggggccgggaatggccggtcaccactcagttatgaggcggacggtaacaagcggcacgcgcacaccgggcgggcacaggatacggatctcggaacgaagagcacctcgtcatttgactatggcacgaaaagctccggttctggcggcggccacgtccacgaattcggtagttacgtaaattcatactggggggactctaaccatatctcctttttagccggaggtggtgcgtggacgaaggccgctggcgaccacactcacactacctggattggccctcatggacacacgatgtacatcggcccacacggtcacctggttattgttgaccctgacggtaatgaagaggtcacggttaaaaacatcgcctttaactatattgtgaggttagcgtaa

SEQ ID NO: 387407 - DNA, 750 bp, Salmonella enterica
atggcttttcaaatgagcgacaaagcgcagacaattaagatttataacctgcgttcagatacaaaagaatttattggtgcgggcgatgcgtatattgcgccgcacacaggattaccggcaaactgtactgatattgcaccgcccgatattccggccagccatacggctgtatttgacaccgaaaaacaaacgtggagcctgttcgaagaccaccgcggagaaacggtatacgatacgacaaccggcaacccgatttatatttcagaacccggcccgctaccggaaaacaccaccacacaggcccctgcatcaccgatagataaattcgaaaacggccagtgggtggcggatttgaataccgcgcgtattcagaagcacgctgatattaataactggcgtaatacgcaggaaaatgcgaattacgtctttcagtttaacaatcacaactgggactacggcaaagccacccaggagcgtctctcactatccgttcagatggcaaaatctaacaaactgccagccggttttatctggacggacgccgataataacgacgtgccaatgacagcgggcgagctgctgaacctcagcgacgccatcgaccaggcgatgttcaccaaaggcctgcaaatccatatgcgccagcgacagatgaaagaagaaatcgacaaactgactgatgcacaggctgttctggattatgttgtcggctggcctgcgaaaccggaggacgccagtgacagtcattaa

SEQ ID NO: 387408 - DNA, 375 bp, Salmonella enterica
atggcgggaattacgatgtggcaaacgctggcagaatggtttgaaaaagctggttatgcaaaggtattcagtaatgtcggtattactcaagcaggcattcagggaattgatgatttaaataaatatgccatgcaaggatataaagttatcacacttattaatgacagtttgttaagagatagtgctgccgaacatactacatatccaactcactggattgtctggaatggtcctgtgactcaggggaatgatggatttgtaaatttaaatctgttttcatggggatatgtgtcagatcaaataaaacctcaaaaagatatatcattcttcattcgtcgattcttcggaggggtggtctttaaaccgctgaaatag

SEQ ID NO: 387409 - DNA, 1719 bp, Salmonella enterica
atggcggtggaaaaactgattgtcgaccatatcgatacctggaccacggcgcggcaaacccgctccaccgccgggcgcggcagctcgggcaagattgacctgtacggcattaagaaactgcgtgagctgattctggagctggcggtgcgcggcaaactggtgccgcaggactcgaacgacgaaccggcgtcggagctgctgagaggaatgaaaaagcagcaagaagacttaattaaagaaaaaaagataaaaaaaccgaaaaagcttccgccaatagatgaaattttagaatcaatttcaataccacaaggctgggagttgtgttatttgaatgatattggcgattggggggctggagccacaccaaatcgtacaaattctggatactacggtggaaatattccatggtttaaatctggagaattatctgaagattacataaccgattcagaagagcatattactgcattggcactaaaagaatgctccttgcgtgacaaccagccaggcgatgtattgattgcaatgtatggggctacaataggcaaaacatcaatactcaatactcgttcaacaagtaatcaagccgtctgtgcttgtacccctttcgatggtttgtcaaatcagtatctgttgaccttccttaaagcgagtaaaagagtatttacatccatgggtgcaggtggagcgcagcctaatatttctaaagaaaaaatcgttgctacccaatttgcattaccgccgcttaaagaacagttgcgaattgtagaaaaagtcgagcaactcatgtctctctgcgaccaactggaacagcactccctgaccagcctggacgcccatcaacagctggttgacaccctgttaaccacgctaaccgaaagccagaacgccgatgaactggccggaaactgggcgcgtatcagcgagcatttcgacacgctgtttaccaccgaagccagcattgacgccttaaaaaagaccattctgcaactggcggtgatgggcaaactggtgccgcaggatccgaacgacgaaccggcctctgaactgctcaaacgtattgcgcaggaaaaagcgcaactgatgaaagacgggaaaattaaaaagcaaaaacagttgccacctattggtgatgaagaaaagccgtttgaactgccggatgggtgggaatggtgtcgcattggtaatctagtaaacattcgcccagaattagtcgcgcctgatgaataccagtccctgccacagatagcgccagatatcattgagaaaggtacagggaaagtcaccgccaaaagaacggtaaaagagtcgggtgtaaaagggccaaatagtcggttttacaaaggacagattgtttactctaaaattcgtccatcgttatcaaaagcatttttagccgagtatgatggtttatgtagcgcggacatgtatccactggattgttttattgaccgtagctatttattaaaatcaatattatcggagttttttctcatacaagtcaggcaagctgagaataggataaaaatgccgaaactcaatgttgagagcttttcaaatattcttgttacagttccacctagcaatgaacagcaaaaaatcatcatgaagctagcagctattgatgccttttgtgacaaggcaaaatctctcattcaatccgcccaacaaacccagctccacctggccgacgccctcaccgacgccgccatcaattaa

SEQ ID NO: 387410 - DNA, 513 bp, Salmonella enterica
atggcgaatgccattcaatcgggccgcgctgatggacaattaaagcggatcatttccacgctaacccattttttcatgctgcatggcgcagaacaacatggcgccatcacccagggattgtttcaagccgatcgtcggttgatggatggctacagcggtagtggcagcagtttatggtcattgcgtacgctaatactgatgctgtatgcgggcacggaatgtgaactgtgggatattgatgaagcgcctctggaggttgaaattgcatcatttgattttactatcgacgctatttcagctcgcgttacaggaattaaagaaacgcaggaggtcatcgtaacatttacccatgatcagtatcctgacgctcctttcagagatggtaaattaataacgcaaggatggtggccaattgttcttgaaagtatctccgggcgctcaacgcgtcctaaaaacaatttattacgtaagggggtgacaacttttagttcccgattaaatttatacctctga

SEQ ID NO: 387411 - DNA, 2400 bp, Salmonella enterica
atgaaaaagacaaatttagcattttcgctattgtgcttaagtatgggcagcgtacacgcacagatcgccacagaaaatgtaaatctgccagtagtaaattcagctaccacaacgtcaacccagcaacagcatattattaaacgtatgcgtgatacctggcgacagaattttgtaccctcaggcccagcggcgccagaattatcagcagaatacgtagcaagtttaaacaaaacggccaataaactttggcaaggaatagataaaaatacccctgctggccagttatgggcagatactgttctggataatgaaagcacatcaggacgccttaaactgggcggcactctttatactgtatatcaacgcctgttcaccctggccaaagcctgggctacgccgggaacagatctttataaaaatgctcagctatatactgtacttaactctgcgttaatcaatctgaaccaggattattataatgatcaaaccccagaatggggaaactggtggaactgggaactaggaatttcacgcagcgttaacaatactctggtgatcctctatgaggatctccctgcctcgctgattgagaaatataatctcgcaacccgccattttgttcgcgaccctcgttatttagcggaaggaagcggtgccccctactccaccacaaaaaatgcctttacatcgactggcggaaaccgaattgacagtgcaatggtcgtatttgttcggggtcttttagctaacgatcctggagaaattagcgccgcggtagcttcggtacctgaagtgcttaacacggttcagtccggagatggtttttacaaagacggatcgtttatccagcataaagacttaccctatagcggaacttatggccaggttttgctgaatggtctggggctaattaaaaatagcgtggcgggtacgccatgggatttctcagctgaagataatcgccgtatttatgatgtgatcaggcaagcttttttacctttactccatgagggaaaaatgcccgatgccgtcaatggccgcagtatttcacgtaaaaatgggcaggatcaggatgttggcgcatcagttatgaatgccgttgcattgtttgttaatggtgcgccaccagaagaaaagcgtcacattgaacaggtattaaaagcccagctaaattcaaaaacaacggaatattatcacactcacttgccagaaaacttaacctcctggcaggttattacgcgtattcaacaggatagccatttgccaccggccccccgaacagcgggcggtaaactgtatgcagatatggatcgtctgatttaccagggtacaaactatctggccgttgtcgcaatgcattccagtcgtactggcagctacgaatgtattaataacgagaatctaaaagggcagagaacatctgatgggatgacctggctgtatttgcctgatgacgatcaatatcgtgattattggcctgtggtcgacagtcgatttttaccaggcactacctctgctggcgagcagggttggtgtgatgagcaataccgtgtgactcagttaggccgggcaaatattgcctgggcagggggcaataccctgaataaatgggcaagcgcgagtatgcatttaaaagtaccgacttattcgctcaaggcaaaaaaatcctggttcatggcgccgtatgaaatgatcatacttggcagccaaatatccagtagtagcccggcggtaacgaccattgcgaatcagaaaatcagtagctcggcaaaagtacttgttgatggcatagtcttacaacccggagaagagagaaaagcaacccaatctgtcgttttaaacgataaaggtaataacattatctggaagccactcgctggctcaagcgcgcaagttagcgtgaaacatcgtcagggtaactgggccgatatcggaacctcatccggtaaagtttcagcgcaatttttaactattatccagcctcatagcgcagaatcagataatcattatgcctgggttgtctacccctcggcttccgtatcttcccccgtaaattccgacataacgctccttgcgaatgacgcaaaagttcaggccgtgtcgttaccgggccagcaggttatctatgccaatttctggcgttctgcaacggcgggaggagttcatgcgttgacgccaatgtctctgattatgacatcaacagcacagggttatcagatagcagtatcttcaccacgccgtgatcgtcgagtgtcattccagttacccgataatgcagccccattccctatttccagtgaccctgataagcgtgtatctcttaacgggaacatcatcagcgtgaatatgaccaatctacgcggcagtagttattcttttgaattatctaaaaataaatag

SEQ ID NO: 387412 - DNA, 240 bp, Salmonella enterica
atgaaacgattaaataagtctattatttgtatattgcttgctgcatcctcttcttcggcttttgctggtgaatacacacaaacaggttatatcactgaagtgaaagcaaacgagcagggagatgtgtgcgatataatgataagtagtacacctgccagcgctggctttcagggaggacaatggtcttgtaattccattgtaagccaaaatatgtttaaagtggctaaactggcaaaataa

SEQ ID NO: 387413 - DNA, 327 bp, Salmonella enterica
atgaattcgccgacgttctgggcatcacgctggagaacagatggtaaaatttataatactacctatgacaatgcctccagcagtgatactccatggaccattattgataccaccagaggatatgccgatgtagtcatgaatggcacacaacccgaagttccattagcagacacttgcctggctcttccgcagaatatatcagggacattaaaaaaagaggaaaatgtcaatgctaacgaaagcaactcatgctcactacatggatatgtaaatataggcagacgcttttatgacaagaatatattggcagctgtcattgataattaa

SEQ ID NO: 387414 - DNA, 273 bp, Salmonella enterica
atgaaactcgcgccttacctgataacactgacgctgccgtttatctcgttatctgccgaagcggattaccacacccaaattaacgccggaaatactgtttctggcgatgttgttgatggctcaaaaggtaatcagcatgtttatggcacaccgactgactccaccatcactggcccctatgcctatagctatattggcgatggcgggcaaaccaatcacatcacggtgagctatttctggaaccgggcggcagcgcttatgacacacagataa

SEQ ID NO: 387415 - DNA, 516 bp, Salmonella enterica
ttgctggacgtcttcgccagcaaggacgggcacatccgggaaccgatgcgcattgtccgcgaagagaaaaaaacgcgtgatgcaaagcccgatacaactcctgaacccttaccttccacgccgcttccggttgcgctcacccgctacgccgcgcagatgctgtatgccccgctacgcaccgtggagcctttgccgggcgtgcaacccgaaggcgtgcgactggcaaaaaccatcaccaccctgctgcccgcattacccgtcaacgctataccgatcggcggctggcggctggatccttatcgcctggcggcgatccgtcttcagaataaaagcactacccggctggaactcgatccgcgccagcttcagggacggttttacgccgtctcctttcagcatcgctggctggggcctgcgggcagcgccgaagacaccaccgtactctatctcatcacccgcaaacagcgtcctgaacaggcgatcctgccggagcctgcgccggagaagaagaaatga

SEQ ID NO: 387416 - DNA, 1098 bp, Salmonella enterica
atgattagcaggatcttctacccgattgggcaaggtgcattttacgcagaaagacatgatactttcaatgtcgtttatgattgtggcaactggaaacaaacaaatctttcgaaaaaagttgtctcacaaagtttcgctgcaaatgaaagtgtaaaaatgttatttatttcccacttggattgggatcatatctccttactagaaactttaaaaaatacagttagttcaattgattatgttgttttaccactgctttacaaaaatcaaaaaatattcctaggcaatatacacagaattttaggacactcttcacttaccatcataagaaatccggagaggttctttggtgagactgcaaaaataatctatatagccccatcggaaaataatgaaattaacgacaactcaattaatattgatgacaactctgagaacaagaacatacaagaaattgcgagtggaacaacaattaagattagtggggacgactacaattggtgttttataccatttaatataaaaaatactcaaagaagtaaaatcctcgaagaggagctagaaaaagcagggtttgatgttgaaaaattgaaaacggacccttcatatacaattacaaagctaaccaccaaaaaagataaaaacatcataaaaaacatttataattcattacacggaaagataaacgagaattctttggttatttattctggaccaagaaataaaagaagcgattcaatttggcactcatattttagtgacaatatatatttctctcactctgtcatttccggtaaaattggttgtatatacacaggtgatgtcaatctaaacaagttaaacataacaaaaatatatggtaaacagtggaatatggtaggaacaattcaaattccgcatcatggggctgagaaaaatttcaacccaaattttttaaattcaagagaattattctgtcctatttctttcggagttgataatacttacggacatccatcttataaagtaattaatgatatcctgattaagtattcatatcctattaaagttactgagaaaatggactctggatatatacaattattacagaacgaatgctaa

SEQ ID NO: 387417 - DNA, 1191 bp, Salmonella enterica
atgaaaattattacaaccccatctaacattgataaaactttagttaaactaatgcaaaaatataccaagtactacatagcaacagcttgggcatcaatgggttcaaatgcttcacttactctgtttgaaaacaaacacagaatagttaaaatgattgttggaactcatttttatcagacgcatccaaactttatttataacttcgcaaatactgagacagtaagattcatattaaagacagatggtatttatcatcctaaagtttatttattctcaaatgaagatggtagttgggaatgtttaattggtagtgctaactttacagcttcggcgcttacaaaaaatctcgaactaatggctcatataagaagtaatgatcacggcacaaaagatatcttcactgatatattgagttcaattaacatctattgggaaaattcccgagcaatgaccaataacgaaatggttaattacaaaaaaatatgggataaaaataggcgaaagttaaacaccctaaaaggtatatatggtgggatacaaagtaaagatagcattataaattcaaacatctactctcttcaatggaaagaatactataggatgattagcaccgataaattagattcattccaaggccgtcttgatgttctacgaatagttaatgaatatttcaaagaaaatcaatctttctgtaaatttagtgagttacaacgtaaacaagtagctggaatagtcactgattcagaggttaactggaaatggtttggtagtatggttggcgctgggaaatttaaaaatagaatcaataccaataatatctatttatccgatgctcttgattatataccattgacaggttctgtaagagagaccgactacaataaatttgttgaaacattccaattagcatttccagacggaggggtagggattgcaatcgcgagtagattattagcaatgaagcgcccagactattttgtatgcctagatagccaaaaccgctataagttgtgcaaaaactttggcatatctacaactattaccttcgaaatgtactggggaaatataatcgcgcgaattattgattcagtatggtggtcatctcccaggccgaatactcctattgaagagcaagcctggaacgggcgtgctgcaatgatcgatgccatattttacgaaggattagaataa

SEQ ID NO: 387418 - DNA, 195 bp, Salmonella enterica
atgtctgatttatatatcccagtttattccactgatattgctcagcaggctttaccggaagaccggatcccggaaatgtcacattcgcccgaaacggtttttaaccttgtcaaagatcgactgatgcttgatggcaacgagaagcagaatctggcgacgttcctgcactacgtggacagacaacgaaatggatga

SEQ ID NO: 387419 - DNA, 960 bp, Salmonella enterica
atgccagttacgttaagttttggtaatcgtcatggttatgaagttaatcattcacggctagtccgtttgatgagtcctgataaagaagaagcgctatacatggggccatgggatcgatgtaaggaatatttcagaacacacaaaaaaaaagaggcactggaggtattatatacacttatccatggatgtgaacgtgaaaataaagctgaacttaatgttgatacagccggcatggataagattcatgcctttgaacaattaaaacaatatgctaatccatcgcaaaaagaccgctttgttatgcgttttgatctcagacagacacaagttttatttgagattgatggcaaggttattgataaattcaatttgtatcgtctcctcaacgtttcagaagactgtctttttaaattgatggaagaggatgaagaagagttgttttttaaaatatgtattaagtatggagaaaaaatttctcgctatccagaattattacaaaactttgcttttaaacttagagaggcagttcatgatgatgatgaaattaaggatgaagtttataaacttatgcgatctggagaagatcgaaaaatggcatgtgttgaatggaatggtacgcttactcaggatgagagagataaactactctgtcttcaaatgggatcttttggtatttctacccaattttttaaaataggttactgggaattagagggggaggtccagtttgatatgtttcatccaacacttctctatctgctacaaggatatacaccgtcattgtcattagattttacagaagctaacaccatgctgttatctgatgtattaaaaaaggatgatgatgattatcgcaataataaaagagaaattgatggtattctggaaaaaatatatagatcacataataacactttatttataagtgaaaattctagttgtcgtaatatgcttatataa

SEQ ID NO: 387420 - DNA, 345 bp, Salmonella enterica
atgaagctcactctgtttcatgtgatggtagctaatcaccacaccaggaaagatacaagttccctcaacgtgatctactattccgcgcagctatttagttaccggctatttgctgacttaaccgaggcgatttggtactttgccttcaccgcttttgcctgccttaccggtattttccccaaaatggaggcgttcacgccggagtggacattccagattacgttgaacattgtgacgctttttgtgctggttgatttgggcttaattttctcgttacaccgcggtttcctggagcgtggggggaagcgcgaaggcgacttcggctgtcaccgtcaataccaatga

SEQ ID NO: 387421 - DNA, 315 bp, Salmonella enterica
atgagctggaaatcatttgttcttaactttatctggcttgctataagcatattttggatagatatgttatctgttcaagacaaagagtggtttatcgatggtagaggaattaataatatttgtgatgtgatgacataccttgaaaatgatgatattcgcccagttggtgttataatgaccttaccattattcattccatatatttatgttgttatttggaagaggcagcgctctctttggcaatattctgttattgctacaatggtcttctactggctatggcgtttttttatccgatatcagatttgcttctga

SEQ ID NO: 387422 - DNA, 711 bp, Salmonella enterica
atgagtaaccttatattttgccaggttgatgaattaggctttcctaaatggaatggtgttgattattttagatggcattatcctccttctaactggacgttcagtacggggacggcacatttatggttatataaaacatcttggttgatttaccatcgcgatatgcttcggcaatatgccagagaggctcaaatacctttattgttacttgccggtgttgcggctgctgaggttggcggaatgccagaaagatttaaaccagtggtgctacaaattaaaaatatcctggaggctgtttcactgagaggaggcaatacctactcaaactctacttcagtaggttctgtcgctatacaattaggggttgccgccaggactatgggaatccgaccagatcttttatcatcctttgagcagttccaactctcccagtgcttactaaacgaccgtttcaacgttagagtggtagcctttcatttacgagaccttatacattatgattatcctgaaataggtgataccacaaacttaaccgatgagcagataattgttgtaggctcccgatacaaccgcggcaccgaaagaaataagcaagacatcattgattccattacagcacctactggatctcatcagagagaatacagtgaatatggtcggcgtattcttgaaaagaaaatcgccttaatgaaaataatgaaaggtctatga

SEQ ID NO: 387423 - DNA, 558 bp, Salmonella enterica
atgtcaaacctccagcagcgtattgttattaccggcgggccaggttccggtaaaagcacactcattgacgctttgattactaaaggttatacgtgcttgcctgaggctggcagaggcgttattcagactcaggtttccatcaatggaaatgcgcttccatggagcgacagaatggcttttgcagaatggatgctatgttgggaaatgcgttcatggcatgccgttgaagggtgcaatgagatctgcttttttgaccgaggaattcctgatattgcaggctatctcaacttatgtcatttgcctgtaccagcccatttagataaagccattcagacatttcgttacagtaaacaagtgtttattgcgcctccatggccagaaatttacaaacaggatgcggagcgaaaacagtcgattgaggaggccgaactgacatatctcgcaatggtgaccacttatcaaaaatacggttaccagctatttgaattaccccgtgcctcagtggagaaacgggctgagtttgtcatttctaatatagccaataagggaaaaaactga

SEQ ID NO: 387424 - DNA, 216 bp, Salmonella enterica
atgatgcaaccggactggcattccgccgacattatcgcggcgctgaaaaagcgtggaacgtcgctgtccgccgtttcccgcaactcagggctggcgtcctccacgctggctaatgcgctgattagacactggcccaaaggtgaaaggctgatcgccgaagcgctgggcattgcgccagagcaaatctggccctcgcgctatctcagatcgcgttaa

SEQ ID NO: 387425 - DNA, 462 bp, Salmonella enterica
atggctacgatccccacccagacacacccgttacttgctgtttccttcaatgccgccacggactttaccgtccttgccagccactgcgaaaacttcgctgaaaccctgattgaaagtaaagatatcgcgttaaaaatggcgctctgcggcagactcaacaccgctctgacgctgctccagcccacgctgttagaccccgtcccgccccatcttgttgaaagtctgaccgttgacaccctccccgcaaacgcccctcagtttgggcctgaatgcaccgagctatgtaactactgcattgccctgacgcagacgctggcggggcagggattttcctctgaaacggagaaattccttagctggctgctgtatgacctgatcaattacttcgcagcagaaatgaaagccccgcgttggctgcgtacacctgacggcgtaaagtttattgacggggtggcggcatga

SEQ ID NO: 387426 - DNA, 153 bp, Salmonella enterica
atggagcagcatgtgaatatattgttctggtataaacatcaagccacaagtaattttgtttttataagtcatatcgaacatccattttaccaatcaattaataaaaaccccacattattagcaaagtttaagaaaggaattttccatgaataa

SEQ ID NO: 387427 - DNA, 3756 bp, Salmonella enterica
atgaataacgatatggatattttagccaatctggcaagaatgtcaggtgtaggttgctggccagccaattttcaagacatagcaaaacaaaataaagaattcattacaactttgcggcgattccatcctgttaaatcagctatcgcatttggttctctgttaactcaaaaagaattacagtcaaactgtcttagactggaaattctggttcacttatgtattgcatatggaaatggctcatgcactataaccacttcatttcttaaagatgggttcaacgcaataggaaatacttatggtcatctggaagatccgccagaagatatttttgtcggtaatatttattctcgtcgtggaaactatcgagtactggaaggtctctgggaaagtgccatattctatctccagcgccttattaatatggttgataatttaccagaagaagaaccattttttcagcatatttctaattccgttcatgccttgcttaagctctcggatattatgtgcgaacgagccaatctcaaacgtaatgattatgaagataataaaaaatcattagacctatcaggacatatagcacgaaaacatcacgaattatcctcactactcatatttactatcgaacaattggaaacgtcaggtataaatattgatgatctcgccccatttatataccgtccagagcaacgcaataaaattcttgctcaagaattttctcataccgatgttgaacgtcagccattagtctggcacgaaaacagaatattactgatattaccaactgcggtaacattaactgtcagacgatttattattgaatctcttggcacaaaccaaaatcggaatattttcattcacaatttatcgcgagaatactttaaagagttctctcaaacacctcttctcggtgagcgctgtaacccccttccttttatgcaaaaagaatggggaactattagttttatgacaacagaagttgattcagggagatttgctaactttgtatttttcttggatacgctggagggtttcgccacaaaaggattctccagaccttacacaggtaatgagcaatttgagaatgaaataattcatacaatcgaatcccttgaggcgcatgcggaggaaaaggaaggtttccgtgacggtattacgttgattattggatgtggagtgggccgcggttctgactttagattaccttccagcaaaaatcctcgctggaaaagagaaatgttaagtgccccagatctttgtactttaagctggaccaaagaaatggaaccgttgcatttatggcggatcttcgaaatgaaaaatacgttaaagaaaaataacgtattcttgcgaaacatgaatggattgctgaacctctttgcctgggctaatagccaggatggacacttaattcctcatgcagatgttcctccagacagcctcggaaaattaatgaatctggttattcctcaaaatggactggcagaattacggcatgatgtagtaacaacttacgattgtcatgctgaacaattcatcgatggaacctggaaagttataaggacggaaggacggagtgctttcgaggaagacaaggaacagtccgtatattgttgtatcgactctatcaagggtggaaatattacaggagcatgtattactccgcagcgtgtatggtggttcgaacttgcatcgcctgatgaaactcttaataccatcagttatgggcgctgggagatggtaagaacctgggccagtaaggccgcttcccaccttgatgagtcattcggtgaggttttgggaaaaaatgctatcttatggcgctgtatttttatggagccacaaaatgaaacgctatttacagtgccgggtacagaacaggatgcaataaattctatccgtctaactgttgataaagagcatcatttagttgaatttcacatctttccagattttgataaagcgttattcaatcaagaaaatattgcggagaaaacattagtatcagttttgattagtggcgttgccaaaatggctgagattactaattatcagcatgatgaaatactcaagcgcattgtccccaatagtaccgcaagacaatctcatgctttcgttgcgcgtacctttcgcgatcacatcaaaagactatcagataacgagttggtaactatcaacatgtttgatgatgcttcgtgcaagcttgacttaggctggatggtacggtcaccagatgagggaaatactgtgataggcaagtcagaatgcctccagttcctgaataaccttgttgaacatcttgaaaatgaactttgtgaggatcttaaaaattttaatcgctacttcatgctaaatactttattgaataatcatgaactcgccagtatttcacgcgatcgctggcacagaacatcttctgctgtgttgggattacgtaacaataacgaatcagcactcaacacgatgcgaaatcatgaatttaaacttaatgcagtttttctatcatcaagaatactggtagaaatggcaatctgtgaatgcccaacaaaccggggcctgctcccaggaaaactggatctttccagattaatggcaaaggcggcacaaatattctatctagggggatggtcagatcttatccgttggaattgtatggagccccgactcatcattagaccatatggtgatgtccatgcagatcatgattttgtcgatactgtgatcgagaatttcggaagcgtaaccagtgagcatcggttcatgtcgtctgttaacaactatagcaaaaatttgaatacacctgaaattgttctgaacgcaaacgatcttatagaagcaaaatttattcaagcctggagtgatgagtttggggctacggttgatgactatcggcgctttattgatgctattgaaaattatggtattgaacaaaataaacttattataaaaattcttcgatctgacctattaacacttatggataatagtgacatagcatccagaataatttcagatatgagtttcaccccccgcttatgctggagaaatttacctgatggatataacagtaaagatattgcatcctggcgttttcgcagacgactaagtattacacgacttcctttattacaactgtcaaatgattcagatccttatcttttgatagcaccgggaatattaagggagtcgtttgcttatatgattgataattactattcaggttcctattctgacagtcacttaggtccagccatgcgtaaatacgttggctatgcccgcgaacgcgacggtataaacttcaataaagaggttgcacaaagaatgtcagagcttggctggcaaacccaatctgaagttacgcttacaaaaattacacgtcagggactgggccgcaattatggtgatgtggatgtacttgcatggtccccagaaacagggagagtcttagttatggaatgcaaagacttacaattccgtaaaacctatggagaaattgcagaacagttatccgacttcttaggagagattaaagataatggtaaaggtgattatttgcgaaaacatctggatcgcgttgaaacgcttactcatttcacagaaaaagtaaaagaataccttaacataacacaagatatttctattgaaagccatctggtatttcggcatcctgttccaatgcaattttcaaatggcccgataaaagaaatggcacaattacatacatttgatgaactagacatattaaaaacaaaataa

SEQ ID NO: 387428 - DNA, 2997 bp, Salmonella enterica
atgattcgtgctgcgttcattggaattgatcgttatagtgacatgcagatctctgatcttaatggcgctgtgcgggatgcaaccgcactctgggctgtattatctgattcattaccatctatttcttgttctttaattactaatgagaatgcaaccttagccgccattcaggattctctggatgcaacgttggggctggcggaagccgatgatgttgtactgattagctttgctggtcacggtactccagatcatcggcttgtggccgcagattcacgtgtagatgatattatcggcacaacactaagtatggctgatttagcagagcgctttaggcaaactcaggcccaaactgttcttatgctgctggactgttgctttagtggtggtgctcctgctcgagtgcttgatcttggtctttctcctcggtctgtcattatcccgctagctgatgtggcgggaaaaggccgagtattgtttgctgcctcagcatccgatcaaccggcactagaagaccataaaacacgccacggattgtttacaaaagctattttagactgtttgttaacagaagatgggccagttagtgttgtgggaatgattgataacgttgtgcgctctgttcgtgcggcagcagcaggttatggctatgagcaaacccctgtaatgtttggtcatgtagaaggtgagttttcactcccctcgtgtcaacgaggtgttaattattttgccgcattcccggaaattgcgccgataaaaacaacaggtagttttgcagaactggcaggttatggattaccaaacgaggttctgtccgcatggcaacatcgttacccaaatgggctcaatgaattacagataacagctataaatgagcataatgtgctgggtggcaattcgttgttgaccgtggctccgacaagtgcgggtaagacattcattggtgaaatagcaagtattaaagctattgctgaaggtcgaaaagctgtatttttgctgccatataaagcgcttgtaaacgagaagtttgaatattttactgaattatatcaagatcaacttcacctcagagttgctcgttgtagtggggattggcaagaccaggttgctgatgttatgagggggaaatatgatattgcttttttcacatatgaaaaatttctctcgcttacacttactgctccgcacattcttaatcaaataggacttgttgttcttgatgaggctcagtttattactgaatcaggtcgaggaataacggtagagttattgcttaccaatcttattattgctcgaaaaaatggtattgcgcctcagcttattacattgagcgcggtgattggtaatgtaaatgggtttgagcattggttaggatccgggttacttatgacggataaacgccctgttcctcttttggaaggtgttatagatcgtagcggtaattggaattacttggcccaaacaggtgaaatggtttcttctcagattctggatggccgcgagattaggcaacgaggaaaaacaccatcatctcaggatgtcattgtgccacttgtgcgtcatctcgttgaacaaggcgaaaaagttattgtttttcgcaatactcggggactggttagtggttgtgctcagtatctggctcgagaactagggttacctccagcaagtgaaattgtcgattctctccccgatggtgatccatcagcgatgtcaattagtttgagggaagcgttaagtggtggtgttgcatttcataatagtgaccttaatcgtgaagaacgacaggcgatagaacgtggtttctgccaaaccaatagtggtatacgagtgcttgttgcaacaagtaccgtggcggcgggtgttaatactccagcgtctactgtagttattgttgaaacaggatttcagggaggaggtaatgttactccttattctgttgctcaatataagaacatggccggtagggcaggtagattgggttttgaaacggaaggaaaagcgattgttctggctgaaaccatatttgagcggaaccgtttgtttagaacttatgttcaggggatacccgaagcaatcacatcttcctttgatgagcaaaatcctggtacatgggttattcgcctgcttgcacaaatcaaagagattcaaagaactgctgttattgacatgattgccaatacttacggcggataccttgctattttacgcgacccaagatggcgagatatgatgaatcagcgtcttgataatcttttggaaaggatgattggagatggtctcattgagcaagataatgatattttaagacttaccatgttagggcgtgcctgtggcgagtctccattgagtttggagtctgcgcttcgcttagtcgaggctattggtaatttcagctatgatgaagcgactcctgaagcactgcttgtccttattgaaatgcttcaagagcgtgatgaggattacactcctcagttaaaacatggtgagtcaaagtggcagcaagaagccgtgaatcgctttggttatcaaccagtatatttattacgaagaaatgttaatagcgatcgtatgtattatgcacggtgcaaacgagctttgattgtcaatgactggattgctggtattcctgttacggagattgaaaatatctattctgctaacctctattattcacgtgtaggccatggtgatattcgcgggtttgctgatggtagtcgatatttgttggaaagctcaatcaggattgcgtcaataattcttaacagatcttatgatgaagaaatggtatcttccttattaaagcgtcttgatttagggattcctgccggacttttaccaatgaccgaagtgggtttggggcttactcgtagtgagttattgaaattatggcaggctggtattacaacgcctgagggcatcattgcaggggcgtctgggctagaaaatattattgggaataaggcaaaaaaactgcttgacgctgcgatgaatatttaa

SEQ ID NO: 387429 - DNA, 225 bp, Salmonella enterica
atggaattcaaagttggtgatttagttcgattaaaatcaggcggaccgctgatgacggtagaagaagttggggaaagagcaatgataggaggcgaagccgtttggtgtgtatggtttgaaatggttggtaaaaatcaagttgttaagcgagaaaccttctctccttgtgtcttggagatatcttcaaaaccgggtgtaggtacgatgcgagtaacccgaggatag

SEQ ID NO: 387430 - DNA, 684 bp, Salmonella enterica
atgaacgcattaacaatttctctggtaactcttatgatccctggcgtcatcatggcgcttatctatgatacttacactcaacataagccatgggattcatttcgctatatattaatgtctgtcgttttcggtatatccacttatttggttatgcaagcaactatttcgtcatatcaattaataaccaatataactgataccaaagctatacaatggaaattactatcagtatggtctatcactgatggagaaaaaataacaattaagcctattgaaatactactcggtggtgtgttatcgataccattaggtctgttagccgtttatctttcaacaaaaagaactttccacgagttgcttttacgtagaggcatatctaataaatatggtgatgacaacgtatttatccgttctgttgagttaattcataatcgaggtaaaacgtgctatgtccttctacatgaaaatagtatgctcattcatggctcagtatttttgtacaatgaaaatgacaaaacacaagaaataggccttcagaaggtgaccatattgaattcagaaacaggtaaaatactttggatgactgagtttatctatttatcaaaagaatatggtaaaatgattatatttgaaaactttattgaggctcccgatgacaaagaatcaacaccagaaacagactga

SEQ ID NO: 387431 - DNA, 246 bp, Salmonella enterica
atgacaaagaatcaacaccagaaacagactgaacaactggcaattaacggtcgccaaatcgtagtgcaggatggatttcaaactacagcaatgatggaaggcgtggagagacgaggatacgcggtacaacctacacagggagagaatcagccccaaggatatggacgccaaacatcctccctccaggtgccacagagtgctttttcaccagccagcgggcctaaaattcctccaatgaaaaaataa

SEQ ID NO: 387432 - DNA, 378 bp, Salmonella enterica
atgaactataaggaaacacaccggatttattgtctggaaggcctgaatttgcgcaggaaacgtccccgcaggcatatcagtgcggcacaccgtcagcagcgtccggccccgacgtacatcgatcagtgctggagtatggatttcgtgtcggatagtctgtttaatgggcggcgcttccgggcgctgactgtagtggataactttagtcgggaatgcctggcgatccatgccggaaaatcattgaagggtgaggatgtggcccgcgtaatggaagcgctgcgggtgctggataagcgtctgccggtacgtattcagacagataacggcagcgagttatcccgaaaagcctggataaatgggcgtatgaacacggtgtga

SEQ ID NO: 387433 - DNA, 129 bp, Salmonella enterica
atgtatgactgtgcccgctggcgcgccagcaggcacgattgctacacaaatattacggagcgttatcaaaacttgatagtcggacagacgctgcgcctggcggcaaaattgatccagccactgttttga

SEQ ID NO: 387434 - DNA, 465 bp, Salmonella enterica
atgaccgacgtacaccagttttttaccctgctaagacggcacaacctgactcgccagcaggctttcgggctggttgccgacgatctggcctgtaaggtgccgaataacgcgctggcgcagatccttgacgcagcccttcatgcgggtaatgagattatggtgttcgtcggtaacagcggctgcgtgcaaatctttaccggcgcgattcaaaatgtcacgccactgaaaggctggctgaatatcttcaatcccacctttacgctccatgtgcgggaagagaacattgctgaaacttgggtcacgcgtaaaccaaccgccgatgggcacgtcaccagtctggaattgtttgctcacgacggcacacaaatcgcccagctttatgggcaacgtactgaaggggaaccggaacaagcccagtggcgacaacaaatcgacgctctgatgctaaaagggctggcggcatga

SEQ ID NO: 387435 - DNA, 477 bp, Salmonella enterica
gtgggggctgaaatgaaccgtataactacgggtgtaatagcctcattgttgattgtggtcgcggtactggcatgggcaacagaccattaccacagtaacgcggtacgattccggcagcagcgggacaccgttactcataagttggcgctggcgaacgcgacaattaccgatatgcaaacgcgccagcgtgacgttgctgtcctcgatgcgaaatacacacaggagttagctgatgcgaaagctgagaatgatgctttgcagcgccgccttgctgctggtggccgggtgcgcgtcaaaggacgctgtacagtgcccgccagtaccacatccgccagccccggcagcgtgggcgatgctgccaccgtcgaactctctccagttgctggacaaagcgttctcgatatccgcgccggagtcatcagcgaccaggaaaaactgaagtatttgcaggaatacattcgggcacagtgcagataa

SEQ ID NO: 387436 - DNA, 216 bp, Salmonella enterica
atggacagaacgacaacaggcgcatcgtacggcgtatctgctgccacgatgatttactcatttcttgactcattcacacatgacgaatgggcggccataggaatcatgggcggcttattttttggtgcactgacgtggataaccaatgtgtatttccagcggcagcgtaaccgtattcttgagcaacagaaaaatggcattaaagacgaaagttaa

SEQ ID NO: 387437 - DNA, 654 bp, Salmonella enterica
gtgacaccgcagacaatcacctgggtaagaaataacgtgatattcgctctgaactgcggggagaagccgcagcggggtcaactggcggcatttgagggattttcccgcgcaaccactaaacgctatggccgtcaccgggaacgtacgctgaaaataggcaaccgctggtactgtcgggacactgatccggtttacgtgctggagaccgccaggaacaaaaaacagcgggagatgataacgccggaagcgtacagaacagcatcatggcgtcgtgccataaacagcctggctgattacgaaagggcatggatactttactgctacggtgcgcggcacacatacatgaaccatatgctgatttgcgagtacctgtggctacagatgcatgaccggctcagggcaagccggaagcgcattactgacgacatgacgggaaacctgatcaccctggtgggtataatgacgtggaacgcggggcaactgattagtgagcgagaaggtgctcaggtatttgcatcaacatacgccgctcaggaaataggtgcggacaaaaaaagttggtggaaaagttataaaaatcactgggagttcatgtacaccaaatgtacagaactggatcatgatgccctggaagggttgatgcaaaaaatttaa

SEQ ID NO: 387438 - DNA, 621 bp, Salmonella enterica
atgacgattctcacgtacaaaaaccgcttgctgccatccgcgctcatgggttacatttcccctgcccctcataaaacgggggccgggattagtcccccgctggatacaaaggcgcacaaccgcgcgagcggtttttttacgtgcgaagcatcgtcacatctttttcgcattatggtggggcgtgcagggccgacttcggtcgggccggtttcctttgttcccggtaggactaaccctgtacgtctcaccaccccgagcttagtccctttgggcggtgagttaacttcatcaccgaacaaaggttactcatcatggccaaccgcaaaccacgccatacccacactgacgctcagcgtattcatactcataccgaaatcgatcgccgcctgttccgtgccgaacgtctggttcgctgcatgtattttgaggccatcagcgacagcagtcctgtggctgaattgtgcatgtcgtctgttctcagctatctggctgacgacctgcgggatctgcggaagctcacggaaaaatcccgacagtaaccctcctgaaagcctgaaacaaacccaacactccgcctgctggtggagtgtttgcctgcatgacattcaggaggcgctatga

SEQ ID NO: 387439 - DNA, 180 bp, Salmonella enterica
atgtacaaaataaccgccatcgtcaaaaagccgggtaattccccgacaaaccgggttcgtttttctgacaaaaaaatgaataaagccgagtgtgaaaaaatgctgtccggcagaactgaagccggaaaatcacgcgaagagaaagtcacgctggaggattttaaatgtattaaggaataa

SEQ ID NO: 387440 - DNA, 843 bp, Salmonella enterica
atgagctttgctatcaaacatccggccatccgttatcacggcggtaaattccggctggcatcctggattattagccgttttccggcgcaccgctgctatgtggagccgttcggcggtggcgcgtcggtgttactgaaaaaagagccatcagaggcggaagtctataacgaccttgatggcgacgtggtaaatctgttccgcgtgctgcgtaaccctgcaaccagtcaagaacttatcgctgcgtgcgcccttacgccgtattcacgcgaggaatttgcccatgcttatggacatagcgaagacccggtagaacgggcccgccgtctggttgttcgggcaacgatgggcttcggcagcgcaggggccacaaagggcaaaactggtttccgcctcgatacccggcgtaacagcgcgactgctcaggctatctgggcacgtcagcctgataacctggcggcggtggccagccgttttactggggtacttgttgagaaccgcgacgctgtgacatgcatgaaagaccacgatacaccttcaacgctgcattttgttgatccgccttacatacacgatacgcgtgtcgaagtagcaaaaaacagcgcctaccgcttcgaaatgactgatgcggaacacatcaccctgctggattgcctcagacagttaagcggcatggttattgtctgtggctacgacagcaaactttataacgatgctttatcagactggaaatgtattacaagaaccacgtctgctaatggccgggcgggttcagtacagcgaacagaatgcctgtggattaatccggcagcacaggaaaaggagaccgggccatgtacaaaataa

SEQ ID NO: 387441 - DNA, 234 bp, Salmonella enterica
gtgaacaatccattttttattaaatgcctcaaagattccgaaggttggtggactgaaggtgaagagtacccggctaatgtcgttgctggcggctttattcaggttggcgatgatgacgatccgaatggcgaaggctggagtgcggcgccgatggaatatcgggaggatggttcgatcctgtatcaggtcggtggtctggatggtgaagtcatttttgaggaggcaggacaatga

SEQ ID NO: 387442 - DNA, 2265 bp, Salmonella enterica
atgaaaaatatcactcaactggtttttaaggcgaaaaaaggcgcaatagcgaaaggcgtcccaccggagggaaccgcctggtttgataacgacgattcggacgaggttgatgctttatcgacgctggcgataaaggccgcaggattcaaaagaagcgacttttttaaacccgtccgcgtggatcatctggttgttgatgatatgccggaggaaggagtttttgatactgccttctgtgagcgttacaaactggctgaagacggtaaaagctggctgctgccagttgctcagactgagtcaactgattccggaacgggagaaaatagcgacagcatcagtgaggggcatacaaatgaaaacgctaccgacaacaccgattccggcgataccgccattgccaccagtgccaccagtgccgacacaggagccgctaccgcagccgctgattccgacagtgccaccgataccgctggatctgccaacacagcagccgacaccagtgatgaagtagcgggtagtgaaatagccactgatatagcccactcctgcgatgtgaacgttagcggcgaaccaatgactgaagttgcgaagggcatggactggccgatgaaggatttacccctgccggtgcgttggatggcgcagaaaggtatggacagcaaggttcttttcctcaagccagcagagcgggaaagactgacggaaataatggaagcggacgagaataacaaccagcatctgaccaacattaaggcgataaccacagaagagacggcacctgatattaacaaactgacgacgtaccatcttcatcgtctggtcactgcgtttgacaaagtatctgaaaaagttgagcgcatggggccattcatggctaaacggtttgtccgagcgtggcttgatacggaatacatcgatcaggggattctggttaacgagtggtgtgcaggcagacacgtatcccgtattgagaaaccgacagcagccagtgtcagcgaagtgccggtaactgcgcgtccgcaccgtagtgaaaaaccgacacaccggacgattaactatgagcttgcctgtggtttctatgaagatctggatctgaataatctgcgtcctgcaatggattttgcaaaacgtatcatcgccgaagaccgcgaagactggaagcgaatgtcgatgacagttggcatcattcccgacatcaaaggctatgaccgacagaccattattgacctggtacgcaaagcccccgcagccgttcacagtggtagcccggagcttcgccgcacctggtgtgaaagtttcctggcggttcatggtgtacgcgatcctgactggtacgaacatacgcccgacaacgcccccacaacccatgaagaaaactccgcccggatccgcaaggcgggcaaatcccttcgggatattaaagaagggagattcaatgatgtcgaagaaaaaccgcaaccagcagccgtactggcagatgaaccggcagcgtctgaaacagtggaacaggacacaactgaacatcatccggacccgcagccgctggagaatgagccacctgtaagccagacagaagcaggctatcagaaaattcgggcagaactgcacgaggtacgtaaaaacattccacctaaaaacccggttgacgttggtaaacaactggcagccgcgcgcggtgaatatgtggaaggcatcagcgacccgaacgacccgaagtgggttcataacgattacagcgccagcgcctcaaataagggcgaaaaaacggaaaatgaggatgccgacgatgtaaaccagaatgacgatactgtcatccagaacaccgattctgtaaaccattctgaaccatccgctggccagatcgaaccagaagtaccggaaaccgagccaaaaagcctacaatccgaaccagtaaccaaagttgccgatggtgtttttgatgtatcagcatttttcgcggatacctcaaatcagggtgaaaaaacagaagtcacaccgccgaataatgatgtccgttcgcatgaaggcgcagaagaaaaagtgacggatgcacctgcgacaacggaatcattactgcacgaaatagtacgtttgcagtcaataaataaccagttactggaagcctgcgcagcttatcaggaacgggcagaaacccgacacgaaaggtttctggaggcgcttttctgcgggataacgcgctttacatcctgctggttggagggtgagagagaagtgaaatttgaagaggggacgggtgattcatga

SEQ ID NO: 387443 - DNA, 225 bp, Salmonella enterica
atgtggagaaaagtacttcaggaggcgagcgccgccagccagaaaccggcaacaccggagcagcggctgattatgtatgcggatttaaggggtgttttaactaaagctgtagccaatacccgacacaaccagaaagcagaagccatggcgtacatatggagctggcttgaagcgggtgaaaggcaggcgatgagtgaaataaaacagcgggagaggagcaaatga

SEQ ID NO: 387444 - DNA, 573 bp, Salmonella enterica
atgagcaacgtgatgatagatattgaaacaacaggaaccggacatcactcagctattatatcttatggtgtggcagtatttgatctgttcaccgggaaaattatcgctgaagaatatatcagggcagactggaaagaggactgcatgttctatggcggaaaaatagatccgctcaccgttgagtggtggatgaaacaatcatcagaagcgcgtgctgagttaattacccatgaggagatgttaccacctgatgaagcactgatgcgcctctttgaatttatccggaaacactgcgatgacggtccggtttatgtgtgggccaaatcgccgtcgtttgatttatcccttatcaaagatgccgccgaacgctgcggcattccagctgaaataatcccgtggaagttctggaatgaacgcgatgtccggaccattgaggagcttgcctctcagttcaatttcccgctgccttatggaaaagcagatgtaacccatcacgcccttgaggacgtgcgtggacaaatcagaaacgtcagcgcagtgatcggggcaatgcacgaggcggtggaggcgtga

SEQ ID NO: 387445 - DNA, 153 bp, Salmonella enterica
atggttcttcgggtaaatgatttttgggtcttattttttggtgacagcatggcattttttaattgcaaagatgcggctgttaatggtctgtcccgttacgtggacagaataattaaggagcaaaaaaatgagcaacgtgatgatagatattga

SEQ ID NO: 387446 - DNA, 993 bp, Salmonella enterica
atgatgttcagttacagacaacaaaaaatgtgcttgattaaaatgctgaccgggtgttatttttctcctgctgccacactgctggcagtcgggtgtggaagcccgttgcagttaccagcgacaataggcgctgtaagcgctttttttgttgtcgcaaccattttcgccacagtgcgccattttatggcgtggtgtatccatacccggtgtgcggggcctcagactgacgcacacagcaggatgcatcacgccaccatgtcaatggtagctctggcggggccgacttcggtcgggccggtttctggtaacgccggtacttccacccccgtcagggctatcgccagtaagtgtggaagcttcagcgatagcatgaattcatgttaccagaggctgccatcatggctacgagcccaaccaaaaaacacccaaaatccgcgatccgccaacttagttacgactgtcgccgtaagcgtcggtgttcgcgtaaaaaacgcagtaaaaaatcattgcgccgctctcgtattacgggatatagtcagtccgttgctgcaaattcagcaaccaggattggcgtcctgcatactgaaccggtgccaaaacacgcaccaaaagcgtgttttttgttgcctgatgtccctcaatcaatggtgggtcgggcaggggcttcttcggaagcgccgggtttctccgattcagccggttacgccaaccctgtccgatctgccaccagtgaaattggcgtttccggtggtagtgaaaaaactactgaaacggaggatgccatcatggctacgaccccaaccaaaaaacacccaaaatccgcgatccgccacaaggacgccattcctcaactcagccacgactgtcggcgcaggctgggccgtgcaaaaatactttcatttcatttgtacatcgaaacactggatggcagtcgtcatcttccatacattccttatattttttcctgcatccacgatgatattaaggatgtag

SEQ ID NO: 387447 - DNA, 201 bp, Salmonella enterica
atgagcgcggcgttgattggttttgtactgctggtaaatccctgtggccatgatgtctgtgagtgggggccggtaacggagcagatatatcagcaggagcaggaatgccaggagattatgctggagttacagcgcagtcatccggaatacgatttttcatgcggtaaggtctatcgtcaccaggaagagggaacgcaatga

SEQ ID NO: 387448 - DNA, 195 bp, Salmonella enterica
atgcacaaagacgacctgaagagctttcgtaaaaaaattagagaagtctttcataaggtgagaattatggacgatcagcttaacgaaggaagttaccagaaactggaaggcgagatgcgaatttgcgccacaaaacttaccgcaatagccgatgagctgaacgccatcatagaacagatggacagtaacgtatga

SEQ ID NO: 387449 - DNA, 153 bp, Salmonella enterica
atgtctgagcaacgacgtaatgggcgcagcaacaatccgctttataaggctgatattcctgatgtctgggagcatttgccggaaaagaacattcgtccaacgccaatgccaccgccaccacctcctccatcaaaggagcagggtaaaaactga

SEQ ID NO: 387450 - DNA, 447 bp, Salmonella enterica
atgagtcgagaagatattctggatagaatcctgtactgttactttcttgagcaactgttctctgttgccacaggaagactggacaaattattttctgttctaatacttattctcggctcatccgtcattttcaattttaaccctcttatatctggcattggtatcgttatcatctcctcaattcagaccacttatgaatttggtaaaaagtccggcaatgccgggcgcaaagccgctgaatatctgttactttacgatgatgcaaatgaacacaacgatacagaactaaaaaccaaattgcatgttcttgaaaaaaccgatgaaaatatctggtcttcactgaaagatattgcaattttaaaaacacaaataaaaatcggcattcctgccaaacaccagacaaagttatcacttcactcgcgtctgctacgcttaatttgcggttag

SEQ ID NO: 387451 - DNA, 141 bp, Salmonella enterica
atggagttcccgacggtcggagtcgggagtgtgcgccggacacaggtaagcatccggcagcaacaggtatatcactggcagtgtaaggagttaaacagaaaaaaagaacaggaacacaacacgaaagcgcactacgcataa

SEQ ID NO: 387452 - DNA, 240 bp, Salmonella enterica
atgtcttctgaagataatcacaccctaactcttgaagatcgcattaacgcaatggatcttgtaatacgtcatatgtttgaagtaatgacacccacaaaaatccaaaaattctctaccataatcaacttaacgctaaataaattacgtaaggataaaaatagcgacccagaaaaaaataaaaggacttggaaatggctcttaaacatatgggcgtatatattaattcctgatacaaactga

SEQ ID NO: 387453 - DNA, 285 bp, Salmonella enterica
atgttcagtataaaacgtaatggcgcaagcgtggagataactgaaatcccctcaagcattccgttcagtgtctttaaaaatattgccgatgaaaccggagcaacagaaacgctggtagcttataccaaagataaagattgctacggggtagttattcgtcatgacagtgtaaatatggctggcactgttgcatggctggcaatagagtcagaacaagaatatgagcaagatatgaaaaaggccgcagacatagcgacctgtttttcagtttgtatcaggaattaa

SEQ ID NO: 387454 - DNA, 501 bp, Salmonella enterica
atgcagaacactattgcagaggaagtgttgtctgatgacgctcaggaagacagcgaggtaatcagtaatgaaggaatttcgaattctgccatgctgaatctgttgcttgacatgctggagaagcaatcagaattaatgctggatgggcctattgccgaggttgcatttctggaaaaagcagcaggctatattggattgacaaggaaagcactggaaacggcattgcgtcgcggcgaaatgccgggtcacaaaaaaagaaaaaatccggaagatgaaagctcaggaggtcggtggatttttaacgtcaaagcctggaataaactggccgatgaactaccggaacttgagccgccagaatggcatcactggaaagattactggacgtatgaccggagaagtagaaagtttcagcaggtaaaaaaagaggactgtttaaaggttgatgggcgtcgtgtttataagccacgaaaatcaaaactggaacaggcaagaaatacttaa

SEQ ID NO: 387455 - DNA, 342 bp, Salmonella enterica
atgactatgtcgtcaatagactattcaaaaaaattacgtcagataagagaggccgaaggactcacacaaaagcagtttgctgagttaacaggtttggcagttagcaccgtcagaagctacgagggggttggtcaaacagccagagcggccatcgtggaaaaagtcattcaggtggatcgatttgaaaaatatatgttttggctcttgaaagataaaatactcccctcagccggacaaatcgctccggctctctctcttgatggatctattcaatcggaggaaaatcaggtttcaatcgaaaccacgcaaaaatcaccccgatcacgccgcaatgctggttaa

SEQ ID NO: 387456 - DNA, 165 bp, Salmonella enterica
atgccgcctttaaaaaaatttgtgctgcccctgattttggggatgatagtagccacagcgtcgacacccgcaatggcgctggtttgtcttgcaagtcacccagctaaagagtgcgctgaagcctgtggtgtcgttatgtggtttatgttcccgatatgtctttaa

SEQ ID NO: 387457 - DNA, 174 bp, Salmonella enterica
atgctgtctgactcagagctgaaaccgtccgggctggtcggtaataccgatgcagagcgtattatcggagcaagggcgatggagagtgcgaaaaaggcatttctggatggcctgcgccctcttgtggaggagatgctggggagctatctgcaagttcagtggcgtcttacctga

SEQ ID NO: 387458 - DNA, 1287 bp, Salmonella enterica
atgtctcacgttgtcgcatattatatattgacagcgcacacaaaacaggacaacttaccggataacattaaacgtctaatggtgttgtccggtatgcctctcacagatacgaaagtaaaaaatgccaaaccacaggataagccttactcattacaggatggtcaggggctttatctggaagtcagaccaacgggggccaagttctggcgttacagttactggctgacgccaacaaaagatggtcgttataccattggtcagtatcccgctatttctcttgctgaggctaggaaagaaagggaatgggcaagggaacaggtgaagagaggcctcagccctacagacgtaaggcgttatgagaagcaacaaaatattgctgaagcatctaataccttcaggctggtggctgaggagtggatagaaaagaaacgccccacctggacagaaggaacatgcactcaggtagaaaacttcctttccattaattgctatggtgcatttggcgataagccagtccgtgaaattacagcacatgagattcttgcggtgttgaagtctatggagaaacggggatcgacttcttcagctttgaaagtaagacaatggtgctctgctattttctgctacgctgtctctactcttcgtgctgattctgatccggccgcggctctcaaaggggctattattacccctaaaactcaaaactccagatgcctgagtcgtgaagagttaagccagtattttggtgcgctatctgagtaccgcggacatccgcaaacaagacttgttcttactcttttaccattcacatttgtcaggcagggagagctaagaaatggggtatggagtgaggtagattttgatgaacgcttgtggattattcctgagcacagaatgaagatgaagcgttctcattcagtgcctttaaccagcacgacgataaagctaatgaagcaactgaaagctgtttgtggtgataatccgttaatggctcctggcataagtaacccacgcgtaccattgggaaacactaccattaaccgggcaatagaataccttgggtttccgtccagatttataaccagtcacgactttcgcgccactgcttcaacaactttgtatgagatgggataccggcgcgagattatagagaagcaactggcccatgctgaaagcaaccgggttgttgctgcctataaccacgccgaatatttgcaggagcgaagggaaatgatgcaggtgtatgatgactggctttgtggcttcattcctgcgaacgcgatttaa

SEQ ID NO: 387459 - DNA, 225 bp, Salmonella enterica
atgaaaatcgaataccaggactacggcgctgtagcaaacatcgttatcaccagcactgtgtttgagttccggaaacataatcgtgtggttgatgcagccctgatctgcacgccaggcatcgttgcaagccgcaatggcgtgtttttcatgaaatcggttttgtccggtaaatcccgcgatatgttgcgggccaataaaactgttcagcgggaggcgggacgatga

SEQ ID NO: 387460 - DNA, 126 bp, Salmonella enterica
atgaaaaaggtatctgaactggtgatgttcactctgtttttctccagcctttcggggttgggatttgcagcgtgcgtctgctttttcttcggcattgccagattactggcgaggactctggcatga

SEQ ID NO: 387461 - DNA, 585 bp, Salmonella enterica
atgatcgtccagtcaaaactcattcgcgctgctctggtatgtgctgctaaaaacgatgtccgttattacctgaacggtcttcacattaccccgaagcatattgaggccaccaatggtcatgtagcactacgtatggagcacggcatcagaacgaagaaaaacatcatcgttcagttcgaaggaccggttccggcgaaagccgaaactaccgaactggtattcaacaaagaagcgtttgctattcaccgggatgcattcaatctccgcatttcaatcacgggtatcaaactggttgacggactttttccggatatggagcgagtgatcccgaaaaaagtggatttcagcatcaatccggttatccaggcgaaatatctcagttatccggagaagatgtttggtcgcgagcggaaatttattcccgtgcaactgcagccgtccggcgaacatggcgcggtacgttttcagttcgatccggttattgacacgacttacggcaatcctgaattcgttgtgatgccctgccgtgataatgctttcaaaatgattgatgagttcaaagtgactgaggggcatcagggatga

SEQ ID NO: 387462 - DNA, 234 bp, Salmonella enterica
atgtcctcacaacaaacaattatgtacggaacgcagatcccccccccagtcctcaacgtggatctacatgtgcttccagatttcaccgggcgcgtggttctttatatcgaaaacgggcgtgttatatgcgatcggcaacttctggatgatgaacacgtttgttctctggactcttttatcgaaatagctcgtgaagcaggaatccgttttgaggagatatcaaatgttggataa

SEQ ID NO: 387463 - DNA, 357 bp, Salmonella enterica
gtgaaaaacaatactattgaaatttaccgtcgccgaattgcaattgcggcgttaaaccgagtgaaacgcaagacaggcgcttatcgtcttaccgtttcaatgccggatggcgatatccagtttattgatattgatgaagcgtcaatgctgaaatttttacagagttttgaaaaacaagcgcgaaatgaatttgcagcagaggcagaaacgtttattcgccagacgtatattaaaagtgtcgatatcaatggacataccgaatatctgaccgaaacagggaagatgattgttgacgaaatttttgcggaattaattaaatacgcaaaagagaaatatgtgtgcggaggaattaactga

SEQ ID NO: 387464 - DNA, 210 bp, Salmonella enterica
atgtggaacccggaagaaaatgacaatattgaagacgcggcgatctccgccagaagtcttaatgaactactggatctaatgtacatcagctttaaaacaatgagccctctccagactgaaacgttgctgggtctggcactaaatatctcatcagatatttctatctggatagcggcagaggagaagagacgtgaaaaacaatactattga

SEQ ID NO: 387465 - DNA, 579 bp, Salmonella enterica
atgcgtaaaatactaccagtgacgtcttacgccgtggtacgcgagttccggctgttcaatattcagcaatgtgaaggactgccggaagccttctcacagcctgtcgtgatggtcgatgatcccatcgccgctgccgagcaggttgcccggcaaagcgcggtgacgatcactcaccgacgccagaaccgggcgtattattcaccgggacgcgactgcatcatcatgccgcatcctgagcagttcgcttcgcgtgaggattactacggcacactactgcatgaactgacgcacgctaccggacatgcttcgcgactaaatcgggacggcattaccgccggaaaccatacctttggcgatccgacgtacagtttcgaagagctcgttgccgaaatgggatccgccttcctgtgcgctcatgtcggcattcaggcgaagctacagcatgacagctacatcgcatcgtggatgaaggtattgcagcaggacaaaaaagcgattttccgcgccagcgggttagcgcgtaatgcctgcgaatatctgcttgaacgggcgcagcagccgttagcgctgagcgcataa

SEQ ID NO: 387466 - DNA, 1470 bp, Salmonella enterica
atgcagcgtcttttaggtctagatgtcgtcactcgtctcaaaaatgacttaaatatttatctgaaaaatgacgagcgtcgaaagcttagcgccaaagttcaagggcagattgaggaactagagaataaaaagaaaatacttatccagttggcagccgagaaaagaaataaaacggttgaatatttaaatggtattgccgccaatataaatgacttgcgtaaatatgaagcgttacttatttctctgggcaaaaattttgcagattcgaaagtaagtgagcaggctaagttaaaagtattagaggctcaggaatctcaacttaaaaaacaattaattaattctttggatgggtatttcccattatctttggctccaaatatcttcaaaaatcttttcgaccagatcgagttggagaagaaaattattcaggcgaatatttttcgtgctgggcttgaggactttttagaaaaattaaaaggtgaattagcggtccgttcatctacaactttaaaaatagctacagagactatccaagatcagttagatgattttatttctcagcaaccttcaggtgaagttattctagatgtctcagagagagaggcaaatattcttcatcatgctgtctattctatagcttcccgccaaaaggaagaaaaaaataatttatgcttagaaatcaaaactatagaagatgctatattgggagctaaagagaatatttccagagtgccagaggaagaacaactcagcagtacctttaatacaataagagaatttgacgatgctattcgagatgccgtcagtaaatttcaaagggttaactcagaggcaaaagaggctttaaatgaagcccttaactgtgttcgtgagcagcagaagtttcatgatatgataaaaaacaaagtgaccttcgataatgcaagtgaatatgctctaacgatattgccacttcttaccaaatatgcgcataagttgtcggagaaacgcatcgctgaggttgaaaaagagttttctaggatttataagcggctggctcgtaaggatgagcttaaattacgagcaaaaataaatgctaaaacatttaatgtcgacttacaggatgagaacggtaaattaattgaccgtaatttattgtcggcaggtgagaaacagatctatgccgtaacgatgttggaggcattaggccatgtatcaggaaaattattacctgtaattattgatactccattagggcgattagattcccatcatagggataaacttgttgaaaattatattcctgacgcgagtcatcaggttattattctttcaaccgatactgagattgatgaaaaatattatcgttactatttacgtgattgcatttccaaatcttatgagatttgttattcatcattaagtcaatcatcagtgataaaacatggttacttttggaagaagaataatgaaagtgaggtaagtatttaa

SEQ ID NO: 387467 - DNA, 348 bp, Salmonella enterica
atgttaccaaatcgtctgcaagtaaatagtcgggttgaagagcaattaaaacgcttgaaaagttatactggtttggctcctaatatttcatcgcgtatagcattcttccgttctgttgagagtggttatcgttttgatgggggggattataaaacagatggaaaaatgaatatggataaagctacctggctgggagatactggtgtagcggtcgaattagtattgaaaatgttgtatccccaactggagggacgagtcttaatgcaggcttgggctgcgcatattgaagatggcatagcttcattgagaaatcataaagatataagagaattttctgaagcaatatag

SEQ ID NO: 387468 - DNA, 159 bp, Salmonella enterica
atgcgggtacaccggagctttcccgatgcagatgtgagggtgaaactgatgcaggcgagtagcctgaatagcaatgccagcaaaagcgattgggaaaagctgaaccgtctactggaggacatgtttgaagagactgatatgtggctggtttcagattaa

SEQ ID NO: 387469 - DNA, 135 bp, Salmonella enterica
atgatattagtatattataccattttacatctctatgatattactaagcaaatcagtctgttatttacagacgtcgttaaaattcagctcacttcattcacacaatcgtccttcggcataattccaggcatctga

SEQ ID NO: 387470 - DNA, 180 bp, Salmonella enterica
atgaaagaaatagcatatcaggaaatgtcggttgtcagtggagcaggctctgatgatgtgcttgtgcctttaccgggcacagaggcaccgactacgggtgatgctccgtttttacctggcaagcctggatataaagagaatgatatacctgggcacgcggtaggtgagattattaaataa

SEQ ID NO: 387471 - DNA, 531 bp, Salmonella enterica
atgctgatgttacatcggggcgaccgtgtcagcgacgttgccagaacgctctgctgtgcccgttcctccgtcggacgctggattaactggttcacgctgtcgggtgttgcaggactgaaatcattacctgccggacgaacccgtcgctggccttttgagcatatctgcacgttattacgtgagctggtaaaacatactcacggcgattttggctaccagcgctcacgctggagtacagaacgtctggcaataaaaatcaatgagataaccggctgccagttacatgccggaaccgttcgccgcgggttgccgtctgtctacacaaccaacgccatcgggtcgctgaacagcgtcatcaggcatgccattaaaaaacataaggtgttcccgacggacgactcagtgaaaaaggtggtgtggctggcaatccaggctgcctcacagaaatggacgatgccgctaagggactggcgtatggcaatgagccgctttattatcgagtttggtaaccgccctgacggtcacttctga

SEQ ID NO: 387472 - DNA, 513 bp, Salmonella enterica
atgacttatagcagtaatggacgtgatggacatctttccgcaggaggagattatgacgggcgtagttggctggcgcagggccgcgtcggcgcacaggttaacgcgacacgtcatacctggctgcggccttatttgaccatgggttatgccaacacccataccgatagttatagcgatggctatagtgatgttagcagcagtaaacaagacggcggctttgccggggcgggtatgcaggcaggcgtaagctacccgttacataacgtagaagtgaaaccgtatgttgaacgggcttacgttggacaatttggcgcgaagacagatttccataccgacaattatcgttttgccggtcaaaatcttaacgagggtaacgccggactgggactgggaatgggaatgggaatgaagttttcagaaaagtggagcgcaaatacccgtaccaatacggaatttggtcacgatgttgacaacgaagtaaacgcctatattggcgtaaaatatcagttttga

SEQ ID NO: 387473 - DNA, 1014 bp, Salmonella enterica
atgggggagtttaagccacgaacatttgatgaagcatgtgttcgctggcttaacgaaaagcagcacaagaaaagcctggacgatgataaaagccggatcggattctggaggatgcacttcaaaggaatggacctgtcagcaattacggaggacaggatcttgtcggcagtaagttcgatggtgaatcgcaagcatcgaatgaactgggaggctaaacgtgacagcctgctgcgaagaggcaaaccggttcctgaatttaaggataaaccagcgtcgctggcaacgaaggcgacgcaccttgcctttatccgagcactgttacgatgcgcggccaacgaatggcgatggatagccaaagcgccgaacatcaaatgtccggtgccgaaaaacaagcgtattcgctggttaaccaaagaggaagcggcgaacctgatccgggagcttcccgagcatatgaagccagtggttatttttgcactggcgacggggctgcgcaggtctaacataacagatctggagtggtcacaaattgatatgcagaggaaggtcgcgtggattcaccccgaggatgctaaagcaggaagggcgattggggtcgccctgaacgaatcggcctgtaaggtgttgcgggatcagctggggaaacataaccggtgggtctttgttcacactgaatcatccgttcgcccggatggaacgagaacaaagacggtgcgtaaaatgcggtctgatgctaacacggcatggcgcgcagcgttaaggcgggcgggaatagaaaatttccgcttccatgacctgaggcatacctgggcgagctggcttgtacagtccggcgtgccactcagtgcgctacaggaaatgggcggctgggaaagtatcgagatggtgcagcgttatgcacatctggcaccgaaccacctgacgcaacacgccatgcaaatcgactcattcctagcggggaatggcacaaatatggcacaagacactttttctgaactggtgaacatcgcgtga

SEQ ID NO: 387474 - DNA, 624 bp, Salmonella enterica
atgatctggcatgacgtggaacaaaacagtgaagagtgggaactgctgcgactgggaaaggccactgcgtctaattttggtctgattatggcaaatgaagggggggcatttggcgagcctgcgaagcgctatgcattgcagattgcactggagcagattaaagggtgcaaatctgaactcacctattccaatgagcatatggagcgtggtcatgaacaggagccaatagcgcgaatgctgtatgaggagaggtatttcattgatgtcgataatggcggcttcttcgatcacgacacatacggtgacagcccggatggactcgtcggaaccgatggcttgctggaaattaaatccgtagtggcttcaactcactacgccacaatggttcgcggcaagttcgaccctgcttacaaatggcaactgataggacaccttgactgctcaggccgtgactgggtggattttgtaagttattgctctgacttcccggcggaaaaacaactcattgtttaccggctgaatgccacagatttccctggagagatcgcaagattacgcgaacgccgcgatgcgtttatcgcactggtatctgatgttaaacgcaaaattctggagtctgcatga

SEQ ID NO: 387475 - DNA, 504 bp, Salmonella enterica
atgagcgaacagaagacacattaccgcaaggctttcgattccccttatctcagcagcgccgacatcgtggagccaacaattctgactatcgcgcgcgtcgcactggaaagcgacaagacaaaaaaaacaaaagatgttttcaacacggcttacttcgaagagcgagaattacgccccggtgaaaagctgaagccgatgatactcaatgccactaacagtaaaacgcttaaaggaattaccggttcaccattccttgaagactgggggggagtaaaggttactgtttttgttgataaaaatgtgcgttttggaaaggagtctgttgaaggtctgcgcatcagtccggcgcgggtaattaagccatccctgacgccagaaaaaacacaggcatggagtaacgcaaaggcagcttaccgacgcgacggaaacctggacgcagttaaatcccgtatggatatatctcctgccttcgagcaacagcttattgcggagtgtacacaatga

SEQ ID NO: 387476 - DNA, 228 bp, Salmonella enterica
atgaacgctgatttaaaatctttcatttgctcaattatgagccaaacagaattggcaaaacgccttggaacaactccgcagtctgtaagcctttggttgaatagtgaagcaccagctcatcgtgttattccgatttgtgaggcacttaactggaaagtcactccacaccaaatgcgaaaggatatttacccaaaccccaccgacgggttgccggaccaacaggattaa

SEQ ID NO: 387477 - DNA, 147 bp, Salmonella enterica
atgacaaaaaatccacgctattaccataccgatgtacataaaaacataacccgcgaccgcttcatccgctcggttaatccgattgtggcagagaagatgcgcgccatcctggaagaactgaagcgcaaggagagtgtccgtgggtaa

SEQ ID NO: 387478 - DNA, 900 bp, Salmonella enterica
gtgggtaacgtatccaatttagccgaagccagagaggccagaaggctccagaaaccgcgcacgaatgacggtaaggggtttgccttgctgcaccgtaaaattatggatttgccgttctacaaggacgctgaggcatctcacttatgggttcacttgctcctgcgcgctaatcacgaacaggaactggtatcgactgatgtcggcgatgtgatttgcgaacgcggcgagttcgtcaccggacgaaacactctggcaatggaaactggtttaaccgctgatcgcgttaaatcactgctccgtaaattccagaatctgggcatgatcaccaccaaatctaacaaccgttttactgtactaaaagtggtcaaatatgacgaatatcagtcatttttttgtccagccgatgtccagccggtgtccagcccaaacacagcaatatcaatgcctgtagaggatgagtgtccagccgatgtccagccggtgtccacagataataatatattaaataacttactacctaacggtagtaagtatgtcgcaaatgaccagcaaaccgctgaagagaaaaagcctcgtttgtcatgcgatgaagtatggcaatgcctgaaagacgaactgcctgaagcccgtggatggagatgcctgactgatgagcgccgaaatctgatccgcactttctggggtaaggccaacaaaattgcccgcaacctggatggcaagccgatggacatggaagggttcagaagttatctgcgctacatcgcgcagaactgccgctggatgctggaagaccgccctgatcagaagtcaggaaagacatggcgccgcatgaagtttgacagcttcctgactgcaaaactctacatcgaagttcgtgaaggggatcgtgatgaccgatga

SEQ ID NO: 387479 - DNA, 1431 bp, Salmonella enterica
atgaccgatgaattcatgaccatgcctcacaacattgaggcggagcagagcgtaataggtggtctgatgctggacgacgacagcagcgagagagcccggaaggttcttgcgatgctcaagccagaatcgttctacagccgacctcaccaggtgatcttcgccgaaatgcgtcagatgtaccgggacaacaagcctgtcgacggactgacattgttcgacgcgctggaaggcaagggacttgcagagcaggtggggggctttgcttacctggcggagatcgccaagaacacacccagcgcggcaaacatcgtggcatacgccaccacagtccgtgaagccgcaatggagcgctacgctatcaatcgcatgactgaagcgacggaattgctctattcccgcaacggaatgactgcaacgcagaagtacgaagctattcaggcgattttcacgcaactgaatgaccatgcaaaaaccggatcacgtcgcggccttcgctcatttggtgaggtcatggaagactgggttagcgacattgagaagcgatttgacccatcaggcgaacagcgaggaatgagtacggggattccgtctctcgaccgactgttagcacctaaaggtctggtgaaaggctccctgtttgtgattggcgcaagaccaaagatgggaaagacaaccctgtacgggcagatggcgatcaactgcgcggtgtgtgagaaaaagccagcgttgatgttcagtctggaaatgccaggcgaccaggttctcgaaaaactggtaggccagaagtccggtatcaacccaggcatattttacatgcccgcaacggatgacgccgacggccagtaccagggcgactacgacagcgacttcaggaaggcgatcgccacagccgggagactgagtgaaattgacatgctgtacatcgacgatacccccggcctgtctctggcacacatcgttagcgaaagtcgacgaatcaaacgcgagaagggctgcgtaggcatgattctggttgactacctgacgctgatgaccgccgaaaaagccgaccgtaatgacctggcctacgggatgatcaccaaggggctgaagaacctcgccaaagagcttggctgcgtcgtcgtgctgctgacgcagcttaaccgaaaacttgaagagcggggaaataagcgtccgttaccgagcgactcccgcgataccggtcagattgagcaggactgcgattactgggttggcattcatcgggaaggcgttttcgatgacagtgtaccgcctggcgagacagagctacttctcaggctaaaccggcatggcaataccggtacggtttattgcaatcagcgtaacggggcaatttacgacactaaccagcaaaccgccgccgcagaacgccgcggacgcgagcagcagaaaaaaaaggggggcttctga

SEQ ID NO: 387480 - DNA, 240 bp, Salmonella enterica
atgggtaaagtaactttcgttgttgattttgaggatggcgaagagccgatggtgtcagtggcaacagaaattcttggggggagactttcttccgttctgtggggtgactatcgagatgattttttcacagaagggcaggtagatatggttcgttctgcattcgatgatgctgcacttactgaggaagaagagcttgtgcaggaagaaatcatccaaaaaatggagcttatgatgctatga

SEQ ID NO: 387481 - DNA, 504 bp, Salmonella enterica
atgaccaccattaccaaagaacgtatcgaattgttcattaaaagtcctcttgaaaacgggcttacccgtggcgaacaaatggagctggcgcgtatcgcactggcatcgctggatgctgagcctgtgcgatacctgaataaattttccggcacatgcatgacgttagagcagcagccaaatgctgctgatgatgttgccgtgtatataccgctctacgccgccccgccagtgcaggaaacaggcgtttacaaggatatgctcaatatcatcaacctgctggaaaacaacgaatgggccgagcattgtacgagtacagttttaggttcgctcctggaatcagaaataacgcgtctggttgacaaagagcagccagcgccggtagtgccggaggaaatcaccgacgagtctacggaacaacggctgatggggcgacggtgggctcccagtttctgcgctggctggaacgcctgtcgcgcctcgatgctcaatggaggtaaatcgtga

SEQ ID NO: 387482 - DNA, 357 bp, Salmonella enterica
atgagtaaattcaccacccccgcgattctggagatgctggagcactacagatggcgggtttacgaaccgtttgagttttacctgagcgacgataacagcgatgttattgaggtgccggctggtttcgtcaccgacctcgccaccatcccgcgtatcttctggacaattctcccgcctgacggcaaatatgccaaagcggccattattcacgactggatgtacgacaacgcactgcgcacaaaaaaagaggccgacctgatattcctggacggtatgacggtgctgggcgtgccgaagtggaagagaacggtaatgtactgggcggtgcgggtgtctggaagggggatgtacaggtaa

SEQ ID NO: 387483 - DNA, 189 bp, Salmonella enterica
gtggaagctcgcgtagcaaaactggaatcagatgttgcacatatcgattcaacactgcaggaaatggaaggtgacatgcgtgaaatgcgcagggatcttcgttctgattttcgcattctttttggtgctcttatcaccgttgctatcggactggctggtataatggccaggggatttcactggatctga

SEQ ID NO: 387484 - DNA, 240 bp, Salmonella enterica
atgatttcgattcaccctgtaccggcgcacgtcgccagaaataatgtgaaaaaagcgtatctgattgaccgggataaacaatgtaaagagtgtgggtatagcttattgcggtatatttatacctattatcggtttttcggcgaaaggggggatgaagagggcgatacaacgaatctggttttggtagcgcacagagaagatgacatgagaacaggcaaagcccaggatattccagcatag

SEQ ID NO: 387485 - DNA, 162 bp, Salmonella enterica
atgaccaccgatgaactcaccgcgctggaagcagcgatgcagcagaacatggtgttgcagggctttaaaatccacgaacgccagcggcagatgaaggaggaagtggacaaattcacggactataaggcgattaaggattacgtcgtgggctggccagaataa

SEQ ID NO: 387486 - DNA, 360 bp, Salmonella enterica
atgagtaaattcaccacccccgcgattctggagatgctggagcactacagatggcgcgtctatgaaccatttgagttttacctgagcgatgacaacagcgatgttattaaggtgcctgccggtttcgtcaccgacctcgccagcgtgccgcgcatcttctggacgctaatgccgccagacggcaaatacgccaaagcggccattattcacgactggatgtacgacaacgcgctacgcacgaagaaagaagccgacctgatatttctggacgggatgacggtgctgggtgtgccgaagtggaaacgtataatcatgtattacgcggtaaggttattcggacggggaatgtacggcaggtga

SEQ ID NO: 387487 - DNA, 195 bp, Salmonella enterica
atgaatgaagaaaaatcgcaagacacaattgactccctgagccgtcagattgtcgatgttctgcataaagaattgggggataagtgcaacagttgcagggtcttcccggaagccatgtgggttgctatgcaggccatttgcggcccgcaacttgccgcagatacaatcagatgttgtcaggttcaatcgatttag

SEQ ID NO: 387488 - DNA, 372 bp, Salmonella enterica
gtgatacatgttagctttagtaaatactttatgttttttttcagggagttaccagaagatgaacaaaacaaaatcgttaattttatttctcacctaaaaaaacacgcgtggtcaaatcttgagggtagaaataaaaaatccgacgacatcagtccaaagttacctgattatcaggaaaaaattgattttgttaataaatttaatctttggcattaccatataggcatcagggaatacgatttacgaaaaaaacatggggatcgcacttctcgattcgtactccactacatgaacaaacctgaaaatattaaaatcgtcgacatgtcggaacaccctccctttgttcttcctactctatatcggttacattaa

SEQ ID NO: 387489 - DNA, 258 bp, Salmonella enterica
gtgaatagactgctaaaaatgcataattgcagcaacaatttctcacaccagctactccctgcaatcttggatcgtgtgcatgactggttcgaaccaaaattgattagctcattcaggtcatctgatttagatgatgattatattgattttcaactatctaaaatgaaagctctagttgatgatgaatatattcccatgccagaaaatttgatggaaccacaagagatacttaactggatgaagggagtcagacagtga

SEQ ID NO: 387490 - DNA, 312 bp, Salmonella enterica
atgaccagaccacctaaaggctatgaattcattgaggactcaaaagattttcatgatcagaccgctgatttagctggcgcaacgtcataccttacaagagatggttactttataaacatctcatttttcagaacttttgttaaaagtttacgccacaaaagcaacaatatgcctgatggttcattgttaaccatgcaacgctttacctctgtaaccatcagcgaagaagaagcgagagcgctttatgaaagcttgggcaaggctattgagatgataggaactcagaaaaaagagggagagggatgtgaatag

SEQ ID NO: 387491 - DNA, 477 bp, Salmonella enterica
atgagagcaccggaacctttaacgcccggacacaacattgctgaattttgttgttcagatccgggtcttaatgaatggctgaaaaagaaagcattaaaaaatcacggcaccggcatttcccgtgtctatgttatttgtgctgaaaatacgaatcaggtgatcgggtattattgtctttcttccggcagcattcagagaaatattgcacctggcccataccgacgtaatgccccggattcacttcctgttattgtactgggcagacttgctgttgacctggcatatgcaggaaaagggtttggtgttgcattactcaaggatgcgatataccggacacaaaacatcgctgtccagatcggtgtaagagcgttaattgtccatgcgctgaatgatgaggtgaaaaacttttatacgaaattttcttttgaaccatcctcagcaaatccattaacgttattctttcctgttaaagtctga

SEQ ID NO: 387492 - DNA, 279 bp, Salmonella enterica
atgaaatcagaagccagagaagcccctatcaacatccgggcgaaaacatcccagcgtgacctgatcgatatggcggcaagccttgtatcaaaatcacgtaccgacttcgtactcgaagccgcctgccgtgaggctcaggacatcctgcttgaccagcgcctgttcatactggacgatcaacaatatgacgcgttcctgtctgaacttgatgcccccataacccctgagcggcaggcccgaatcaatgatttgatgggtcgcaaatcgccatgggaatga

SEQ ID NO: 387493 - DNA, 342 bp, Salmonella enterica
atgaaaaataagcaaatcgctttatctgcggttatctccggttgcctgttattaagcgggccgacgtttgcttcgtcaaaagggcctgtacttatccattcagaactacctgaacagattctggctgagcctcccgcggtgccggagcaggtcacgactaacgtgcttctgcgacagattctggcggaggtgataaagacaaatagcctgaaggaagataaacgctgtagcgatggtgaaaagaactattctccgggctacatcatcagcgttggcaataaaacgctgcgttgtgatattgccagggattacccgcaatggatcgagggggataaagcttga

SEQ ID NO: 387494 - DNA, 564 bp, Salmonella enterica
atgcaaacaatttctaaaaaacatatgtgccgatggcttctgcccggcctgctcggtctagttctgtgcgcgccagtaccgaatacttacgctgccaccgttgaggcaggattttctccggaaggtacagctctcctgcttgttattaagacaattgagactgcgcaacaggaaatccgtctgatgggctactccttcacctccccggaggtggccaaggcgcttgtcagggcaaaacaccggggtgtcgatgtgggcgtggttctggactggaaagctaatgccgggaacaacaacaacgccagtaaagcagccatgaaccttctggttagtgctggcatcccggttcgtacagtgagtgcttacaaaattctccacgacaaagtgatcgtcgctgatggtcgcaacacccaggtcggctcatttaattactcccgggctgcagaccgttcgaattcggagaacgtgcttgtcgtctgggatgacccagtcttagcccgcagctacctgagccactgggcatcacgctgggcgcagggaacggactggaaacagtcgtactga

SEQ ID NO: 387495 - DNA, 954 bp, Salmonella enterica
gtgcgggcgggtttgaatagcggaacattttccgattctacctatttcgactggtcggaatacgacttagcgaatctgcgtgaagcacgcgattctgctgttgtttctccgaagcgtactcgctgccgtcgcggaacacactcgacggcgtgtaagtgtgctgatcctaaatatcttcgacctgcgaactttagcgagctcccgaaagtacttcgggacgggtatcatcgtgcccagaaacgccgtttctcgcggcatccgtatttcgtgcatatgcgcacaaatgctggccgtgagcgcgatttccgacaggaacgccagcatctcctcgatgcactggccgttctgctggtcagcggttgcgacattgccacgtttaacgtcgccctcaacagttcacagatatgcaaggcgttaagtccaaaagattcccggggtgatgtaatacttggtgaagaggtcacgccttcccgcatttgccgcgcactcgatctgttagaaaattacggccttattgagccgtacatgcgtcgtctggacccgtacacaaaaacatacctcccgcgtcatgtcactttaacagagcagtttttcaggctcttccaggtcaatctcgatctgctgtacaaagagcgtgaagaacgtctgcgcgcgttggctgaggggattcttgcccctggcgaagtgatgtccgtaaaagcggcccgacagcgcttctttgacgagaaagtggcacaggccctgaaggttcgccgcgagcgagcgatagaacagaagcgcctttccagaattgcgcgttctacccagctcgatgaccggcagttccagattgcagcctggctgatcaacacgcggccggaagtctcaggcatgactccggatgatttcgagctgctggtctaccattacctgcgtcagatcaagctcaattttgacgctgagtcaccaggctaa

SEQ ID NO: 387496 - DNA, 234 bp, Salmonella enterica
atgattcagacacgtaatcaatatctgcagtttatgctggctgcatggggcattagctggggagccagatttgtcatggagcaggccgttctgctttataggttgggaaaaaactatttgttctgcagtcatggtgctgttctggtgtacctgctgtgtgttttcctggtataccgccgttggatagctccgctaccggtcgttgctcagctgcgcaacgttggcgtaccgtga

SEQ ID NO: 387497 - DNA, 441 bp, Salmonella enterica
gtgggctgtggtggtgtgtctgagtcaggttctaagcttgaacgccctgagttgttccagctcctgaaggactgtcagcaaaacgatatcttgctggtagaggatgtggacaggctctcacgcctggtaggggaggactggaacacgcttaagaaaatgatccggcagaaagatatccgggttgtggctgtcaatgttccgacaacctggctcgcatcgggtcacaatgattttgacagccgaatgttttcggccataaacgatatgttgctggatatgctggccgccgtcgccaggcgagactatgaacagcgccggaaacggcagcagcaggggatagccagggcaaaaagggaaggaaagtataaaggtcgccaggttaaccagtctcgctatgatgcaataaacaggctgattgcgagcggcagctcctggagctag

SEQ ID NO: 387498 - DNA, 303 bp, Salmonella enterica
atgaaaaaaagaaatttcagcgcagagtttaaacgcgaatccgctcaactggttgttgaccagaactacacggtggcagatgccgccaaagctatggatgccggcctttccacaatgacaagatgggccaaacaactgcgtgatgagcgtcagggcaaaacaccaaaagcctccccgatgacaccagaacaaatcgaaatacgtgagctgaggaaaaagctacaacgcattgaaatggagaatgaaatattaaaaaaggctaccgcgctcctgatgtcagactccctgaacagttctcgataa

SEQ ID NO: 387499 - DNA, 885 bp, Salmonella enterica
atgatcgtcatcagaaacttcctgcctgatgatgctgatgggatcagtgaactgtttcgcgaggtgtacggcgaccgctacgtttattctgacctttatgtacccacgatgattggttggcataacgcacagcgccactggcaaagcgcggtagcagtgaaagatggccgcatcatcggccatgcagccttatggcgagatgaaaatgcacccagcgccgaacttgcgatgttcgcgacccatccgggggggcggcatcgcggcgtggctacgagactggggatgcatctttgctgcgaggcacgtaaacaacagctgactacgatcaccataaaaatggtgtgcagccattcttattcacagcggatagcagaaaaacttggttttcatactacagccctgttacgggactacgtcgtgtcgccatttaaaccaaacgatcgtgaaagcgtgatgctgggcgtgcaggccatacagccacgaccagtaccacagatagaggaaataagtggacatcatccctggctgtcgcttcttggtattcagtttggtaatacgcaacctttatctttaatacagacagccttaccactggatattaccgacattggcgatcgtatagaagtcaccctttaccagacgacgcacagggtgatagatgaaataattcgtctgcctcacagccggcttgtctatctccgtatccggttcaatagcacgcttgcagatgctcttccctcgctttaccgggcgggttttcgggatatgggcctgacaccggataacaaagaaggctggttttggttatttcagcgcggcttcagacgacatagactccagttgcgttgtccgataggccaaatgttgcaaattcattcactctga

SEQ ID NO: 387500 - DNA, 1302 bp, Salmonella enterica
atgacaaagcaacagacgatcgctactgacactgcagtcttatcccttgaacaacttgtggaattcgcccgtcgacactcttcctactacgcccggcactaccggcaggttccgcacagcgattggcagataagcgacctgcctctggtcaatccccgcgattactgggaaggaagcagtgagctgaccaactggccggttttgaccggaccttttaccgatggcattgtatttaaaaccggtggtactaccggtgccagcaagctgtccatttatacccgcagtgaatggcgcacattcgtcaccagttttggccggaacctcgccagccagctacagccaggcgatcgcgtggcgaatctgtttttcgctggtgatctttactccagctttttatttattcacgacgctcttgctcatatggatataccggtatgcgaatatccttttagtggtgcgatggagtcgcaggtactatttgatcaactcaatcagcataagatcaatgtgctgcttggcgttccagccatgctattacaatttgcggcgataacagtggcacaacagcagcagttacctggcattacgttgcttctttttggctgtgagagcatatttgcggagcaaatgttgctgctcaagcaggcctttcctaatgcccgcgtggcttctgtcggatgcgccagcgttgatgcgggtttgattggtgccagtactccagagtgtcttggcggagagcatcgggtctttgaacccgaaactatcgtcgaaatcattgatgaagtgaccggtgaatccattcttgaggagggtcgcaccggcatgctgataatcactactctgacacgtaaactcatgccgctgattcgttatccggttggcgatcttgctgcctggcgcgaaccgccgggaaaatccgcccgtaagttcattcttcaaggacgaagcagcctcggacaccgtatccgtgtaggttatgcctctgtttttcctgatgagttcgatttcctgattaccgaaatgctcggcaggcaactgtggcaactgatacttgatcatcacgatcattgcgaacaactgacgttgcgcattgcctttactggcagtgaccgccaggcggatgctctctggaattccatccaggaaaaggatcactcactcgctaaattgtgtgaggcaggccagctacgcatggtaattgaatggtgcaggcaggatgagcttatctgcaactcacgtacaggaaaattgcagcgggtgatagaccgccgccggtatgtaacagaggaagcgggaaaatga

SEQ ID NO: 387501 - DNA, 2409 bp, Salmonella enterica
atgtattttatttatggcaaatgttacccctcccccacgatcgaacaggtgttgagcctgttgaccgagccgctgcacgacacgctgagccagtcgctgccagtggatgcactgtttgcctgtgcggaacgttttgtgaagtgcctagaagataccacgtttttaccccagatggatgccgtggtgcgggaagaagtaaaccagttctgccagccggatgcgctgcgcttcaagcttgagcatgagttgggtgaagtccccttctcgttacgccgttttgatttatcgcaaccgcatttcgagagctggcgcccgctgggcgtggtgctgcatatcaccccggccaatgcggagtcgcttccttttctagctatagtcgaaagcctgttggtgggcaatattaattggctgcgccccagcaccagcgaacaggggctgacccttgaactgctgatggcctttcttgactgtgatgcgacaaatacgctggctaaccaccttgccatcctaccggtaacgaccgataagcttgcgattctgatggcgcatgcggatggggtttccgcatggggcggcgatgcggcgcttaacgctatacgccagcagcttcccggcggctgtcgctggatcccatggggacataaaatcagtttctcttggctgattcctgaggctgttgatgacaagcagctggatgcgctggcggatgaaatctgtcgtttcaaccagcaggcatgctccagctcgcagaccattttcgttgataccgagtcgctggcgacgttaaaggaaattggcgacggcctagctcaggcgatgcatcgccgcagcggccattggcctgtccaactgccggacgaaaagtcggcggcagatatcacctgcgcgcaggccgttaacgaactggacctgatctttaccggcgcggataatctgtgctgggacggtgaaaactggcgcattttgctggaaaacacaatcgggcttgaaccttcgccgctctaccgtactctgctgctacgcccgctgccccggcataaactcgttcagaccttgcgcccctggcgcccctggctgcaaacctgtagcctggcggcgccagctaatgacaccgccctcctcagtcagcttctgctggccgctggggttaaccgcattacaacgcttgcaggcatgcattcaggctacagcggcgaaccgcacgacggtctgttcgcattaagccggctggcgcggcgtgttactgtcacactcgacgcagatgccctgccaggattatcgacgctcgatctcctgccccgcgcgccgagcttgcccgtagatcagccgatcatggataaattcgctttcattgaaaacgcaatccagcccagtgcaaagctctttttccgcagcggaggcagcagcggcgtacctaaactggcaggttttacgtatcgtgattatcaccgccagatgcaggctgccgccgacggcatgttcgccgcaggtctcgatccggtgaaggataaagtactgaatctgatgtatgccgggagcctgtacggcggtttacttagtttcttcaccgtacttgacaaagcgggcgttatgcatctccccatgggggggccgcatgatgataattatgaagagattgcaaaaacgatcgtcagtcagcaggtcaacactctgatcggtatgcctagcaccctgagccagttgttcaggcagcaagaaacattgctgcgcagctacggcggcatccgcaaattgctgaccagtggtgaacatataggtgccgatcagcgcaagttttttcacagcttcggtgttgaaataattcgttctgcgctgtacggctccgtagacgccggaccattgggacatgcctgtaacgccagccctgagggtgtgtttcatctgatggcggatatccagtggctggagatcgtcgatatagagtgcgataaacctgtaaagtcaggtgaaatcggtcgtctgctgtttacttcccgggctcgcgcaggtcataacgtggttcgctacgatattggcgatcttggccgctgggtggaaggacgctgtgcctgcggcgcactgactcctcgtttcgaattgctgggtcgtcacggcaatctgattcgtattggcaccatgtttatcccgacacaggagctgacgcagttggcagaagtgccagtgcaactcattcttgatcataacccatccagcggaatggaacgtatccgtatcttagcgcagggtgatgccattgaggtgcagcgccgtgtcagcagcaatcctgaactgttgatggggctggatgcggggttacttgagattcaggtgacaagctgtccgtttatcgagtttgaacggcatcctcaaagtggtaaaacgccgctggtcatcgataaacgtcgctga

SEQ ID NO: 387502 - DNA, 1128 bp, Salmonella enterica
gtgatatccgttcctgccgtcgatgagttgtgcgcgctcactcacccgtatcagtgcgatgcaatgagtgagcagttgttccataatgcgatgctggagatcgtctctttccatgttgagaatacgccgggctacgcgcagtggttaatttatcaccgcattaacccagacaatccgcagttgggctcgtggggcgatctgccgccaatatttgctaattacttcaagcgccatcttttgctcagcagcacgggccaggatgcgctggagctgacgtcctcaggcaccagcgggcaaaaaagccgcatgcgttttgacgctcgtagcattcaggccgcgcagggtatggtcgaccatattttccgccactacgagtgggatactccagacgcgccctgtaattatctcctgttgagctacgaacctttagaaaccattaccttaggtacggcctataccgaccagtttctgtgtaaatatgcaccggtcaaaaaggtcgcctatgccctgcgtaacaccggaaaaggccatgagtttgatccatttggcgtgatccaggcactacaagctttcgcgcaggatgacgcaccggtacgtattttcggtttccccgcctttatgtggtttgttcttgaaagaatgcgtgatatgaatttgccgccacttaccctgccgccggggtcgttaacgtttttcggcggcggctggaaggcgcatacggataaagaaataccgaaggcaatgctgtacgcacggcttggcgaacagttagggctgcctgacgaacgctgccgggatggctacggttccgttgagcactgcgttccttatgtcgagtgtgcccatcaccactttcatatcccagtatacgccagggcctggatccgcgataccagcacattcgagattaaaggctacggcaagcgaggatttttgcagtttgtctcgccatatattacctcaagcccggcccacagcgtcgtgatgagcgatttagccattctgcatcgtgcccacgaatgtgggtgtggggtgcagacagactggtttgaactactcggccgcgccagccagcatcagggccggagctgtgcactggcggcctcggaattaatacaagggaagtaa

SEQ ID NO: 387503 - DNA, 216 bp, Salmonella enterica
atgtcccttgcgtcactaaacgcctatctgtttggcggcgttgcttttcaatggttgctgggcctgctggttggcagtttttggctcacctttataacctggcgaatgatgtttatcactattgccgttctggcggtgcttgcgccttttcttattattaatttgctaagcgataaaaagaataattcagttattgctgagtccgataacctctga

SEQ ID NO: 387504 - DNA, 249 bp, Salmonella enterica
atgttcggaaaagctgaagacaaagtaaaagaagtcgcaggtgaagcgcaggaaaaatacggcgagctgaccgatgattacggacaccaggttaaaggcgctgcccggaaggtagcggcacagggtagtcaggccgctcaggaagcggctgaagtggtgcgcgataacgtggaaaacaatccattcgcagcaatttctatcgctgcgggcgttggcttgctgattggttttctcatcggccggaaataa

SEQ ID NO: 387505 - DNA, 354 bp, Salmonella enterica
atgaatatattaaaaacgatcattctttctacagcacttgtatcaactgccgttctggccgatgccaacatcaatactgagcatttaaaaaacaaagctgaacagaaggctgaacaggcctccaatcgtgcagaagaaacgactcataaggctaaaaaccgacttgaagaaaaacagctgcaggctgaagaccggctcaaaaacggcggtgaagcgaccacgacagataaggtaaaggaaaactcacagaaagcttggaatcgcactaaagaagccacagaaaaaggctggaataaaacaaaagaagccgctcagcaggccggtgacgcggtaagtgaaaaagtgggcaattag

SEQ ID NO: 387506 - DNA, 402 bp, Salmonella enterica
ttgagaaaaattaatcgccctagtccgggtccttcccgtggactggcagacaatatccgccgtattttctctgcccttaccggaacattgcatacacgtctggagcttgtggcaattgagctggaagaagagaagagccgtattaccagtctactgataatggcgggtctgacgctgattttcactgcgtttggtgtgatatcccttctggtgtttattctgctgtcggcctcaccggaacaccgtctgatgatactgggtggtgcttccgctgtgttttttgttctcgcactggcctccggcattttcgtcagacaaagaacggccgggcgaagaattttgccggagacccgcagacagctcagtaaggatttaagccttcttaaggaggaggggccatga

SEQ ID NO: 387507 - DNA, 294 bp, Salmonella enterica
atgagtaccgtggagcgcagggaaaaccgcaaacaacaactgttgcaacaaatagcgcaacaacgacagacactgagtcagctaaagaccgactggctcaggctgacagcgccggttgaccgcggctggcagtcattataccagtggcggacttttatcgttcctggtatcgggatagccgtcttttgtgcaatgaaatctaaaccacgccgtctgatcatatggccacgcagggctgtagccgcctggggggcaatgaaatttattcgacaacggctgtcactgctcaggtaa

SEQ ID NO: 387508 - DNA, 2100 bp, Salmonella enterica
atgaatagcgaaatattaaagaagtacgtctcccggttagagaccagcctgttcagacgcgttcccgttgttcaccagacggaatcgtcagagtgtgggcttgcgtgtcttgcaatggtttgcagctactatggaaagagcatagatctgatttccctgcgccagcaatttaacttatcttcccggggagcgacgctggccagtattcgtgcaatagccgtgcagatgggaatgactgcccgggcgctatcactggatctggatgaaattaatgccctgcggcgcccgtgtatccttcactggaactttaaccattttgtggtcttggtgggcgtgaagcgtaatggttttatcctgcatgatcctgcgcgggggcggattactgtcagcaaagcggaaatatcccggagtttcactggcgttgcgctggagcttttcccggggagcgcattcagaagcgagcgcgttaaaaaacgtctgaatctgataacgctgataaacagcgttcacgggataaaaggcgcactggtaaaaatttttgccctgtcattagtggtggaggcaataggattaattttaccggtagggactcagctggtcatggaccacgcgcttccggccagcgatcgggggctgttgtcgctgatatgtctcagccttatgttttttattttactgagggccacggtcagtacctcccgtgcatggatctcgctcattatgggaacgcttattaatgtgcagtggcagtccgggcttttctcccatctgttacgccttcctttatcctattttgagagaagaaaactgggcgacatacagtccagatttgtttctttagatgtgctacgccagacgttcactaccagcgttgtcggagcgattatggacgggatcatggtgagtggcctgctcatcatgatggtgttgtatggtaagagcctgacttgggtggtactgggattcactgtggtttatatcgccattcgccttttcacctattcatactaccggcagctttcagaggagcggttgattcgggaggcacgggtttcatcgtactttatggaaaccctgtatggaattgctgccgtcaaaatgcaggggatgacggagcgccggcatactcactggcttaatctccagacggatgcgattaataccgggatccggatgactaaaatggatcttttttttggtgggctgaacacgtttgtcagtgcctgtgagcagacagcgattctctggctgggtatcagcctagtgatggataatgaaatgacaattggcatgttcgttgcgtttggtgcataccggacgcaattttcagacaggacctcgactctggtgggattcctgctccagcttcggatgatgagcctgcataatgagcgaatttcagacattgcccttaacgcgcaggagtcagtaaagcccgatatcccggtgtcagataaggtcatccccgtgagtctggaggcgaagtctctcacatatcgttatgacaaacagtcatctcctgtttttagtgatctgaacctccttatctctccgggggaaagcgttgcgataaccggggcttcaggctcaggaaaaaccacactgatgaaagtattatgcgggctttttgatgcggattcagggcaggttcttattaacgggaccgatatacagcagaccggcgtcaacaactacagaaaaattaccggatgtgtgatgcaggatgaccggcttttttccggaacaatccgcgaaaatatttgtggattcgctgaggatattgatgatgagtggatgactgaatgtgcgaaagcaagttttattcatgactcaataatatctatgccgatgggttatgatacattaacaggagagctgggtgagggactttcaggagggcaaaaacagaggctttttatcgcccgggcactatatcgtaaaccgcgtattttatttatggatgaggcgacaagcgccctggacagcgaaagtgaaaactatgtcaatagcgcgataaaacggctgaatattacccgaataattattgcgcacagagaatcgacaataaaatcagtagaccgagtattcagtttaagctaa

SEQ ID NO: 387509 - DNA, 1275 bp, Salmonella enterica
atgttccgtaaggaagcgcttgaaggccgccgaatgctgtggcgggggagggcattactgctcccgggaataccacccgtcgtggtaatatcggtttgtctgctttttctgttctcttttttattctttgttattacgaaggactatacgcggcgggtcaccgtcagcggcgagataacgacatggccgcgtcccgttaatatctattccgacgttcagggggttgtggtggatcgctttgttacggaaggacagatcgtaaaaaaaaatacacctctttatcaaattgatgtcagcaaaagtacccggaatggcgtggtcagcatcaggcatcatgccgacatcatgaaccaaatccgccaagtggataatatcgtttcagggctgaaggacagcaggaaagccacgctggatgcgctggagaaacaaaaaatacagtacgctagggcgcttcagcgatcttccgacatcattcgtcatgctgaggaaggtatccgtattatgaagaaaaatatgaataattaccggcagtaccagtcccggcggttgattacaaaagatcagctgacgaatcaggagacgatttattatcagcaacaaaatagcctcctgggaatgaacagccagaatgaacagaatgcactgcagttaaccagccttgaaagccagatacggatccaggctgcagagtttgataaccgtatttatcagatgacgctgcagcgttatgaattacagaaagagctggtgaatacggatatggagagtgcggttgttattcgcgcgttgtctgagggtaaaatcgattcgctgagcgtgagcaccggacagatggtcagcgcgggggacagtctggttcagattttgcccgataccgtcagacactattacctggtgctctgggtacccaatactgccgtcccttatatcgcggctggcgataaggttaacattcgttatgaagccttcccggccgaaaagtttggacagtttccgggagtgattcagtccatatcacgaacgcctgcgaccccacaggaaatgagaacgtaccagggagcgccccagaatacgtcttctctctccgtcccctggtacaaagtcatggttcgcctggacaggcaaagtgtcgcctatggcggtaaatcgcgcccgctggaaaacggaatgaaggcgcaggtaacgctgttcctcgaaaaacgaaaaatctggcagtggatgctgtccccattttatgacatgaaaaacagtacgacggggcccgtcaatgaatag

SEQ ID NO: 387510 - DNA, 207 bp, Salmonella enterica
atgagagaattaaatgagcaggaagttcagtttatatccggagccggagcagcagaggatgggcaaaaaattgcgggtatgattggcggggttatcgacggcattacaggcatcttcgggtttaagttcggctttaaagatatattcggatcaatgggcggacttataggttcgatcgtggattcggttaacaccagtaacaggtga

SEQ ID NO: 387511 - DNA, 735 bp, Salmonella enterica
atgtatcagtcatatggaaaaaactggccggtagccttttatccgtattataaacagggcgttgaccagcagattgatacagatgaatttgcaagcctgatgacacttgaagaccctctgacttatctgaataccgatatgggggaccacctgaaaattgataaatatattattaatgctagcggtgatgatttctatatgcctgacaatagtcatttttattatgaccagttacctggttcaaagtccctgcgggttgtacctaattcctcacataacggaattatgtccgttgcggagcagtcgcttataacctttgttaaccgttttcaggagaagcaaaagctccccgaaattacggaaaaagtacagaacagcggggagggcaaaaaagagctggcggtgagcttctcagagaagccgacaaccgttttacagtggacagccaggaacccggccgcaagggattttcgttatgcctgcgatgttaaatacaactcagtttccgtcagtctgactggcggcggtgattcactcagcattccgctgacagcccccgacagcggatggcaggccacttacattgaagccatcttcaatgacggatatgtagccacaacacaggtgtatattacgcctgacgagaaatatccggaaacagcccctccgtctgcaggagcagcctgtcaaactctcccgggcagaggacttacccccacagctgcgaaacagtaa

SEQ ID NO: 387512 - DNA, 144 bp, Salmonella enterica
atgaaatgccgatctcgtttgcttgtgtttctgcccctgcttttccccgccctttgcctggctgacttttctggccgtgttgttcgggtcgtcgatggtgatactgtccaggtactcaccgatggcaaaatggaccagcggtag

SEQ ID NO: 387513 - DNA, 690 bp, Salmonella enterica
atgatttcattcgggttggccttaagtagcctggcgcgttcatactccgattttaaaacgctgaaaaaagtttttgggttcaagggtaaaagtcaccgcccaacgtatgcgctactgaataaagcggttgcattggggtttctgataaaacatgaatacccggtaatagccggaaaaaaattactatggggtatcaccatgcaagggctggcgatggtggttaaacctgatgataaagtattccccggttattttgagccggggaaactcaaatactggaatctggaacaccggctcctgaatcatcgggtcagaattgcactggaagagaaaggcgggcaaagctggcttaatggtgatcggggggagtttattgcgcgttatccaggagttcgccatcgtcctgacgggattatcacgttagatagcggcgcaatcgtcgcagtcgaaacggagcgctcaatgaaaacccgcgcacgctatatcaacatcattaacagccatctggcggccagcgatgccggacgctggcactacgcgatgtatgtcatgccggatgacaaaaccaaaacatcgttaatccggctgtttgactccatcaaaacggtcatgaggaacaacgttccggtgccgttcgacgcgaagaaccgcgaaatgtttcttttccgcaccattgatgaactggagtaa

SEQ ID NO: 387514 - DNA, 1752 bp, Salmonella enterica
atgagtggtggagatggaattggccacaacagtggcgcccattcaaccggtggggttaatggttcttcgtcggggagaggtggttcgtcttccggtggcggaaataatgctaacagcgggccgggctggggaacgacacatacaccggatggtcatgacatccataactacaatccgggcgagtttggcggtggcgggcataagcccggcggtaacggcggaaatcacagcggcgggactggtgacggtcagccgtcgggtgccgcgatggcattcggttttccggcactggtgccggcaggtgccggaggcctggctgtaacggtttcaggtgatgccctcgctgcagccatcgctgatgtgctggccgtcctgaaagggccgttcaaattcggtgcctgggggattgcgctctacggcattcagcccaccgagattgcgaaagatgacccccgtatgatgtcaaaaattgtgacatcattgcctgctgatgccgtgactgaatcaccggtcagttccctgccactgggccaggcaacgatcagcgtaacgaaacgtgtgaccgatgtcgtgaaggatgagcgacagcatattgccgttgtggcaggggtgccagcgagtatcccggtggtggatgcgaaacccacgacgcatccgggcgttttcagcgtctcagcacctggccttcctgatttacaggtaagtacagtgaaaaacgcaccggcaacgacagcgctaccgcgtggtgtcactgatgagaaggacaggacagtagatccggcagggttcacctttggcggcagctcacatgaagcggttatccgtttcccgaaagagagcgggcaggctccggtgtatgtgtcggtgacggatgtgctcacgcctgagcaggtgaaacagcggcaggatgaggaaaacagacgtcagcaggagtgggatgccacacatccggtggaagttgcggagcgaaattaccggcttgccagcgatgagttaaaccgtgctaatgtagatgtggctggcaaacaggaacggcagatacaggcagctcaggctgttgcagcacgcaaaggggaactggatgcagcaaataaaacatttgcagatgcaaaagaggagataaaaaaattcgagcggtttgcccatgatcctatggcgggtggtcacagaatgtggcaaattgcagggcttaaagcacaacgcgctcagaatgaggttaatcaaaaacaggccgaatttaatgccgcggaaaaggagaaagcggatgcggatgccgcattaaatgtggcgctggaaagccgtaagcagaaagagcaaaaggcaaaagatgccagtgataaactggataaggaaaataagcgtaatcaccccggtaaagcgacaggtaaaggtcagccggtcggtgacaaatggcttgaggacgcaggtaaggaagccggagctccggttccggaccgaatcgcggataaactgcgtgataaagagtttaaaaacttcgatgatttccggaagaaattctgggaagaggtttcgaaagatcctgagctaagcaagcagtttatcaaggggaacagagatcgaatgcaagttggtaaagcccctaaatcaagaaaaagcgatgctgcaggtaagagaacgtcatttgaacttcatcatgacaaaccaatcagtcaggatggtggcgtctatgatatggataatatccgcgtaaccactcctaaacatcacattgatattcacagaggtaaataa

SEQ ID NO: 387515 - DNA, 264 bp, Salmonella enterica
atggaactgaaaaaaagtatcagtgattacaccgaagctgagtttattgagtttatgaaagaaatagataaagaaaacgtggctgaaacggatgataaattggacttattgctcaaccattttgaacaggtgactgagcatccagatggcactgatttgatttattacgcggcatcagatgcggagagtacacccgaagccattaccttaaaaattaaagagtggcgagctgctaacggtaagccaggatttaaacagggctga

SEQ ID NO: 387516 - DNA, 147 bp, Salmonella enterica
atgaaaaaaaagacaggatggttactggttctggttattgcagcattatttctggctgcatgtcaggctaactatatccgggatgttcagggaggaacggttgcgccatcgtcctcatctgagctgacgggactcgctgttcagtaa

SEQ ID NO: 387517 - DNA, 228 bp, Salmonella enterica
atgaatatgacgaaaaaaggcgacaagcatctgcggacactttttattcatggtgcccgcgctgtcgtcagggttgccacgaataacaatgatggtcatatgaatcagtgggttaaccagttaaaggaacggcgcggatttaataaaacgaccgtggcggtcgctaacaaaaacgcgagaataatctggtcgatgctgagaaatgagaccgagtatcaggtagtgtga

SEQ ID NO: 387518 - DNA, 756 bp, Salmonella enterica
atgcagcaaagtggcgacaccaacactaccaccgagatcggcaagctcgataccaaagctcagggttacgccaccgctgcgaaagacgctgccatttcaacagccaacaaatacaccgacaacagcattaccggactgaagctcgacgagaaattaagcacggcggacagtaacgcgcagaaatacgccagcacggcgcagtcagaggctgaaaagtacactgacaatgcgacattacaggcaaatcaaaaagtactgcaaaaggctaacacttatactgataacacagctaaagacattatgaaaagtgcaaatgacaatacggaacgccgtgctgctgttgcagaagataatgccgttaaacgttcaggacactataccgatgagcgttctgtacagacccttaacagtgcgaatacctatacaaatcaccgggcaatacaggccgagaataacgccgtggcacggtcaaataattacactgataaccgctttggtgaattgaggaaaagtatgaagcacacggaaaagcgcctgaatgcaggtatcgctggtgttacagcattatcttcaattccctattcctcgggtaataatttctcatatggtattggtgtgggtaattaccagaatggtaatgccgttgccgctggtgtacagttccgggcttcaccatcgaccaatgtacgcctgaatatttcatgggattctgcgggtaataatgccacagggataggtattgccggaggctggtaa

SEQ ID NO: 387519 - DNA, 990 bp, Salmonella enterica
atgaaactgatgcctgaagacgaaccggagctgagtcatcccgttgtagttatttcgccggatacagatttcctgctggcgctatctggtagtgatgctcctgtctgtccggcccgggcttatctgctttccctgaattctccccgcagccggcagacaatggcctcgtttctcaatattgtcgctggcatgcttggcgccggctccctcaacacctgcaactggggtagcctgcgacgacatcacgttatggccattaccgagttgctgcgcgataccggccgggccacggcaactatcaatacctatctttcggcgctgaagggagtggccagggaggcctggatgctgaagctcatggacgtggagagctttcagcacatccatgcagtgcgaaatctgcgcggtagtcgtttgcctcgcggtcgggcactcccggcggaggaaattcgccagctgtttgtggtctgcgagaccgatcgaagcagtcttggcccccgggatgccgcaatgctggcggtgttgttgggttgcggtctgcgtcgctcggaattggtgggactcagtttgagtgacgttgtcatgaatgagcgtgcattgaaagtattgggaaagggaaataaagaacgactggcctatatgccggccggaacatggcagcggttacttatctggattgagcaggttcgtggggaaacgcccggacctttgttcacccgtatacgtcgctttgatactctgaccaacgatcgactgaccgaccaagcggtgtaccatgtcctgaaggtacgtcagcagcaggccgggattgcgaaatgtgcaccccatgatttacggcgaacctttgcaaccaccatgctggagtatggtgaagatctgattacggtgaaagatgcgatggggcactccagcgtcacgaccacccagcaatacgatcgccgtggtgaaacacgccttatgacagcccgggacaggttcattctgccctga

SEQ ID NO: 387520 - DNA, 588 bp, Salmonella enterica
gtgaaaaagagtatggcgggtcagggtgcagcaggggcgttactgctggcagggctgatgatgagtgcgggcgcaatggcggcctccggcgacccggtaaccgggggttcgggcaccgtgaccatcaatgttccgatagtgacgtcaacctgcagtgtttcggtgcccacggaagtgaattttgaccccattggcattgataaaattgtcggcacttctatgggcaaggatatagctacaaaagcgtttgatatcatattcgctcactgtagcggtagaaaccttaaaatgacaatgcaatctccatataatagcgtgacaagcgataaaagtattggggcgtttagttcgggagacacggctcactcgatactttatactattttttttgagcaagataaaggtattacagggggagtgtatggagccaggtttagtttaggaaacgatgaacctgtaatgtttacccctgataatgacaattatacttttacccccagaatacatctgtttcgctggacgggagatatttcaaatatgaacgctaaaataagcgacagttttacttataatatcacctaccagtaa

SEQ ID NO: 387521 - DNA, 393 bp, Salmonella enterica
atgaacaaaatgctattagccggaagtaccggtattgttctgctgtctgttgcagccagtccggtatgggcagacgataatgccagtacattttcacttggatacgcccagtcccatactaatcacgccggaacgttgcgtggggttcggctggcaaacaactatgaaatgtcaccggactgggagctgacaacctcatttgcctggctaaatggaagccagcgctattccgatgaaagcagtaatagttgcggaagacccactttcgcaccgttggtaacacatagtcctgctgatggaattataaagagggtccaggtagaccccataatgaatgacatttttatttaccatgcccatacaactcctagctggccgtttattccattatag

SEQ ID NO: 387522 - DNA, 777 bp, Salmonella enterica
atgaaaaaaactctattgctggccatactttctgctgttacaccagtacattccatgtcgctggatgaactggctttggggtacgactacaccgattacagtggtggttatggtaaacgaaatgtgtctcaggtgggtatcaaatcgctctttaatcagggggcgatggtggcaagcctcgcacagggttatcgtgattacggacatggagattcttttcatggttctcacggcaaggcgaccgtctggtatgactggaattctgtactgtccacgcggacaggattgagtatgggagacaacagcccggtttttgttcgcagagaaattttcagtgattttaacctgaaaccggtgaaaggagcagtcctgacgctgggtggacgtcatgctcagtattatgcaggagcaaaagttaacggatggtcagtcggcggatcactctatcacggacctcttatcctgaattaccgttatacaggatataatacatccggggtggggagcagctacagtcatctggtcagcgcacgacttaaagacaggtcaggcaggggatatacgcaattatatgtcggtaccggtactggtgcctatacttatgactggtcgcccgtagtaaaaaatgggaaactccacagcattagcctgaaacgctctcaaccccttacagataaaatttcacttgatcttgttctggcaaagcagtggtttgatactccggtaggcagctataatggaataaacggccagctaggagttgtatgggcatggtaa

SEQ ID NO: 387523 - DNA, 633 bp, Salmonella enterica
atgccatggtggataaaactcgcacaacaactttctgatcccgaagctttcagtcagaagaaggcaactacacctggatatattgccaacactgctgttatcgatgaaacaaatgggcctgtgattattggggataatacacggatctgccatggtgctgtactggaaggaccgctttgtattggaagggactgccttgtaggaaataatgcatttattcgcgccggcagcatgctgggagatagagttcgcatcggtttcagcacagaagtaaaggcttcgattatcgaaaataatgccaccattggccctcagtgttttatcgcggacagtatcgtttgccgtagtgtctatatgggagcgatggttagaaccagtaaccaccgtctggatggaaaaaacgtccatgttttccatgagggtgtcttggtggactcgggtcgggaaaaacttggttgctttattggagaaggggcttctctgggggtgcaagtcattatcctgcccggcaggatcgtggcttctggcactcagctggcacccagaattattgttgaacgtaacctgccagccgggcagtaccgtttgcatcaggaattactgggtattgtataccccgaaggaaaatcatga

SEQ ID NO: 387524 - DNA, 1134 bp, Salmonella enterica
atgtgtatcgcagtggcgatacggattgtgttcaccctgcgctctaaacccagtcccagactgtcaagcattgatgctgttataccggcttataacgaaggaccttgtattgcagcaaccctgaagaatctgctcggtaacccttacatccatcaggttatttgtgtcaatgacgggtcaacggataacaccaagcagatccttgatgctctgcagcgtgagtggccaaaaaaactgatagtggtgcatcagtctaataccggtaagggcggagcgctaatgaatggtgtgtacagagcaacagcagaacaggtttttctgaccgatgcggatacgcgagttcctgcagacagtgacggactgggttatatgctggctgaaattgaacgagggatagatgcggtagggggcattccttcctctgatttacatagtgctggcctgctgcctcatatccgggccactgtcaaaatgccaatgattataatgaagcgaactctgcaacaggtactgggtggtgcaccatttattattagtggggcatgtggcttgttcaggactcaggtgcttatcgacaacccgttttctgaccggactaaagtggaagatctggatttaacctggagcctggtatcccagggttaccgcgtcagccagtgcaatcgctgcgtcgtctaccctcaggaatgtaataccctccatgaagagtggaaacgctggcggcggtggatagccgggtatgctgtgtgcatgtgtctgcactggcgactattattctcacggtttggttttttcagcatgcttcctatgttctgggtggtcgcattaggcgtgatcacttattccataagatggggggatgttgtcacaaaaggcgactttggcagtattgtgctgacagtatttccgattatctggatggttgttgtgtgcggtatcgcctcatttagcgcagtttttcaccgtgtaccggcacttattgtactcgcccctttctctgttttttatgtacttctcgcgtatgcgatatggattgtttatggattacctagtttctttaccgggcgggaacctgcccgggataaacccacgcgctatgccatggtggataaaactcgcacaacaactttctga

SEQ ID NO: 387525 - DNA, 651 bp, Salmonella enterica
atgattcatagcaattttcatcagggttatgtccttgcggtaggcgcacaccctgatgacatagaactggggtgcggtgctacgctatcccgtcataaagatgaagggatacacgtagtggccgctgtaatgactgctggccgtaaagggacagacagcaataaatataatcgcgaggaggaaactcgtcgggcattagcacaccttggcgtgcagtctgttttttgttttgactttgacgatactctccttggtcatcagttggacggactcattacatccttggagtgcgtgatgatgaacaaaatacccgcagggacatcgttttcccgagtctataccatgtgtccgagtgacaggcatcaggaccatcgtgccgtctaccatgccaccattgtggcctgtcgtactgttggtcagatactgacctatgaaacccccagttcttggtctttttttcagccgaatgttttcagtgatattgcttaccatcatctagataacaaactacgagccattcgggagcataaaagtcagcaacacaggatttatatgcagccagatcagatccgctccgtagcccggtttcggggcctgcaggcaggttgtgagatggtagaagccttcgccgtacataaaatggttatttaa

SEQ ID NO: 387526 - DNA, 303 bp, Salmonella enterica
atgactgcgcaatctcaggccgataatggagcgagcattggcgatctgatacaagggggattttctacaggagatgacaatagagcacttaaatatattatagaaataccatcaattacaggggttacaggagggataaataaaatttttagtttaagaagcaataaccctgttttgtttacccctgacagcgacaattttatttttagccctaaactcaagcttatgaacactggtcgagactttagtaagttgagcccccaagtaagaggggggtttgattatacaataacctatcagtaa

SEQ ID NO: 387527 - DNA, 522 bp, Salmonella enterica
atgtctgaccacgctattattactgcttccttaacgctcgagtcgctttatagcacctatcatggctggctaaaaagctggatgatgcgcaagcttcagtgtgtctttgatgcagatgacattgcacaggatacttttctacgggtcatgagcagcgacacgctcttaacaatccgcgatcctcgctctttcctgtgcactatcgccaaacgcgtgatggtcgatctgtttcgccgacacgcgctggaaaaatcctatctggagatggtggcgctgatgccggaggagctggcaccttcgcctgaggaacgcgaaagccagctggaaaccctgcaactcatcgataccatgcttgatggcctgaacgcgaaaacgcgagaagccttcctgctttcacagctggaaggattagcttatagcgaaattgcgcacacgctgggtgtctccgtcagctcagtgaaaaagtacatcgccaaagccatcgagcactgtctgctgtttcgcctggagcacggtttatga

SEQ ID NO: 387528 - DNA, 567 bp, Salmonella enterica
atgactccttcacttaccgactcccgtcgccaggcactgcgctcggcatcgcactggtttgcggtattaagcggcgaacgtgtcagcccacaacaggaagcacgctggcagcagtggtatgaagaggacaaggataatcagtgggcctggcaacaggttgagaatttgcgcagccagcttacccgcgtgccgggtgaagttgccagccgcgcgctgcacgacacgcgccttacccgccgccacgtcatgaaaggtctgctcttgttactcggcgtcggcggaggctggcagctctggcaatctgaaaccggtgaaggcctgcgtgcagattaccacaccgcgaaaggtgcgatcggccaacaaaggcttgaagatggcacactgctcacactcaatacgcaaagcgcggcagatgtccgtttcgacacacatcagcgcatcgtccggctctggtacggcgagattgtcgaccaggcgtatttcacccgctcttacggcgacaataacaaaggcatctacacaggccagccacgcacgctgtatattctggggtcattgaagttttaa

SEQ ID NO: 387529 - DNA, 639 bp, Salmonella enterica
ttgctggcaaaccagttgaatctgctcaacgtaagcaacagcaccgcccacacgctgggggtgaatctgccgaggctacgattaactctcaatattctggtactgcttttggtgggagcctgcgttagcgtcgcgggccccgtggcctttcttggcctgctgatgccgcatctggcacggttctgggtcgtgttcgatcagcgaaaagtcttgccgataagcattcttttgggtgcaatgctgctggccgatgtgctcgcccgagcgctggccttccccggtgatttgcccgctggcgctgattggtgctccttgttttgtctggctgatcaggagacgcggatgaaaaatacgttggtcattttcatcgccctcgcgctggcaggatgctcactgctttcccttcgtctgggtgccatcgccgtaccgtggcatgccctactgaccgactggcaaaccggacgcgaacactattatgtgctgatggagtaccgcctgccacgcttgctgctggcgctgtttgtgggagctgcgctcgcggttgcgggtgtgctggtgcaaggcgttgtgcgcaacccgctggcgtcaccggacagagtccctggcaacgaggaacaaaagagaacactaatgggttaa

SEQ ID NO: 387530 - DNA, 405 bp, Salmonella enterica
gtggctgagctgcgccagatcttcctctgtgagaccggttgcttcaagaacggattcatgaggcatccccattttcagcaggctgcgggcaacttcgagtttgccttcattacgaccttcctgtctgccttgctggatacccttctgttcacgtaccgccggtcagtgtcagtcatgagtaggctgccttatctgcagggggggggcataccgtcagataaaaatgtacatagcccgcttgcatccttctgcaagcaaacattactaatgaatctcatattatttttgagtatggcaagtcagggtgcagcaggggcattactgctggcagggctgatgatgaatgcgggcgtgctgcctgttaatgaccccgcggaaactgaaagcccgacaaacagcgcttga

SEQ ID NO: 387531 - DNA, 642 bp, Salmonella enterica
atggatacttctgaaaacgaaatcggatacatcgttgttattgaaaaaaaagaatacaacctcgctcaaattcctccttttaacgacaccctcgtccaacgagaaaaacagtcggtgttgagtcaactaagccttaatgacatcacccagaacctcaatctttccgtggaacttttttatgtagcctatcatggcgtcgctggcgctaaagggggggcgttgcaggcggaaatcgccaaattgcaaagtcggctggcaatgttatgtaatgaatgcattatcaccatggcaacgtttcagaacgaaacacagagtattattgagctgctgcaacaatgttaccgttggttaacgaaaggtcaggaaaagcaggcattcaaaaaattggcgcattgcaaagaatcctcaaacgccatgtcagtaaaagccaaatcgctggctgaacagtttaaagcattgcagattgattccaccaagactaaatcagacactattatggaggaagccagtgagaatgaccgcctactggcctcgctaaaagccgaacgggaaacaattgccaaacaaaaagcagaggaaaccaatcaaaaggcgctattagaagacattgccgccacccaggtgctgtatgaagacgactaa

SEQ ID NO: 387532 - DNA, 1158 bp, Salmonella enterica
atgaagacgactaaaagtcgggaggctgaggagtcaaccaaagcgctggtgctgggtatcatcagttcggttactggcgcaattggcgcaggtcttggggcttactctgcagcaaaaaacccggtaggtaccattctgaacaaagcgggatcatccattgacggtaatgcgcaaatcaaagccgcccagaccagcatggataacgccaaacagaaatcggacgaggctcagaaaaaatatcttgaggcaaaagacaagcagacagctcagcaggacatcattatcaggctgaaaggtgagcttgatgatctgaataccgcgctggttaatctggaaaaagacagcaccgccaaacaggagaatgtcactgcactgcggaaaaaacgcgacgataaaaaaacggagcatgacactgcggtggtgaaactgcccgagctgaccagagccgccaatgcgctggaaaaagacgcgaaagattgcagcgaagcctatgctgcagctggagcctctctggccaatcttgctgcttcaaccagcaagttggccgaatcggctgcgtcgacagaggcctctgtacgggaagaaagaattaatctgctcaacaagcagctcgagttacagaaggaaaaacgggcatcgctggttgcgctagcggaatatgcagaaagtctgaaaaacctcaaaatcgagcaaggtaacgctaccctttcggtcaattcactgcatagcgccatagacgctttgggcaaagtcattggcacgttaaccaatgccagtctgttttgggagcaaatgtcaaaatattgcggtcagatgaccagtagtggatttcagcgggagctggatgacctcaaggatctggatctcgaaatcaggctggaggaatatcgagacccacatttcatgaggtctttcttcctctacttgtgccaatgggttgcaataaacggcctatcaggcgattaccttaaggccgctgacgaggcgcagaagaaagccgtccagtatctacgggagtccccgacaattcaggaagccatacgcaaagcgccagaactgtccaaaaatcttgcccttattgtggaaaacgatctgctggcgtcccgtaaccagaccatcgagttggaacaacaacgcgcaatcctctctgctcaataa

SEQ ID NO: 387533 - DNA, 171 bp, Salmonella enterica
gtgaaaaagagtatggcgggtcagggtgcagcaggggcgttactgctggcagggctgatgatgagtgcgggcgcaatggcggcctccggcgacccggtacagggcggttcgggttctgtgaccatcaacgtcccgatagtgacgtcaaccctttctggccttcggtgttga

SEQ ID NO: 387534 - DNA, 876 bp, Salmonella enterica
atgaattttttaaataatcccccctgcagacagcttaccacatctgaccaatatactcggctttctgcatattatgaagaagagcgccatactgtatggatgatgttgcgctttggtgtacgaccctgttttgactccagacttcttgaagaaataatgaagttgacctggtcggtaaaggagtctggttataaggcagatttctgggtgacgggttcgcatctccatggactgttcagtaccggtggtgacttgaattttctggctgagtgccttcgtggtggtaagcgtgaggcgcttcgtgcttatgcaagggcttgtgtggactgtatttatgtagccgcgactggttttaataatgatgctgtgacactcgctatggtcagtggtaatgccctgggtggggcttttgaaactgtacttgcgcaccattttattctggcgcaaaggggggcgcatttggggttcccggaaattgcgtttaatttgtttccgggaatgggagggtattccctggctggacggcgtgtgggggtgaaactgacggagcaactgatatataccggggcgtcccatactgcagagtggtatgagcagcatggattggtcgataccctgtttgaaaaaggggaaggatatacggccatccgggcatttatagataccatcagtcatcgtctcaacggagtgcgggcgatgttgcggacccgtcagcgagtaacagggctttcacgcggagagctaatggatataacggaggactgggtggaagcggctttttgtctgggggaaaaggatattgcatatatagaacatctggtccggctgcagaaccggcgaattgccgttgcacttcgccgggctggtcaggagtag

SEQ ID NO: 387535 - DNA, 558 bp, Salmonella enterica
atggtaatggcagtagtgaaaattattgatatccagtttataccgggcgagaaccagactgtcgatggtaataatggcaaaaaggttaatatactcgatttaggaatagttatttcctggcatctgacgaatccggatttacacccaaacacccaaagttatcttaatttaatgaaactggatgatacatttcagctatctctgaatcctggcaatattaatattcttaaggacgactcttcacaagatatcctgaagacaaactggataaatactgagtggtccacggatttcattttaactcagtggtgggatgaaagcgagattgccaaattcaaagaagaacatagtgatcttatcaaaagaacaacaactgataaggatattatgacccatattctgatagcggaggtcaatcataaggattttgccagtatgtcaaatatttttgttcatttagtgaatgatattcctgagcggaaaaaaatgttttctattgattattcatttggatcaggtacagaaaggaaatcagaatcaaaaacgttttctttgtag

SEQ ID NO: 387536 - DNA, 327 bp, Salmonella enterica
atgaaagaaggtatttacaacgtagtgtttgaaagtaaccagcagtcggttggagaggggattggcgtggtgagtgggggccggatctacgggggagacataggatttacctgcagaggagtactgacattatcttaccttgagatggaagtctgccagtataacccggatgtgccttccgtctttggtatgcaagagagttataaacttgagatgcattaccaggaagtgggggaagggcagtaccactttaacggacatgtaaagggatatccggagaaacggatgacggcccgagcattatttcttgctccattacttgggtga

SEQ ID NO: 387537 - DNA, 633 bp, Salmonella enterica
atgaaccatgacactgaagaagcattacagcaccttgagaaagtgctgcgagagctggatgaagaaagccggacggaaacactgaacacaatccgtaccagactgcatgatctgagtccgttcagggacgaaccagtggactgtattttgtggataaaagctacaaagttacgggctaatgactataacccgaatgtgatggcaccagcagaacagcggctgctttatgtatccctgttaacggagggatacacccaaccagtggtggcggcaaaagcgtcatatggttataccgtagtggatggttaccaccgtatgcagcaaggaaaacacaaaccagccctgaaggagagactgaaggggtatctgccagtggtcgtggtacgacaggaaagtggaggggatggagaaaggcgggcggctactgtccgtcataaccgggcccgcgggcaacatgccgtcacggctatgtcagatcttgttcgtgacctgtcaagactgggatggaatgatgtgcgtattgcaaaggaactgggcatggatgaggacgaagtgctgagattaaagcaaatcagtgggttgactgagttgtttggggacggggactattctgagtcctggaccgtggaataa

SEQ ID NO: 387538 - DNA, 1236 bp, Salmonella enterica
atgaccagtagcagacagatctccggaggaaaaaaaattccccagggaatggatgtgctgacagcggcacggcagcgtattgccgatacttttgaacagtttgatcgtatatgtctttcgttttccggtggtaaagactccacggtaatgctgcatctagcagcagaagaagcgcgtaagcataaccgtaagttcagtatcctgtttattgactgggaagtgcagtaccgcgctaccatcgaccatgtggccgccatgcgggaacggtatgccgcatgtactgagcagttttatcacgtctgtctaccaatgacgacggtaaatggtgtgtcggtaatacaaccggagtggacggcctgggaaccgggagtaagctgggttcgtcagccgcctgagtgggccattacggatgagggatattttccgttttaccggtcgggaatgacatttgagagctttgttccggcatttaacgcctggttttcccagggggagagagcagccatcatggtggggatccgggctgatgaatcgctcaatcgttttctgtccatcagctcccggcgaaagctcaggttgtcaccggataaaccttggaccacgcggcaaccggacggaagcagttatgctgtttatccgttgtacgactggcatgtcagggatatttggcgttaccacgctcgtagcggacttccctgcaaccctgtgtatgacctgatgtttcgtgccggggtgagtttgtccgcgatgcggatatgtgaacccttcggtcctgagcaacgtaaggggttatggctatatcatattctcgagccggaaacctggtgtctggcctgcgcgcgcgtcagcggggcggccagcggtgcccgttatgtccggcacgggcgggattattttggtcgccaccagattgataaaccggcgcatcatacctggcagagttatgttcattttttgttgtcagggatgccgcctccggtggccgagcattaccggtccaaaattgcagtttatcttcgctggtaccagttgcgtgagtggccggagggcataccggatgagcaggaaggtgacaccggaagtcgggatataccgtcatggcgacgaatctgtaaagtcattatgcgtaacgactactggtgccggggattgtcctttagcccaacgaaagtacagcattatcgtcgctatatagagaagatgagactcagacgggaggagtggggactgatatga

SEQ ID NO: 387539 - DNA, 732 bp, Salmonella enterica
atgaatgagccggtactgcttttctgccagcagtgggtggtaacagaggccctggcatcattactggcatcgtcatttacagttccggttattccagtgtacgggctggatcagcttgtgtgtaaactcagaagataccgctgtagttcggttattctgggtatcagtccgcatgagcacgtagttcctctttaccgactggggccgttgttggtcggaagaccagtattatttgtggccagacatttctggtggactgattactgtctgcctgaatttgccggagtatccccgtgccgattttgctccttggatatgttagccgatatgcgtacccggtgtactgagataagaaaatttaaacatcttcagcagttattttcatctggcgatactgccccggttgcagactgtactgtatctgggatccctgacatggcacccgaatatattctggaacaggctaatttctggatgcataagcgtatgacagatgccggtttaaacggggtggagtatatggtgttgttattactggctgaaagtcgccggaccagaatgtcatcccatcttctcagcctttataaaatcaggggactttataagttgggaatgacaggacgtgtaatgaatttgtaccggggagtaaaagtgcgcccggagttacaggtaccgtttccgtctggagttcccggatctggtccctgtattggaggggagaatgaccagtag

SEQ ID NO: 387540 - DNA, 513 bp, Salmonella enterica
gtgaaaataaagacaatgacagaaaaaaatggtgatgataatgtatcccatgttgtaaagcgaaaaggtgtgcaaagtaattacgatgattttgtcattcctccaggtatgagtgattgggagaatgaccctctgtatctaattattgcccgatggtgtctgcagcagaaacgctgggtcagtcggatggaaattcagactgtgttccatattcctgcgcgcagggcttcatttcagatttcctatatcagccgaaaaaaatcacgtgtggtatgccgggctcgttactgtaacagtgaggaggggaggcgacagaatattgaactgtgggtggaggatattcttccagaatcaaggaataatacaggtaaaaaaaatacaacctgttctcaaatgaaaaaggtgcgggggggaagagtatcctccactcgcctgggaagtggtatgaccgggaacggttgtgcgtgggaaaaaatactgaaacgagtccgggaagggggtagtaatgaatga

SEQ ID NO: 387541 - DNA, 600 bp, Salmonella enterica
atgaaaataaaatcgtgttttctctacatgttattgctgagtgtcccggtggagagcatgacagttatggcagctgatctctctcccgtcagtggtaacggaaaagtgagcctctctatgagtctggaagtgcccacctgtaaagttagcgtggagaataccgcccagtcattcaatgtcgcaagtgttgaggaccggacgttgacactaccgaatgcttttactgctgaaaactgtaagggtgactcactggatttcaaggtgattttttcgactccggtaccccgtgatgggtggtggggacgagcaggttatgcgggggtactctgccatggcggtgttaaatgtttggaagatactgaccttcccgttgttttctatgttgttattccagaaggaaccaacggtgtttcaggggatataccactcggaagagttccggatagtagtacaggtaaaacggtgaccatcaagcctgactcgaataattatacattcaatgctaatacagtgatacctccagtaagttttgaaaacgcacagcagagtagtcatagtcgtatatctggttcttatacctatgtattttcttttaaatag

SEQ ID NO: 387542 - DNA, 612 bp, Salmonella enterica
atgaatattaacatttttctcctggttacgttgctgacgggaggcatgttggggaataccagtggggtcatggctgctgatcgtggttcgattccgggggggagcggggatgtggatattaatgtcagcagagtctccagaacctgcagtgtcgcagtctccggaaataatcagaatttgggtactgtttctttgttagtgcctgatgattacagtagcagttctctcaagagcgtgaccgtttttgagctccagggatgtcagaatatggtattaacgttaaccatgcaggccgaatctacagtagccactggggttagtccccgatcccggtatcaggggctatttcctaattatggttcttatgacggtaatttttatgaagtgtctctcagtggaaatggaatatccggtgggggaactgacggttcttttatgcatctagttccactagacggtggtctggcagatccagctattgtgattaggccggtcgtagacaattatcaactggaggccaccacggtttttaacctgtacatcaacgatttacttggtattaggcctggcacttataagacttggtatacctataactttacctacgtataa

SEQ ID NO: 387543 - DNA, 600 bp, Salmonella enterica
atgaagataaaatatattcccctgatagtgttactgaccgggcttgttggtagcagtgtggttatggcaggcgtattaataaataacggtagtggaatggtttcattctctcttcctgtgacaagcgggacctgtagtattgcggtcactgacaatattcagaattttttgttgacttctgacatccttgttgattcgaataagacaaaggttatcgccacaaaagataccacattcactctgacagggtgtaagagtgagcagataaatgtatcaattaaagcaaatggtgacattattgataataccttgggcgcattgggaggaatagttaattgtggagcgtccacgtgtccaaccattatggggtatcgggtcagattaagcagtgcaacagataatgttatttcaggtggttcgtcgattacgggatacaacaatataatttcattgggagggagtacaacgatgaaggtgaatcctgatagcgacaacctcattattaaagccaccactcttctttatttgtatggccttccggcgtctgatgacaatggcccatggaagacatcctatacctacaactttacgtatgcataa

SEQ ID NO: 387544 - DNA, 681 bp, Salmonella enterica
atgaacagaaagatagctgacatggtgcggctcctgttaccggtattcctgctggcaggcctgtcggtcagtatacaggcggtggctgctgctgttacagaggttgcacccgccggaaacagcgtggtgtcccgtagtaacggatcaatgactatgagtggactggttcagacaggaacgtgcagcctgtctgccagtaatgccaccatgaattttaaacccatggccttaaaagagatacaggccaaaggtcgtggaagtattattggtcagtttgatactgtattaaatattagtaactgtgcaggaactaaattaattgtatctattcagtctggggattatatactcgattcatccccgactgaggcattcttacgttacccaggaggggcggcaaactcaattgtaagtttatcttattcagttgagttatttgtaaattcaggatattgtaataaaattctcgcagagcagtgtaccactactccctcctctattttaatgccattaaacggctctcaattatcttctgttggggataattattataaaccggacaatgataattacaagatgacactgaagactacgctgtataatagtaaaaataatattaattcaatgttatttgcagctacttacactggtcattatatctatagcgtgacttaccagtaa

SEQ ID NO: 387545 - DNA, 906 bp, Salmonella enterica
atgaaataccggtttctgacactggtggtgatggcggcggtgagccggatggcgctggcagataacgtgacgcgtgtggacctgggcagccaggtactgcgggtgtcccagccgctgaatgaagtgttcggacagcagcccgtgacattgcctgcgttgtgtaaaacggactgtaataacgtgaaagtgaagtgggaggtagtggcccctctgttgcctggcgcggtacaaacaccaggggtgtaccggtttgacagcggtcggaaaggcatagcactgcagattgatgcgccacaagctggagggcaggtggaagccgaccagccactgaggttgaaggtgggactggtcaggacggagcagactgttgaggctggtactctaccgatgacaatacctctgctgaaatggactctggttcgccagggaggtgatgcatctgtaggagcggatagcggggatatagtggttaccggaacgttgacggcgggtagttgtgagccgaaggaagggacactgacattcagactaccaccagtacagcgagctgatcttcagaagacggccccggggcagccagttaagggggtgggagctaaacagtccattgcggtgacctgtacgccaggagtggccagtaaactcagtgcgttgtttcaggcgcgtactgcggaaggtaatccgggtattgtactgtctgatgagaatcccggggtggggttcatggtgacggatgatgtaaaaaaacagaccatcctttgggacagaagccaggcactggagtatccgataccggcgacgggacagacgcagataccgctgacggcattttacacgccgacgggtaaaccagtggaggctggtaaggtgtcagcacaagcgcagttcacgattgattaccagtaa

SEQ ID NO: 387546 - DNA, 2823 bp, Salmonella enterica
atgaagaatagtcttgtaaccaatctggttctggggattttagtcgtattatctctgataaataaacggcgggggggggaatttttggtgatgatgaatacggagaatacaaataatatacattatgaaatgtatattatttgtggttatggtatttctgtacgtaaaacccggttggtggcaatcatatcttcctgcctccggtctttaggctggaattatggctgttccggtctggtactgttgatgaccggactctggcacccggcgtatgctacagacagcatctctacccggacaaccgattcgtcttccccgtctgctgttgtagacagttcatctgacacctccagctcaatggcttttaacccggcttttctccgcctgtctgatggcgacaaagcgaataatattgacctgtcctattttagcagtaaaggcggacagatgccgggtgattatgaggttgatgtgatactgaatggtcagcgggtggacaccgcaacgctgcactttatttcacagcatgaccatcccggacaactgtttgcctgccttaagcaggaggatctggaccgctggggcatacagccattaccggacaacaaagcggggttgctgtgtaaggttcctgtatctgccctctattctgatgccagtgagcgccttgacctgggtaaacatcagtggttactgacaataccgcagaagtttctgttgccgcctgggtggatgcaggtttccccgagattgtggcaggaagggatgccagcgttgttgttgaattatgactattccggttatcagcagaccagtcagggacagagttcggacagccagtacctggggctggacagcagtctcagtgtgggaggctggcggctgcgtaataccagtaactggacgcagcagggcggttcatccagctacagtcgatggacgtcactgaatacttaccttcagcgtgattatgcctttggacagggggggatgctgacggccgggcagacgtacacctccggggacttctttgacagtttttcttttacagggattaaggctgaatctgatgacggaatgctgaattcagccctgacatcatattccccggttatccacggaattgccaattcccaggcgcaggtcactatcagacagaacgggtccattatttatcagaaaagcgtaccaccaggaccgtttgagttgcgggatgtgaacacggtgaacagcggggacctgcaggttgaggtaaaggaggcggacgggacagttcactcatttactcaggtctctgccagcgtaccggttttgcagcgccaggggcgtgtccgttatgggctgtcagcagggcgttaccgtaatgatggtctgtccggtggggacagaccactctttattcagggacaactggctgtcggacttccggcggagtttactgcttatggcggcattatggctgcgcaggattaccaggctgcaatggcaggggtggggcgatattcgtcgtggctaggtgcggtgtccgttgatgtcacccaggctcagtctcgtttccggagtctcatatccgggtcagacagacagcaggggcagcagctccggttcgcctgggcccgtggttttgacgccaccggaacgtcgctgaatctggccgggtaccgatatgcgacgcggggtttttacacatttaccgagttgcaggaactgaataacccggggggatacagagacaggaatggttatgatggcagtggctatactgaccagcacctgcgttcgcgtgtccaggttgccctttcccagccactaggctggcaggggaagttcgggcaattgtcgctgacaggcagtcatgatgaatactgggacgactcttcctccgggcagaactggagtgcatcatattccacatccatcagtggtgtgtcactgggactgtcgttcagccttaacagcacacctcagtatgcgcggactgacaaaatgatgactctgaacctgtcggtaccgttatcacgctggatggctggcagcagtgtatccgtgaacagtacaaccacgacttacaacagccggacctcctcgcaactgggtgtaagcggtgccggaatggatggtcggcttaactattccgtacagggaggctggcagaaccagggtggtggtgataccggtacggcgaatgcctcatggcagggcggatacgggcaggctgttgccggttacagttattaccagggaggtcgccagtggaactgggggctccatggtggactggctattcatcctcatggcctgacgctgtcgcagacgatgtcaatgaacgacggtaacgcactggtaatggcacccggtgcggcggatatccgggtgaaaaacggaaccggagtgcataccgactggttcggttatgcggtagtaccgaacctgatgagttatcagcataaccgtgtagctctggatgtgagcgacctgccggacaatgtggatgcgaaaagcagtgaccgggatattgtccctactcgcggggccctggtggcgtcaccattccggatagctgtcggatatcgtgctcttgtcaccctgaaacgggcggctggaagtatcccccttggggccagtgtcgtggtgaaacaaggtgatgatgtgatatcccgtggggtggtggataacgaccaggtatatatgagtggattgccggaaagcggtacattgcatgtaagctggtataacgggaatacggaactgaaatgtcaggccgattatcatctcaccccgtctgatagtggtctgagccagataacggccgtgtgccggtaa

SEQ ID NO: 387547 - DNA, 726 bp, Salmonella enterica
atgaaacgtttgttttatttagtagtgttatttgttgcgtactctgtccaggcggtggctgcaaacggagggttttacctcggtcagacacgggttgtatttccgtcagacaaaaaaagtgtttcactccaggtgacaaaccaggatgctaaaaaagactggcttttgcgttcctgggtcagtcagtatgatgataagaataaatcatccactccgtttattatcactccacctctgtatcgccttgatggtaataacagtatccagttgcgtattaatgctgttgatgtcagcaaactaccaacggaccgggagtccgtgttccgtattaatgtgatggccattccacctgagactgcggcggcggcgaaaccggaaaaagagggaactgccaccggtagtattcagtttgctcttaatagccgaattaaattatttttccgtccagttgcgttaaacagcccggaacaggcagaaaaagcctgggagaaggttacggttcgtcagcaggaagggaagattatttttaataatccgacgccttattatattacgttaactaatattgatgttaatggtgtcggacttaaaagtgagcaggcagataccatgattgctccggaaggtgagttgacattgcctgtttccggaaagactcggacacttacttttcagacgattaatgattatggtggcctgaccaaaaagaaaactgtggcattttaa

SEQ ID NO: 387548 - DNA, 624 bp, Salmonella enterica
atgagactttcaaaatacgcgttaattctggccggtctggtatctagcgcaggcgctatggctgcaaccccaactgctccagttgttggaggcaatccaacaggtacaattaatattgacggggttattcgtacctctacctgttctattggctctccaagttcgacggatgtgggctttaatactagtaaggccgatattaacgctgtggcttctggcggtttcgttgccaaagatcttactccagtcactattcatgtcagcagttgtaatgatacggcgttgggtatgactgttaaggcgactaatactgatacagccaatgtaagccatggtttatttgataaatcacaggatcctgacagtgcactatattatgtcgttggcctgaaggatgacgcgatggttagtggtggcgatgatacaactgttcctggttatcatatcgttcaggttgatggtaatgctcctgcaggtaatgcaattactatcaaagatacagccggttcaggagagtttgatctgaatttggcgactatggtggcgcgtaacggtaatacctcaccagataatctgagcagcactctaaataccacttatacctataccttcacctacgcataa

SEQ ID NO: 387549 - DNA, 495 bp, Salmonella enterica
atgacccagcgtaatgaaggtgtaacccagcatatctcgattatgaaagccgatatatctgtgcgttccatcaccgaatcgaaaaagattagtggtttgccagttcgaaaatctgtcattgttgttgtcataaaacattgcatctataaatgcgtcttgcaatgccctgaatgtggtgttgagcatgatcgagatgtcaatgcggagctcaaaatctggctgaagaggatacaagaattacaggaaacgggaattcttgtcgctgtctatgaaggccagcgtaaatatgtaatatgtcacacagacggttgcgatctgaaaagtaggaacctcgtctaccggatggggagcagtcaccaaatttttgatatcctccccgtcctgaaggacagggttttacggcgcaccagaagtatgtctgaaaaaattaaaaagcggactgtctcaccaagggaaacaggtaagacaatccgaactacttgcattctatattga

SEQ ID NO: 387550 - DNA, 591 bp, Salmonella enterica
atgaaaaagagtacggcgggtcagggtgcagcaggggcgttactgctggcagggctgatggtgagtgcgggcgcaatggcggcctccggtgacccggtacagggtggttctgggtctgtgaccatcaacgtcccgatagtgacgtcaacctgcagtgttgctgtgcctacggaggtggattttgaccaatcaggcagaaacacaatggttggaggggatattattataaatacgaaggatatggatatcacactcagtgattgtagtggtaaaaccctggagatgagtacacgtggtcatgacgtttctacggcggatgggacgaaaggatactttagttccggagatccggatcatgcgctggggtataagatttatgttccaaagacaacagagattactggtggagctgtaagcacaggtgatagttggattgcgaatctgaataatacttcttctttaactattaaacccaccagtgataactatcggatttccagctcgattaaactgttaagttcaggaacaaatcttacaaatttgggtaccactgtcagcggtggttttgattatacctttacctaccagtaa

SEQ ID NO: 387551 - DNA, 597 bp, Salmonella enterica
gtgaaaaagagtatggcaggtcagggtgcagcaggggcgttactgctggcagggctgatgatgagtgcgggcgcaatggcggcctccggcgacccggtacagggcggttcgggttctgtgaccatcaacgtcccgatagtgacgtccacctgcagtgttgcagtgcccacggaggtgaattttgacccgattaacagaaaatcgttagacgccaacggcgaatggcaatttataggaagtaaaaactttgatacagtattttcgaactgtaaggatgaaaccctgcagatgagtgtgcaggcttcatcaattgtatttgaaaatggttccttagcgtatttttcttcaggagatcctgcccgctcattgtattatgatattcagccgccaaaggatgcagagattacagggggaggtacggccatcaattctacaagagtatttgctcttgataatacccgtcctgtgcttattaatcccggcagcgataactataccatgacgtcaaaagttgactttttacgtggggctgggggtgtgtttaaagttggttctgcagtaagcacaagctttacttataatatcacctaccagtaa

SEQ ID NO: 387552 - DNA, 417 bp, Salmonella enterica
atgctcgccgatcaggttgaaaaatcaataattaatgatggggttcgtcgtagtttatccaataagaatatggatatcactctcagtggttgtagtggtaaaactctggtgatgagtacgcgtgctcatgccatttctccggctccagctatttacggatactttagttccggagatccggatcatgtgctggagtatctgattcgtgtttattcaagcggagaggagattactggtggatatgtaagtgcagccagatatatgtatctggataatactaatcctttaattcttaaacccaccagtgatacctatcggattgccagcaatattcaactgctaagtataggaaaaaatccttcaaatctgggtaccactgtcagcggtggttttgattatacctttacctacaagtaa

SEQ ID NO: 387553 - DNA, 333 bp, Salmonella enterica
atggaaaaaccaaatatttatgatcagaaatacatttcaggtataaccagagaacagtctgtatttaaagttaatggatacattaataaaaaggcagaactcactcattatatgcaacgtatgtattcagactctcacgttaattttaaaaccatctccagggatgaagccaacacctctgaaggaagttggttaactgttattacagggaaacgtccaatgggacagttttcagtaaatagtctttattcaccagtgttgcattcattgcttgaactaccaaatattggatgtaaaatttcccccaaagaggacaatagtttttatatataa

SEQ ID NO: 387554 - DNA, 1902 bp, Salmonella enterica
atgccgggaacgatttcattttcacctcgtagcatttattttcatataacaacggacaaatataatacttctcctgcaaaagacaaccctcctgttgaggatgggggaatttccaatatattttcagttaatattctcaccaaagaagaaccctatttttccgttaaaagagacaaatgtctgaatttaaatggccaggtaaacgatacaatttcttcgatcccgatatattgtcgacatattgctttattttggatggcgtgttttaatgaaagtgggggtcggattgattatcagcaattcacttccagggatgctatcggtagtcatatttctgttgaagaatcagagagagtgtatcagtctccaggggcaattcactttgttgaggatgaaaactgggggagtgctatttttgatatctttaatgaaatgaaaaatcatggtgataaatttaaagcactggaagtaaatacagcaaaccacagcttagtattaggtttaaaaataaaaaataaaccgaatggagatatgtgtgtaatttatctttatgacccgaatcatacagccactcatcagcgcgttgaatacagcatcatcaatcaaaataaaataaaaaaattgaaagcaaatgatttttttgacgaaaagcataagaaaagttacggcttggtatccgacggagtgtctatatttatagacagacataaaccgatgagtatatcttctataatcagatatccgaataatttgtttcatccaaaggtgattcatcatgcaatgagtatggggctaactgagatcatcctaaaagtggctgaagacatgcaaatcctgaagctcatgggggatgaaatggaatcactactggctgcacgaaataatgatggttattatggtttggctattgctctccagaatggacatgcagatacaatccaggcatatggagagttaatcaaaaaagcagaattaaacccggataaaattgcagacatactgcaggccaaggtaaagataaagttaaaggaggaattaaaggaggcgtatgtgttcggattatcacttgctcttcagaatgggcatgcgcatgccatacgtgtttacggagaacttttaaatgcaaattcagcagtgtttgatcacgataaattggtagagttgcttgcagctcatagcgtggatggagctggccatcggcttccagctctatatttagccctccagcatgggtatgctgatgctgtactggcgtatggagaacttctcaaagcagcgacgctcagtttggatgaaacagctattttgttggctgcaaagagatttgataatgttccgggactgcttatagcgtcaaataatgggcattccgaggctgttcttgcttacggaaaactacttaaaaattcatgtctgactgcggataaaacagcagaattacttgcagcaaaaaataatgatggagtatctgctttacttatagcgcttcagaacggacatgatgaggtcatcagagcttacggacagataattaatgacctggagtttagcccaacagaaactgaacagctattggttgcaagatgtgagagcggtttaaccggtttatttttagcgcttaaatatgggcaggtgaatgcggcctgtagatatggcgaattgcttcgttctgcggggttgagcccatataacgtcgcggaatgtctggcagcaaaaggtgtggatggtcagccaggaatatgtatggcgtatcagaatggagatactgataccatgcttttgtatgcaggtttaatcgattatgcaggggttacggctgaggaaatcgcagaacatttatcagaagaacagaaagtctattttcttgatgttgttaatgagtgtcagaagattaccttgtag

SEQ ID NO: 387555 - DNA, 192 bp, Salmonella enterica
gtgatggagctcttggacgcaggaggaattatggctaaaccgtcctatccaaccgacgttgaaaaccacggaggtaaactccggatctgcttccactacaaagggaagcgcgtgcgtgaaaatctggggggggctgaccccctaaaaatcgcaaaattgcagttgagttacgggcgtctgtctgttttttga

SEQ ID NO: 387556 - DNA, 234 bp, Salmonella enterica
atgactataggccacgtttgcgtgagtaagttcttgcggtctataacagcctggcgcgggaatatcgttattgtgctggaaggcgccggaggcccggcagaaatcaatctgcgcgatcgtgatatcgtcaatatgggtatggcggaaatagcgcactgtccggttattctggtagcagatatcgatcgaggtggcgtattcgccgcaggtattgtatatcggcacctcgcataa

SEQ ID NO: 387557 - DNA, 207 bp, Salmonella enterica
atgaactgtccaggtttatgggacagttcaaataccgggcttttttttatctctattcttattgatttatcgcgtttgcttaatattaacttaataatctgtgtttatcgtaataaagataatctgaattgttttcgtctgcgttgcactttatttactcaggcgttaaaactttactatcttatcaggatgcgaaatacatcatga

SEQ ID NO: 387558 - DNA, 441 bp, Salmonella enterica
atgatttcatttgagatattaaaccgtgcagcggcttctcgcttcgaaagttctccattgagcaccgtccgaacaacagcagctatgaactccggggagtggcggtcatttttccagcttatgccatcaatatcgtgtagttgccatgctctgacccggcgacaaacagatgctctttcgacaccaaatcgttctgcggttcggtgtgtcccattattaccgaagaggttgtgtctgattactgccagtctggttttgagtgaatacctgggctttgccataaaaaactgcaccttactcagttggggggccaacttttggggtgcagtcaaggagcgctccgggtctagatttactgctgggctaaatcagtttaatccggcaatgccgtatcaaccccgacatcttcgcagacatattggaatacataaatgcgaataa

SEQ ID NO: 387559 - DNA, 1167 bp, Salmonella enterica
atgattaactatccattagcaagtagcacttgggatgatttggaatataaagcaattcaatcggttatagactctaaaatgtttacgatgggggaatgtgtaaaaaaatacgaaactcaattcgcagagacatttggaagcaaatatgccgtgatggttagctcaggttctacagctaatttattaatgattgctgccttgttcttgacgaaaactccgaaattaaaaaaaggtgatgaaataatagttccggccgtttcttggtcaactacttattatccgttgcagcaatatggtctgaaagtaaaatttgttgatatcgatataaatactttgaatattgacatcgagagtttaaatgaagctgttacagatactactaaagcaatacttacggtaaacttattaggtaatcctaataatttcgatgagattaggaagataattggtggcagagatattatcttattggaagacaactgtgagtctatgggggcaatgtttaatagtaagtgtgcaggtaccttcggtttgatggggacatttagttcattttattctcatcacattgctacgatggaaggtgggtgtattgttactgatgacgaagaaatttatcatatattattatgcattagagctcacggctggacgcgaaacttaccaaaaaataatagagttactggtatgaagagtgatgatcaatttgaagagtcattcaaatttgttttgccaggttataatgttagaccactagaaatgagcggtgcaataggcatagaacaattaaaaaaattgccaagatttatttcagtgagaaggaaaaatgctgagtattttctcgaaaaatttaaagaccatccatacttggacgtgcaacaagaaactggcgagagtagttggttcggtttctcatttatcataaggaaaggttctggtgttatcaggaaagagcttgttgaaaaattgaattcggcaaggattgagtgtagacctatcgttactggtaatttcctgaaaaataaagatgttcttaagtacttcgactataccgttcataacaacgtagttaacgctgagtatttagacaagaatggtctttttgttggtaaccatcagatagaattatttaatgaaattgattatctcagaaaaatattgaaataa

SEQ ID NO: 387560 - DNA, 924 bp, Salmonella enterica
atgaaaattctgttgacgggttcaaccggaatggtcggacgtaacattgttgataatagtaattcgagtaattatgagttactatgcccaactagcactgagttaaatttgcttgataataaagctgtctataattatatctcatgctattctcctgatttaattattcatgctgcaggtttagttggtggaatacaagcaaatataaaacacccagttgattttctagtgtcaaacctaatgatggggattaacattgttaatgaggctaaaaattgtggtgttaagcattttataaatttaggaagttcttgtatgtatcctaaagatattgaaacagcaatttctgaagatgctttgcttacaggtaagttagaggatactaatgaaggatatgcaattgccaaaatcactgtagcaaaactgtgtgaatatataactagagaaaataaagagtatcattataaaactatcataccatgtaatttatatggaaaatatgataaatttgatgaaaattcctcacatatgattcctgctgttataaatagaatacataatgcaaagattaataatattaaagtaattgacatttggggggatggtgagtcccgccgtgaatttatgtatgcagaagatttggctaattttatttaccaggtaattccaaacatccaacggctgccaaatatgctgaatgttggattaggtcatgattttacgattaatgattattacagaatcatagctgaagaaatagggtatacaggtggttttactcatgatttaacaaagcctgtcggtatgagaaggaagctagttgatatcagtttgttgaaagagtttgactggaaatatcagtttgaattgaaagatggtataaaagaaacttataaatactatttggagaatatatataaatga

SEQ ID NO: 387561 - DNA, 756 bp, Salmonella enterica
ttgaaaacagttagcgttgttattccgtgttttaacagtattggtactattgatcaagcgctaaattcagtttataagcaaacctataatattttggaaattatatgtatagatgattgttcaattgataacacatatgaatatataaaaaacaatcatcctacagtgaagctttttaagaataaaaataatatggggccagctgccagcagaaatatcggtgcctcatattgctctggagaatttatagcatttttagatgctgatgatacttggttttcagataaaacaaaactgcaaatggctttaattgaaaggtatgggcttgattttattggatcatcatttgtagtagctaaaagtgaaaccgaaacgaatacatcaacatgtcgcataatcactactagagagttagcattcaaaaattatttcccaacaccgtcagttatccttcgaaaggatttagttcgtttcgatgaatcgatggggttcgctgaagactatgatttatggttgaggctatcaatagcaaactgtgttatgggatttatagatcagccactggttgctcttgggaaacctagttttggttactcaggattaagttcaaatctatttagaatgcaatgcggtgaattaaaatctttatcaaactctctaaaaaaggatttagtttattattttgctataatgtggtcaattctaaaatttttacgtagattagttattgtttcatttaggcgcatcctaagttaa

SEQ ID NO: 387562 - DNA, 795 bp, Salmonella enterica
atgttaacagaagtcagagctgtttctactactaaaccgctagtatcagttgttttacctgtaaataaatttaatccttatttagatagggcaattcatagtattttatcacaatcttatccttcaattgaattgattataatagcaaataattgtacaaatgatttttttgatgctttaaagaaaagagaatgtgaaactataaaggtgcttagaacaaatatcgcatatttaccatattgtttaaataaggggcttgatctttgtaatggggattttgttgcccgcatggattctgatgatatatcacatcctgaaaggattgatcgacaagttgactttttaataaataatccggatatagatgtcgttggcactaatgcagtatatattgatgaggacgatgttgaacttgagaaaagtaatttgcctgaaaataacaatgctataaaaaaaatgctaccctacaaatgctgtttagtacatccttcagtaatgtttagaaaaaatgtggtaatatcctctggtgggtatatgtttgcaaattattctgaagattatgagttatggaatagattggcagtggagggaaggactttttataatttatctgaatatttgctttattatcgacttcataataatcaaagtacatcaaagaataacttatttatggttatggtcaatgatgtggcaattaaagtcaaatattttttgttgactaaaaaagtaagttatcttttgggaattattaggactgttttttctgttttttattgtaaatatataaagtga

SEQ ID NO: 387563 - DNA, 1272 bp, Salmonella enterica
atgtttaagaacaaaaaaaaagcagagatgataaaaaatggaatatctaattatgtttgcgtagcatggatgggtggaattagtattctgattttaccctattatctgcatatacttggtgccacccagtggggaatagtagctatttgcattactatacaggcgttaatgttattagctgatatgggcatggctcaaataatgccaagagatatagccaagcatagttttgataaaaacaaattatatgctatatataatggcttttataaggtatatttatatcttgccttttttatatcaacaacaattattatattaagttattatattgtctatcattggctaaatgtagcaattaaatatgacactttggtttgtattgtattgttagctattcaatttttattccaattccctaataatgcaaatataggtttctggaatggaacattgcaacaacataagtcaaatatcagacaatgttttttctttacgttgagacatatcatcgcttttactcttgtttataactggccatcggcgatatcatatcaaatcggtttttgtttagttgctatatgcgaatctttaataaactcttataatatttattctgaattgaaaagctacaattgtaaaaaagaatatttgtttagtataaaaaaaatattttccgaaagtggtgctttatctgctgctgtacttattggattactggtaacccaactagacagaataatccttagccgaacgcttgatttaactatctacgggtattatatattaggagcaacactggctcaatattttcttcagctacagtacccactacttagagttttttttccacgtttagctattaacctaaataaaaagacaatttttgcattgttaaaatgcatgtgtcttttctgcgtacttccatgtattattatgataataatagccccatattttttgaagtattggttgaataattatcaagcagcaatggtagctttatggcctcttaggttaattcttggtgcaatagcaattaattctctttataatattatttatcaagttcttctaatcaaagaagaaactaaattgatactttttataaatataatttcgcttgtagctgtatcgattgttgtttccgctttggctgaaagattgagtgtaatagctggtggtattgggtgggtagtttgtgctttcatacaattgataatttcaataatttggttttttaaaaaaaaggatagtatattatcatgttaa

SEQ ID NO: 387564 - DNA, 546 bp, Salmonella enterica
ttgagtaatgacagcaccgcgcgcggttatctgacgcctgtcggcgatggcccccggtatgatgaggcgctggagcgtgaaatcagtcggtggattcgtggtgtttctggcttgccggccacgcttgttttcccccgatggactgaaccgcagccgcagatccccaacaacggggtgacgtggtgcggcttcggtatcactaccgttccccagccgttgagccagtccgatgttcaggtttcggaagaacagtccgagcaatggacatgggaacaggtcaccgtgatttgctgcttctatggccctctgggggccagcacggcatcaactttccgtgcggggatattcgtcgagcaaaacaacgccgaactgaaccgctcggggctttcgctggtggaggccgggactatctataacctgccagaactcattaacaaccagtgggtgaggcgttatgacctcaccatcacgctgtcccgcaaaaacatccgtacctacaacgtccggacgctgaaagatgcgcccgtctcatttttcggagactaa

SEQ ID NO: 387565 - DNA, 405 bp, Salmonella enterica
atgcctcttctcgatgtgagtgatgttcttctcgatcccgacttcatggacaccagtctggtgtgtcaccggcaggttcagacggtggatgaggataatttcacgaaaaacacagctcaggatattccattctctggcgtggtgacggttgaccgttcgctggaagcccgacgaatggaggcaggccagaacatcagcggcgcgatcctcatcgtgacgcagttcagattaacccagggccagcccggtacagacatctccccgcgacttgatgccgatatcgtgagctataacggacgcgactatcgcgtgacgttcgtcgacccgtacacccgttacggtgccggattcgtccaggcacattgtgagctggtggactttaacggagggacgccagttgagtaa

SEQ ID NO: 387566 - DNA, 510 bp, Salmonella enterica
atgaaaaaaagcgggttaacggttcgcgccgacaacgccgtatctgttctggaatccctcagacagttatccggaatggatgtactggtgggaatccctgaagacaaggcagggcgtgaggatggctcaccgattaataacgcggaactgggctacctccactcaacgggcgcaacagtggaaatcgacggtacgacagtcacgcttcccccgcgtccttttctggagatggggatcgaggactcaaaaccccgaacaacttcacacctcaaagcagcggcaaccgccgcgctggagggacagactgaagccgcaatgcgtgagctggagagcgccggacagattgctcgtgatgctgcaaaagctgttatcggtgctggcgaccgactgcaccctctttctgagaaaaccctcgaacgcagacgggctgagggcattcccggtgacaagccgctgtatgcccacggttacttgctgcgctcaattaactacgtcgtgaggaaaaaataa

SEQ ID NO: 387567 - DNA, 411 bp, Salmonella enterica
atgccaaaaaacagtcttctgccaacaagtgaacagttccgctccgatttccctgagttcgccgataaaacccgataccctgacccctcagtaaatttctatctggggcaggcagatacaatcctgaatcaggacgtacagggcgatcagttcgtctacctggccgaactattcaccgctcactatacggagctgcgcggtcgtacgctggcctccgctgtcgcaggtggtgtgaacagcaacggcgcggcaggtgtcgtgtcctctaaatcagtggataaggtttcagtgagctatgacgtgtccggggtaatcaatccggatgccggtttctggaacagtaccgcctacgggcgcgagttctactggtggtggtccatgttcggcgccgggggcaggcaactgctatga

SEQ ID NO: 387568 - DNA, 369 bp, Salmonella enterica
atgaagtatctcgtaaatactggcgtgacgttgagtcttgcagatggttccaggtatgaaatcaccaaaggtatccacagtggtgctgatttcccggataacgtgaggtctcactgggccttcgatgcttatgcgaaacagattgacgatgcggaagcggataaactggaagcggttaatgcagacctgaaggcatatgttgtttctctggaaagcgctaacgctgaattactggcacaaatcgccgaaaaggataaggaaattgccgggctgaagtctgctgtaacaaagccggatgataaatctgttgaaagtgaagacaaacaggagactggcaatgccaaaaaacagtcttctgccaacaagtga

SEQ ID NO: 387569 - DNA, 948 bp, Salmonella enterica
atgtttacaattgacagagcgactatcgactccactggcgcgtttctcgtcggagaactggagcgtatggaccagtcgctgaatatgccgctggtgtccgttaagtggacccgtgacatgccattgcgtagcgatatctctatcgcggatgaagtgtcgtccttcaccaacaccgatttttccagtgtcggcggcccaaatccgactggtaaaaactggatgggcaagaaaggtactgccactccggggcctgagctggatattgttcctacccgtaataacctgactccgtgggcaacggaagtctcctggacggttcttgagctggcatctgctcaacagctgggacgcccgattgacacccagaagtatgaagccatgaagttgaagtggaacatggataccgatgagcaggtttatatcggtgatgcagttctgggcgtggctggcctgttaaatttgccggatatcacaccactggccgccgccgccgcatggacagccacaaccgatccggacgtcatcctgcaggatattaacctgttgctgaccgacgtctggatgcgttctggttatgcagtctgccccgctaaaatcggccttgctccggagctgttcggcctgttgaccactaaaaaggtttcctcggcgggtaacatttccgtacttgagtacgtgaaaattaactgcatcgcgtatcaggaaaacggcgagccgctggaaattgtctccatcaagtgggcgtctaaacgtggggctggtggtgcccaccgtattgtggcctacacccaggacgaaaaatacattcgcttcccgatggttccgttgctgaataccccgctggaatatcgtggtatgcagcagttgactgtctactacgggaaactggggcaggttgaagcgccgtattccaatacgatctcttacctggacgttccggcatcctga

SEQ ID NO: 387570 - DNA, 504 bp, Salmonella enterica
atggctggaaatgcatatttaacccgcatgccccttgggtttgtcggtgccgtaacgcgtccccgtgatctgaccattgagccggtaatgctggatcataacaaattgttttcaacctacggtctgcctggtaagtacgttgataatcagttcgttccgctggtggatggcgacactatcgacaaggtaaagggcattttcgtccgtcctttcccgatcacttcagcgcctgatctggcctggctcggtgtcactgcgaatcaggtcggtgacaacctcaaacgcggttacatctgcgttaaagcgacagcaggtaacgcgacggctgcgaagaaaggcgatccggtatacgttcgcgtggcgggtggtaccagtcaaagcccggttggctctttcgtgttgtctccggactccaccgcatcaaatacccctcagttaacaaatgctgaggtaatggggccgggtgaagctgacggtcgtatcgaaatcgcctataacatctga

SEQ ID NO: 387571 - DNA, 1278 bp, Salmonella enterica
atgaaatatttcttcactacccgcctgggcgagactcgctacctgcaggcggatggctctctgctgtgtaaagatgttccgatcgcacgaacgggaacgcaggtctacttacccgaagaaatcgacctcgagcctgacgccagcggcacagtgacggtctggcgaacggaggatgaagtgttttccccggagacgatggcgagctttgagggcgtcgccgtcacgctggggcatccggaggacgaagaaggcaatgtcgttttcgtcaatccttccaacttcgcagagctggcccacggacatattcagaatgtccggcggggtgctggtgataaatcggatctgctcattgctgacgtgatgattaagcggcaggaggcaatcgacgcagtgaattcaggtctgaccgatgtcagttgtggctacgacgctaagtacaggcaactggcacccggcaagggcaagcaataccaaatcacaggtaaccacctcgctgtcggcattgatcgtgggcgggctggtagccgctgtgcaatcggggattccatcccatcatccaaaggaaaaaacatgaaacctacgttattacagaggctggtagcggctatccgcacgcgagatgacgatgcgctggcccgcctggctgatgaggccgccgcagcagatttaccctctgatgcgatgggatctatccccgggccgacaatcaatatcaatgtgccgtcacaggctacggctcttccgactgagaaccggaccacaacggacgaaacgccggaagatgagaagaacaaagacaaaacaaccgatgaaggcgtgccggaatgggctgtggctattctggcgcgtctggacgcactggaaggtaaaacggcggacgatgctccggatgatatcaacacagccgatgaagatgcggaggaagacagcaaagtgacgggggatgcggcatttaagcgcaacctgatcgcagatgcggaaatcatctgtccgggctttcagccagcgggtgataaaagtctgaaacgccaggttctgaaccatgcgctgcgtactggcgacagcctgaaagctttcggtgtaagtgatttttccaaagcaccgaaatctacggtggatgccgtgtttaaggctgccatcgaaattaataaagccaaaaaccatcttctgccgctgaataatggtgtccgcaccaccgacggcagcaccagcaccaaacacatgtctccggctgaactgaacaagatcaatgccgacttctggaaaaatcgtaaataa

SEQ ID NO: 387572 - DNA, 534 bp, Salmonella enterica
atgtttgcccaggtcgagcaggaggaatggaatcagtggaaatcggtatcagaggaaatcggcgctggcctgcgcgatgtggtgggtaatacccccgtagggcaggtggcgcaggatatcgtgtaccgccagattcagctgatgaagtccctgccgctggaagcatccgatcgcgtgatggacatacaacagcgcgcaatgcaggcggttatcactggtgaacgtccggacgagctctacgagatgatcatggcctccggtgacgtggccgccagcagggcgcagttgattgcccgtacagagactggacgagcaactggcgcgctgactcaggccagagccctttcggttggctcagatgggtactggtggcgtatcgaagggtccggaacgcgcgattctcaccgcaggatgaaagataaatttgtgcgctgggataacccgcctacgctggacggtatgaccggacacgccggatgtttgccgaactgcaaatgctggcctgaggttcagatcccacccccaaggaaatag

SEQ ID NO: 387573 - DNA, 1470 bp, Salmonella enterica
atgtcccgaaagaaacgccagaacggcgcacaacagcccgttaggacagctgacgggtacaataatttcacggccaaacttggcagcgataccagaaacatccagacgggcggaatgtacatgcccggctacatcagccgaaacagggtgatgctggagtttgcgtatcgttcatcgttcctcgtgggcgccggtgtggatgctatggccgatgatatgacccgcaagggcattaacatcagctcaaagctgaaacctggtcaaaaggggaagttcgaaactttctgggatgatcttgccatctgggatgggcttaacgataacctcaaatggtcgcgattgtacggcggcgcggtgctggtggtcctgcttgaaggtcaggatatgtcctcccctttgaaactggatcgcatcaaagaggggcagtttaagggcgtgatgagccttgaccgctggatggttaacccgagctattacgatctcgttaccgattacggtcccgattttggaaaaccgaaatattacaaggtaatcacgaaccagcaggggattcccccctggaagattcatcacagccgtgttatccgcatggagggcgatacactaccgttccagcaggcccagacggaaaacggctgggggatgtctgtggttgagcgtattttcgagcgtatcgagtcgtttgatactgcgacggtcggcaccacacagttgatccacaaagcgcatttgcgaacctacagcattgctgaacttcgaaaaatacttgctgcaggcggcgacctcgaaaaagcgctgatgaagcacatggacatgatccgacagtttcagaccatcgaaggtatgaccatcatggacgctgcggacaagttcgaaacgcatagctacacgttcgcgggtatcgctgatgttcttctgcgctttgctgagcaggtttctggcgcgacgggaatccctctagtccgtctgttcgggcagtcccctgctggcttcaacaccggcgacggcgatctggaaaactactacagccgggttaactcactgcaggaacgacgcttacgccgccatattcgctggttgattgatatttcctggcgttctctgttcggcgagccactgcctgatgatttcacattcgagtttaacaaactctgggagatgtcagacgtcgaccgtgccgcgatggcaaacaacgtagtgaccgcacttggtatcgccgttcgcgacctcgggatgcctccggcagcagcacttaacgacctcaggaacatttctgatgtgattggcatcggtggttctgtcactgacaaggatatagaagatgcgaagacccagtggcaggaggatgaacctgaaaccatccctccgccgtcgttcggagatccagtatcgaaaaagcctgttggcgatagcaaaccagatagggcagatcgtcgatggtacttacgatggttctcaggccagcgctga

SEQ ID NO: 387574 - DNA, 189 bp, Salmonella enterica
atgatgacctttaaaagtatcgataccgtcctgctcttcgttgccgctgataagctttcccagcgtgaatgggactggattaagctgatgaagcccatggccccaccaccggtgatggtcgtcagtgccatactggagcaccgtcacgatactgcggcactcacccgcctgcagggcatcgggcgttaa

SEQ ID NO: 387575 - DNA, 300 bp, Salmonella enterica
atgtatccagtcgcagtcaggcaggcggttaagctgggcagcgatccacaggtcagttgcttttttcccgcaggaggggcaggcgttagtgaggtatttaatgtgccgacagtcgggattatcgcaaccatattccttcacgccggtgatgcgggtgccgcaggtcagcatctttgtgacggcttccacttcgatatcgcacagcccgccggcatccaggaaggaagtccagcactggttggcggtgaacagttttttgagcgggcgggggctgaaaccagaaaccacgggatcgattaa

SEQ ID NO: 387576 - DNA, 747 bp, Salmonella enterica
atgcacacctacggccggcagctcaatcagcatccgcacatccacgtttccatcacccgcggcggtctcgataccaaacacggcgtctggcgcgagctgttcttcaaaaaacagcagattgaagccatctggcgcggcaccgtcatccgcctgctgcgtgccagctacgctagagtcaatcccggcaagcttcccaaccccggccatatccgcgatgagaaacagtggaagcgctacctgcaggcgcaatatcagcgccactggaaggtccacttcgccaaaaagacccatggcgcctggcacagcgtaaaatatctgggccggtacctgaagcgcccgccggtggcggcgtcgcagctccgccattaccgtggcggttcggttgttcaccagtattacgaccacaacacgcagcggcataaacgccagaaactgagcaggaagagatgctgtggcgttacgtcagccacatcccggcgcgacattttaaaatggtgcgttactacggctttctggccaaccgcaagcgcggcatcgttgatgccgaaagtctacgaagcattggagatgacgccacgcgaaaagccgcagaagccggggttcgctgtgctgatgaaagcgttcctgggcaccgatccgtatcagtgcattctttgcaaaggccggttgcgttttgccggcgccatggcgggcgagcacgccacaaaaatgctctctgacaggcagcatcggatggaaaaaaagtga

SEQ ID NO: 387577 - DNA, 1521 bp, Salmonella enterica
atgctacccagtaatgatattcgccccggacaaaactcacaaatcagcagtactaatgttccagctatgggagtcgctgcagacccgagcagtgaaaacgaaaaatatatcaaggcttggcaggagtggaaaaatagcgcccctgagggagggagagaatccagagaattagctgtaaacgggctgtatgattgtttgcaaagacaagcttatcgacttgagttggttaaccttgagttaagttgtttacccgtcttacctacacatataacaacgttggatgtgtcacataaccgactgacagcgctcccggacctcccttcatcacttaccagccttgaggctgatgagaaccaattgacagcgttacctgccagtctgccagagaggttagagatattacgttgcgattataacttgctggaaactctgcccaaaacactttcctctcttccacttcgccatctgagcgtgtcagataaccgactatcagcgttgcctgaaggtatagcccatctatccggtgggacaataaacctgcagcgtaatccattgtcagagcaaacaatcaaggagttacagtcgatgacggctacagccggttatcaggggccccgcatatatttcgatatgccgcgagagataacttctgtacgccccgaacgacttcttaccaattgcgtggcagactggttttcctctggatgcgaagccctacccatagattttctgcctgaatcaaggaagacgtgccagcacaactcccccagcggagaggatggttcaaggaatacagcgataaacaggctggatggcatgaaggataagcttaagctggctaatcctgagctctgcgatcccatgcagaccgataaagctgttcatacagataaaattgattcggagataattaaggcatttgacgataaatataagcaaagcttgccccttaaggaacaaatagcgggtaagtatcactctattgaaatgtgtctagccattagagggagaatgaaagcgattaaatcaacagctggctatttacagaaccccacgacagaaaaacgtccattttttactctatcaaaaaatgaaagcactggatacgtactgcataaccagttttcaggcgaacgtttgactgccaatgggaaattttgctttattatccccgttgatgagccaaatagtatttttttactggaaaacgatccaacaagtcattatggtcacagctccttatccagaagagaatgggtgaaaacaactgattttctgagtaaaaaatattatcttgaaagaacgttaaatgcaaacaaacacccttggggatggaactatccagaagatacatatctttctggagagttatttttcaatgatggaaacttagttatgtggaataatatgtcaggtcactacagaggtgcaccttataatgcctattataatatgtcaccatcaatcaatctattgttgcctttagataaatatattggagagttcggaattcaaagataa

SEQ ID NO: 387578 - DNA, 144 bp, Salmonella enterica
atgggcagtaaaaacgataaaaatgatgctgttgcaattgtggaagctggcagtcgccccagtatgcgctatgtgccggagaaatacattgaacagcaggatattcagtgtctgcatcaggtgagacaacggcttgctgattaa

SEQ ID NO: 387579 - DNA, 261 bp, Salmonella enterica
ttgcacctgacgctggcgatggaagcaggataccagacaggtgaaaaaccgattaccgccacgctggttgaatccgtgctgtcacgtcagctggatgacctggagccgacgctcacgcggcatggttaccggctgaaggacatggtagagcagttcgatgcaaaacctgctgaaatcagggcattatttaacaatcagctagacccagcccgtacggccgaactacgcgacagaatgctggcggtcggtctgccaatatga

SEQ ID NO: 387580 - DNA, 594 bp, Salmonella enterica
gtgaaaaagagtatggcaggtcagggtgcagcaggggcgttactgctggcagggctgatgatgagtgcgggcgcaatggcggcctccggcgacccggtacagggcggttcgggttctgtgaccatcaacgtcccgatagtgacgtcaacctgcagtgttgctatgcctacggaagtgaattttgaccccgttgacaaaaaatcaataattgctgatggggtaactcatgatttatcccaaaaagagaatatggatatcactctcagtggttgtagtggtaaaaccctgcagctgagtacgcgtgcccatgacatttctccgacgctaaatgttcgtggaaactttagttccggagatccggatcattcgctggtatatcttatttcttatccaaacgtaccggagattactggtggatatccaagtttaatcagattcatgtatctggataatattcatcctttaactattaaacccaacagtgacacctatctgattgccagcaagattcggctgcaaagtacaggagaaaatccttcaaatctgggtaccactgtcagcggtggttttgattatacctttacctaccagtag

SEQ ID NO: 387581 - DNA, 483 bp, Salmonella enterica
atgaccgctgatgccgaagatgataactacctggatgatgaagatgccgactggaaaaccaccgcgcagggacaaaaaagcgccggggacaccagtattacgctggcgtggaagccgggagagtccgggcagaaaaaactgatagacctgtttgataacggtaatgtggaaccatggcgaattaagtacccgaacggaaccgtggatgtttttaaaggctggatcagttcgctgggtaagaccgttcagtccaaagaggctatcacccgcacggtgaaaatcacaggcgtcggacgtccgcatatggcggaggaggacactgcacctccggtagcggtatccagtctggtcgtggcaccacaggcaacaaatgtgaacgtcagcacggcggttgatctgacgtataccgtgaaaccggatagtgccacagataaatccctgcgcatcgccacctcagatccaacggttgccacggttacttag

SEQ ID NO: 387582 - DNA, 999 bp, Salmonella enterica
atggataagttcagtcaaagcaaagcctacctcgaagcggcaaagtcctggtatgagtgtgagcgggcagaaaatggttcaatgaatacaaacgtcatgaacgcaggattaattgtctcccacatggttgctgacggtatgccaatcactgacgcacgactatacagcaacgggaaaagtcaggtaagagggcttagtggtccaaccatatcgaagatcctggagcgacatggagagacccgcaccttcactcgagaaggtggacgcacatccagaggcactattttccttgctgcagcattcagagatgtactgaataatatccgcgtttcggaaggcgcgtatattgatacggcttttgtatcaacccaacttgaggcgtttttcacacaatgtgtgcgccttgattattttgataaacaaaggataacggccaatcttgactacactaggccagtttcggttgtggtcggtgacattctgaaagcagcggcagaacgttcagataaacccaccggagttgttctccagcatttaattggggccaaattacagttgcgcttccctgacattgaaattggatctgaccgggcaaatgctgctgacctgcaaactgaccgtgagggtgattttcagatcggcacaacagcatttcatgtgaccatggcccccatggaaaagttgatttcccgctgtgtggaaaacaagcgggcaggatacaggcccgtcatactcactcccgaaagcaaagttattgcggcacgccaaatggccgataacgtcggcatgtctgaacagatatctgttcaggctgcggaaactttcatcggcaacaatatcgaagaaatcgcaatttatgacggcgataagattagggaaggtctggcaaggctgattcggacatataacacgcgcatcgatgcaattgagattgataaatcccttatgattgatgagcctcgttgggttattaacattttgggtgggttcaggtgctga

SEQ ID NO: 387583 - DNA, 1164 bp, Salmonella enterica
atgaatctgtgggggggaatattagtgaacataataccgatccggagcgagtttgaatggactgcgctggaattctttgctggtatcggtcttgccagagccggaatggagcaggcgggaattaaaaccgtttgggcgaatgactatgacctgaataaaaaaaagatgtacgaaggtcactggaaatcccacaaactgttgcttgccgatattcacactctgaaaagcgaagatttgcccgctgcagatatcgcatgggcatcctcaccctgcaccgatcttagtctggctggtaagcgagttggccttcgtggtggtcgcgagtcatcagctttttttggctttacagacttaattgcgggtatgaatgagcgccggcccgaggtgatcgtactcgagaatgtcacaggtcttgcttcttcccacaacagagaggatttaagagccgcagttaaagagtttaacgcgttaggttatgccgtcgatgcaatcacgcttgacgctcgccgttttgtccctcagtctcgccccagactttttctcgttggagcaaaatcccctattgatggtggtgaacaagacacctgtctgagacccgactggctttcatggcttcacaaagatccagaagttcataccttcatgatgcctttacctaaagcacctgatctgctgggccatggattcacacttgaaattgaatctgtgcctgaaaatgattcgaggtggtggaatgctgagaaggttgtccactttaaaaactctatggcatcagtccagcgcgaaagactggagcgatttatatcccttcccggtttaacagcccgtacggcttatcggcgtacacgtaatggtgtacctgtgtgggagatgaggtctgaagatatttcaggttgccttcgcactgcgcggggcggttcttccagacaggccgtggtaatcatgggctatggtgaactcagaatccggtggatgaccgggctggagtacgcccgcctgatgggggctggctggtacaccctggaaaatctacgtgactctcaaattcaatacggttttggggacgcagttgccgtccctgtcgtcgcgtgggtcgccaggcacatgatccttccccatctgctggcatcaagaaaaaagcatggaatcaaagcgaatggataa

SEQ ID NO: 387584 - DNA, 579 bp, Salmonella enterica
atgtttaactcgctgcatgagtccgggcactacccgacaaaatcatcactggcaggtgtcaggcgtattaagctcactaaatcagaaatgggttatctgatcgtgcagctactggcgcaactggacggagacaatttactggcggtaaaactttgtcttgccacgggcgcacgatggaatgaagcagccatgctaaccagcagtcagttacttgacgaccgtgtaacctttgtcaagaccaaaaacggcaataacaaaacggttcccgtatctcccgaactgatcgccagcatccgcaaaggcaagaaccacattctgtttcccgatgttgactacaccaccgtcagaaacacaatcaaatccatcgccccaaatctcccgaatgggcaggccacgcacgtactgcgtcatacattcgccagtcacttcataatgaatggagggaatatcctcgccctgcaacgcatacttgatcatgcaaacattttgcagacgatggtctatgctcacttcgccccggactaccttacagaagctgtcagatttaacccgattgccgatgaattaaaaatgcaataa

SEQ ID NO: 387585 - DNA, 510 bp, Salmonella enterica
gtggaaaaatcctggaaactcaatgaacgccactatggtgcattgcagggattgaacaaggcgaaaaccgcagaaaaatatggcgacgaacaagttaaacagtggcgtcgcggttttgctgttacgccgccggagctgaccaaagatgacgagcgttatccgggtcacgatccacgttatgccaaactgagcgaaaatgagctatcgttgactgaaagcctgacgctggccatcgaccgcgttatccattactggaacgacaccatcctgccgcgaatgaagagcgagcgcgtgatcatcgcagctcacagtaactccctgcgtgcgctggtgaaatacctggataatatgagtgaagatgagattcttgagctcaacatcccgaccggcgtgctactgatgtatgagttcgacgaaaactttacgccggtaaaacgctactatctgggcaacgctgacgagatcgctgcgaaagcggctgccgtggcgaatcagggtaaagcgaagtaa

SEQ ID NO: 387586 - DNA, 243 bp, Salmonella enterica
atgtatgttttcccggatatcggggacagccttatcgatcaaatcaccacggaaacgctgttattcactctgcgcaaagtggaaaacaaaggctttctggaaatcactgcacggctgaaaaactacgtcacggagatcatgcgctatgcggttaagaaacagttaatcaaacccggcgctggatctggatggcgaatttaccccgccggaaaccagccattacccggccctgccgctggataa

SEQ ID NO: 387587 - DNA, 1179 bp, Salmonella enterica
atgaaaaaactcgcagtggcgttaacagcagtggcagtcgccgtgatgtcggcaggcgttgccaatgctgcagaaatttataacaaagatgctaataaactggatctgtatggcaagttagatggattacattatttttccggtgacagatccagggacggcgatcagtcgtatattcgccttggtattaaaggtgaaacccagattaatgatcaggttacgggctatggtcaatgggagcagcaggttaatgtgaatcgaccggaggagggggatgatatggattcacctcagtcctggacccgcctgggttttgccgggctttcttttggtgattatggttcagtagattacgggcgtaattatggtgttctttatgatataggtgcctggacagatatgttgccggagtttggtaatgactcctatgaagcctctgataattttatgacaggccgcgctaacggattacttacttatcgtaatactggtttttttggacttgttgatggtctgaattttgcgctgcagtatcagggtaaaaatgatgggcatggtcgggatggcgatgcctggaagggggctccactctccaataatgcccgtgggattgcagagcagaatggtgatggttttgggatatctgcaacgtatgattttggtacgggcgtcagcgcaggggccgcatatactaactccaaccggaccagcgagcaaaaatggcgtgggggtgacaatgatggaggtaataaagcagaagcatggaccgcaggccttaaatatgatgccaatgatatttatctggcggctaattacactcagacacataatatgacctggtttggtattaccaataacagtcgtattggaagagatactccggataataatgaatacgaaggggatttcgctcataaaacagataactgggaagtcgttgctcagtatcagtttgattctggactgcgtccttctcttgcttacattcagtcgcgcgcacgtgacacagggtacgggaatttcgatctggtaaaatatacggatgtgggcgcaacatataatttcaacaaaaatatgtccgcatatgttgattataaaatcaacatgctcagacatgataatccggcaggtctgaatactgacaacatagttgctacaggtctggtgtatcagttctga

SEQ ID NO: 387588 - DNA, 330 bp, Salmonella enterica
atgaaaacctttcactggaaagttgacccggacatgggggtggattcagagccacaggtggcggtggtgaagtttggtgatggtatggagcagcgtcgcgcagcaggactgaacaacaatctgaaaaagtacagcgtcaccatccggacaaaacggcaggatgccggggaactggaggattttctgtcggaacataacggcgtgacggcatttctgtggacgccgccttacggataccggcagattaaggttgtctgccggaaatggagtgtgaaagccggattactgaagacgacatttacagccacctttgagcaggtggtagtatga

SEQ ID NO: 387589 - DNA, 3093 bp, Salmonella enterica
atggaccaggtagccaatctggtaattgatctttcgctggattcgcagaagtttaaggacgaagttccgcgtataaagaaaatgctggaggacgcttccggtaaagcggagatatcagcacagcgacaaaaaaatcttctggaactcctgcaaaaacagggcagggcatatgttgacggaagcggtaccgtattcaatgcgaccacccgacagaagcaggcgctgatactgaattcgcaggcttatgatcaggtggctcatcgcatagatattacgcaacgcaatattgaagccctgaatcagaagctgcgggaagagcaggcgcaggccgcagcggttgcacaggctcaggatgccgccgcagccgcattttaccgtcagattgacagtgtaaaacagctaagtggtggtctgcaggagttacagcgcattcaggcacaggtaaaccaggcaaaaggacgcggtgatatttctcagggcgactatctggcgctggtatctgaaactgctgcaaaaacacgcgaactcagcgatgccgaagcgctggccacgcagaaaaaagcacagttcattcgcagactgaaagagcaggcagcagcgcaaaatctttcacgcgctgagctgttgcgggtgaaagcggctgagctgggggtcagcagcgccgccgatgtctatatccgtaaactggataccgcaacaaaatccactcatgaactgggactgaaatcagcgcaggcgcgccgtgaaattggcgtgctgattggcgagctggcacggggtaactttggtgcccttcgcggctccggtatcacactcgccaaccgcgccgggtggatcgagcaactgatgtcaccgaagggcatgatgatcggcgggctggctggcggtgtggctgcggcggtttacgggctgggtaaggcgtactatgagggggcgaaagaaagtgaggagttcaataaacagcttattctgaccggaagttacgccgggaaaactgccgggcagcttaatgaaatggcgaagtcgctggcggggaacggcgtcacgcagcacgacgcggcaggagtactggcccaggtggtcggtagcggagcgtttaccgggcaggcagtggcaatggtgtcccgtaccgcgaccagaatgcaggaaaacgtggggcagtcagtggatgaaaccatccgccagtttaaacgcctgcgggatgatccggtgaatgcggcgaaagaactggacaggacactgcattttcttaccgccacccagcttgaacaaatcagggtactgggcgagcagggaagagtggctgatgccgcgaaaattgccatgtccgcgtattcggaagagatgaataagcgggcgggtgacgtacacgataatctgggctggatcgagaaggcatggaatgccgtgggtgatgcggcgaagtgggcgtgggatcggatgctggatatcgggcgggaagacacgctcgatgaaaagatcgcgacactgcaggaaaaaatcgcgcgcgccagaaaaacgccctggacggtgtcttcctcctggactgaatacgatcagcagcagctgaacgaacttcaggaacagaaacgccagaaggacctgctggatgcgaaggcgcaggcagagcgtacttatcaggaaacgcagaaacgtcggaacgagcagaacgccgcgctgaaccgggataatgaaactgaatccatgcgacaccaacgggaggtggcgcgcattaccgccatgcagtatgccgatgcttccgtacgcaatgccgcgctggagcgcgaaaacgaacgccataaaaaggcgatggagcgccagacgaaaaagccaaaggcttaccacaacgacgaggccgggcgactgcttttacagtacagtcagcaacaggcacagactgaagggcagatagccgccgcgaaactctccacgaccgaaaaaatgacggaggcgcataagcagcttctggcgtttcagcagcgcattactgatttgtcaggcaaaaaactgacagcagacgaaaaaagcgtactggcccacaaggatgaaatagagcaggcgttacagaagctggatatctcacaacaggatttgcagcaccagaatgccctcaatgaactgaagaaaaagacgctcacattaaccagccagctcgctgacgaagaatcccgcgtcaggcagcagcacgccatggcgctggccacaatggggatgggcgatcagcagcgcggacgatatgaagagcgcctgaaaattcagcaacagtatcaggataagctggagcagcttaaacgcgacagcaaggcaaaggggacatacggttctgacgaataccgccaggctgaacaggaacttcaggccagtctcgatcgccggctggctgagtggtcggattacaacgcaaaagtggatactgccagcggagactggacgctgggggcgtcgcgggcgctggataactttatggcacagggcagcgacgtggcaggcatgacggaaaacgtcttcactgacgcgtttaacagcatggctgacggtatcgcaaattttgccctgaccggaaaaatggattttcgcagttttacggtctccatcctggcagatctggcaaaaatggaggcccgtattgccgcgtctaaactgctggggtcagtactgggtatgttcggcgctggcgcatcagcaggcggcagtacaccatccggggcctacagttctgcggcgctgtcggttattccgaatgcggacggcggcgtgtaccgctcggcaggactcagccagtacagcggcagtattgttaacagaccgacgttctttgcctttgccagaggggcggcagtgatgggggaagccgggccggaggccattctgccgttacgccgtggcgcaaacggaaagcttggcgtggtggcggcgggaagtggcggaatgacaatgtttgcgccgcagtatcatattgccattactaacaccgggccggagctggggccacaggcgctgaagacagtttacgatgtgggcaaaaaggccgcgtctgattacctgcagcagcaggggcgtgacggtggcagactgagcggggcatatcgctga

SEQ ID NO: 387590 - DNA, 273 bp, Salmonella enterica
atgctgtcagagatgagtgcaacagaactgggggaatggtcggtacatttccggcagtacagcttcagtgatgcgcacctggacgcagaatttgccaccctgaaatcgctggtggccggactggtgacaggaacgcctcacgatgcagcggatttcagtctgatgccggacccggaaccggcatttgaaaaaaatgatgaagacatgatgtttgcgggcgaaggcatttttgggggtgtacgttatggaccaggtagccaatctggtaattga

SEQ ID NO: 387591 - DNA, 390 bp, Salmonella enterica
atgtttttgaagaaagacacgctcacttatggtgattcatcagtagagctgtacgaactttccggactgcaacgcatcgagtatctggaatacatacagcaacgcaccgcgcaatatgaccgggagacggagaaatcaacagaggaagcgcgcagggtcgcgtttttacgaatggggattgatattaatgcctggctggtatcccgctcattacagaatggcgatcagacgcgggatacagggaaaaccagcgataatattgccgccctttggtcgtatgaggcgctgggaaaaggggccgatatggtgctgtccctgagcggaatgtccctccctgattctggcgatgaaacggaagcgggagaggccgattcgccggaaaagccctga

SEQ ID NO: 387592 - DNA, 753 bp, Salmonella enterica
atgacagcacctgacccgctgaaaaaagtgaaaggagccggtacaacgttatggttgtataccggcaacggagatgcatatgcgaacccgctgaacgataacgactggctgcgactggcaaaggtcaaagatctgcaacccggcgagatgaccgctgacgctgaagatgataactacctggacgatgaagatgccgactggaaaaccaccgcgcaggggcaaaaaagcgccggggacaccagtattacgctggcgtggaagccaggagagcaagggcagaaaaaactgattgatctgtttgatagcggcaacgtggaatcatggcgcattaagtacccgaacggaaccgtggatgtttttaaaggctggatcagttcgctgggtaaaaccgttcagtccaaagaggctattactcgtacagtgaaaatcaccggcgtagggcgtccacacatggcggaggaagatacagcgcctccggtcgcggtgtccggtctggttgtggtgccacagacaacgaacgtgaacgtcggcgcaacggttgatctgacgtataccgtgaaaccggatggtgccacggataaatccctgcgcattgccacctcagatccgacgattgccacggttactcaggctgataacgttgcaacagtgaaaggtgttaaagccggaacggtaaaaattattggcatgacgtcagacggtaactttaccgccattgcggatctcaccgttcaggtcgccacgcaggcgtaa

SEQ ID NO: 387593 - DNA, 402 bp, Salmonella enterica
atgaaaaaacatacagccattcgtaacgccattcttgaccgcctgtccgaaacatcaggtgaaggcgtaacgctgtttgatggtctgcccgccgttatcgcgccggaagatttgcccgcactggtggtctggctgacagacgcgcagtacacgggagaagagcttgatgaagacaactggaaagcgcatctgcatgttgcggcgttcctgaaagcagaaagtcctgaccgtgagctggatgactggatggaagggaaaatctatccggctctcagcgatgttccacaactggcttctcttatcgataccatgacgccgaccggatatgactggcagcgtgatggtgacatggctctctgggccatgacggaaataacgtatcagataacctacacgatgtaa

SEQ ID NO: 387594 - DNA, 600 bp, Salmonella enterica
atgtcgctgaaagggctggaaaatgctgtacagaatctgagcagtattgacaggcagatgataccgaaagcatccgcgatgacgataaacaggctggcgcagaaggccatctcttttacgacgcatagagtcgcaaaagaaacggtcgccggtgataaccaccgacagggcattcctttccggctggttaaacagcgcgtcagattatggaaagcctccccccgctttgatgtgggaaaacagtatgcccgcatccgtatcaaccggggcaatctgcccgccattaaactcggtacagcgcaggtcaggctgacgcgcagcaaaggacagttgctgcgcgggggcagtgtgctgaagattgggccgtacctgttccgtgatgcttttatccagcaactggcaaacgggcactggcatgtgatgaaacgcatcgaaggtaagaagcgctatcccattgacgtagtgaaggtcccgctggcggcggcactgacacaaagctttgaagaggctaaaagccgcatcattgcagaagagtttcccaaagaactcgcctcatcgctgaaacagcaactccggctgtacctgaccaggagactttga

SEQ ID NO: 387595 - DNA, 357 bp, Salmonella enterica
atgtcgcagatcgacaatctttttgatactgccatgtcaatagccgatgacaccattatcagtgttatgggaaccacggcaaccatcacgtcaggcgtgctggcgggcacctcgctgaccggggtttttgatgatccggaaagtgtttcatatgctgccggcggcgtcagaattgaaggagtcagcccgtcatttttcgtgaaatcgtcagccgtgcgacaactgaagcgagccgataccctggtgactggtggacagaattactgggtggacaggatgggaccggaagagagtagcggaagccgggttatctggctgggtactggagatcccccgactgacacccggaggcggtaa

SEQ ID NO: 387596 - DNA, 375 bp, Salmonella enterica
atggcaacaaaagaagagaatgtagcccgcctgcaggtactcgccgtacaactcggacgggaagtggatatttccggcagcgccgccgaaatcagccagcgtgttgctgagtgggaagaggaggtgggcggtgtgacgagcggggaacctgctgaaacggcgaatgatgtcccacaggacgggccaggctctgcaaaaagcggcctccatctttcggggtttgtccttatcagggcgacccgtacgcttcatattcatgcgctggcagcggacagcgatcgggtcctggatactgttccggcaggggattcggcacgtattcaggaaatatatgttgatgaactcgcgcgcgacggactgattgttgcgttatga

SEQ ID NO: 387597 - DNA, 1029 bp, Salmonella enterica
atgaatttatttaccactcgtcagttgctcggttacaccgagcagaaagtcaagtttaacccgcttttcctgaccctgttttttcgtcgcacggtgacattcaaagagcaggaagtcatgctggataaaatcaccgggaaaacacccattgcggcctacgtgtcgccggtggtgggcggaaaagtgctgcgtaatcgcggcggtgaaacccgcgtactgcgaccgggatatgtcaaacccaagcatgaggtgaattattcgcaggtcgtggagcgtctgccgggggaagatccggcgcaactgaatgacccggcctaccgtcgtctgcgtattctgaccgacaacctcaagcaggaggagcaggccatcgtccaggtggaggagatgcaggccgtcagcgcagtgctgaacggaaaatacatcatggagggcgagcagttcgagaccgtggaggtggatttcgggcgctcagcggccaataacattgttcaggcagcggataaaaaatggtcagcgcaggaccgcgatatctttgatccatcgttcgatattgatatgtactgcgatcaggcatccggcctgattaatatcgccgtgatggacggaaaggtctggcgcctgttaaacggctttaagctgttccgtgagaagctggatacccgtcgcggctccacatcggtactggaaaccgccgttaaagatctgggtgccgttgtgtcctttaaaggctggtacggtgatctggcgattgtggtggcaaaaacctcatacatcgataaagacggcactgaaaaacgctatctgccggaaggcactctggtgctggggaataccgcctcggagggtatccgctgttatggtgctatccaggattcacaggcgctcgcggagggaattgttgctgcaacgcgttatccgaaacactggatcactgttggcgatccggctaacgagtacaccatgacgcagtccgcgccgctgatggtgctgccggacccggatgagtttgtggtagttcaggtaggttga

SEQ ID NO: 387598 - DNA, 348 bp, Salmonella enterica
atgacgtttaccaccacaaccgaaacacgtgctgaacaccgtctttttgccggaaacgatccggcgtataccgccaccggcgtgagtggcattaccgctgcaacaccggcactgaccccgctgatgctggatgatgctaccggaaaactggtggcatgggacggacagaaggccggaactgctgtgggtgtactgaccctgccactggagggcactgaaagtgtactgacgtactggaaaagcggcacatttgccacggaagcgttgttgtggccggaaagtgttgacgccgttaaaaaggcaaatgccttttccggcagcgccatcagtcatgccgcactgccttaa

SEQ ID NO: 387599 - DNA, 1494 bp, Salmonella enterica
gtgcaacgtaatctcccgcatatactcagccaggccacgaatgccccgctgttacttgaacccgcctatgcgcgggttttcttttgtgcgctgggcagggagtcaggcattaacagcctgcacattcccggtaataacgaaagtctggaacagtcggatatggcactggtcacaggcgattttatggcgaccggaaagccgcaggcacgtttttatcaggtagtgaacggtattgcggtattacccgtgaccggaacactggttcataaactcggcggaatgcgtcccttttcagggatgaccggctatgacggtatcactgcccggctacaacaggcggtttcagatccggaggtaaaaggcattctgctggatattgacagtcccggcggtcaggctgccggggcgtttgactgtgctgacatgatttaccggatgcgcgaacagaaacctgtctgggcactggcaaatgaaaccgcctgttcggcggccatgttgctggcggcagcctgttcgcatcgccttgtaacccagacgtccagaatgggatcaattggtgtggtgatggcgcataccagctatgccggacaactggaacaggagggcgtggaaatcaccctgatctattcaggggggcacaaggtcgatctggatgtaacgcgggcattaccggaaagcgtccatgccgactatcagcagcgaatggacgaagccagaaagatgtttgcagaaaaagtggcccggtatacggggctgtctgttgatgcggtaatggcgacagaggcagccgtctacgacggccaggcgggtattgatatcgggctggccgatgaaatggtaaatgccgctgacgccattagcgtaatggcagcggcactgaagaataactcaaaaggaggcactatgccggaattaacagcaacagaagcggcagcgcaggaaaaccagcgtgtgatgggaattataggctgccaggaggctaaggggcgcgaggcgctggcgcagatgctggccgggcagccgggtatgagtgtggcacaggcgcaggccattctggccacagcgccgcaacaggacgttatcagcgaggccgatcgcattatggcgcttgacgaggcgaaagggcgcgaggagcttgccgccacactggccgggatgcctgagatgacggcagtacaggcaaaaacgattcttgccgctgcgccgtataccgtttccctcagcgacagcattctggcgcttgacgaggcgaaggggagaggggagctggcggaaaaactggccgtcatgccggggatgaccactgagaaggcgcgggagcttctggcagcagcgccggaaggcacgggatcagccagtgcgaacatgaacactgcatttgatcagttcatgcagacgcattctccggcatccgtttcaggcggtaaaagtaacgacaacagcaacgacagcgaaaccgcgatgctgatgagtattccgggtaccgccgcataa

SEQ ID NO: 387600 - DNA, 1596 bp, Salmonella enterica
atgaaacgggcaccggtactgattgatgtcaacggagcgccgctgcgtgaaagcctggggtacagtggcggtggaaccgggtttggaggacagatgggcgactggatgccgccggcggaaagtgtggacgccgcactgttgccttcgctgcgcctcggcaatgccagggctgacgatctggtaaggaataatggtgttgcggctaacgcggtatcgctccataaggatcatatcgtcggtcatctttttctcatcagctaccgccctgactggcagtacctgggcatgagggaggcttccgccaggagctttgtgaatgaggtggaatcagcctggacggaatactgcgacggtatttttggcgagatagatattgaaggtaaacgcacgtttaccgagtttattcgtgaaggggttggcgtacacgccttcaatggtgaaatttttctccagccggtctgggatgccgaaacaacacaactcttccgtacccggtttaaggcaatcagcccgaagcgggttgatacgccgggccactcgatggggaataaacagttaagagcgggtgtggaggttgaccggaacggtaaggcgctggcgtatcatgtctgtgatgatgactggccgttatcaggtgcagggcagtggacgcgcatccctaaatatctggcatcaggtcgccccgccatgctgcatatttttgagcctgtagaggatggtcagacgcgcggagccaaccagttttacagcgtaatggaacgtctgaaaatgcttgatactctgcaggcaacgcagcttcagtcagccatcgttaaagccatgtatgccgcaacaattgagagcgagctggataccgataaggcatttgagtacatcgcgggaatgcaggacacaggcgtcggggatgcgaataatccgctggtaagcgttctggcgagttatgcacgatattatgccgtcaacaatgtaaaactcggcggtgtaaaaattcctcatcttcaccctggtgacgcacttaaattacagacggcacagaatgccgacagcggattttcagcgctggaacaggcgctgcttcgctatattgcagcggggctgggcgtctcttatgagcaactttcgcgggattactcacaggtcagttattccagcgcccgcgcatctgccaatgaatcatggcgttattttctggggcgccggaaattcattgccggacggctggcgacgcagatgttttcctgctggctggaagaggcgcttattcgcggcattgtcagggcaccgcgtgcccgcttttctttctgggaggcgcgctcaggctggagccgggcggaatggattggtgccggacgcatggcaattgacgggcttaaggaagtacaggaagccgttatgcgtatcgaggcaggcctcagcacctacgagaaagagctggccattatgggtgaagattaccaggatattttccgccagcaggtcagggagtcagaagaacgccgcagtgccgggcttccacgcccggtatggataaccgatacataccagcaacagatttcagacagcagaaaaccggaggaggagcaacgtgcaacgtaa

SEQ ID NO: 387601 - DNA, 204 bp, Salmonella enterica
atggcaacaatggttgaattgtatgaagcacgtgccgcactgcatgacctgatgacaggaaaacgggtggcgacagtgcagaaggacggtcgccgggtggagtttaccgcaacctccgtcagcgatctgaaaaagtacataacagaaatggaagccagcctgaaaacgggagggcgtcgcggtccggcaggggtgaggttatga

SEQ ID NO: 387602 - DNA, 1935 bp, Salmonella enterica
atgacttcaggagaacatcaggcgaataatgccaacagagctataacaaatggtctgctcgcattgcatattcctgttccgcttacagccgtccagtgggccgatgagtattactgtcttccaaaagaatcatcctacacaccaggaaaatgggaaacactgtcgtttcaggtagcaataatgaatgcgatgggtaatgacagaatacgcgtcattaacctgattaaatcagcccgtgtgggttacaccaaaatgctgcttggtgtggaagcctattttattgagcataaatcacgcaacagcctgctttttcagccaacggactcggcggcagaagacttcatgaaatcccacgtggagccgaccattcgcgatgttccggtacttctggatctggccccctggttcgggagaaaacaccgcaataacacgctcacgctcaaacgcttctcttccggcgtggggttctggtgcctcggcggtgccgcagcaaaaaactaccgtgaaaaatcggtggatacggtctgctatgacgaactctcttcttttgagcctgacgtggaaaaagaaggttcgccaaccctgctgggtgacaagcgtattgagggctctgtctggcccaagtcgatacgcggatccacaccgaaaaccaaagggacctgccagattgaaaaggcggcgaatgaatcggcgcactttatgcggttccatgtgccctgtccacactgtggggaagagcagtatctgaagttcggcgatgacagtaccgcattcgggcttaaatgggaaaagggtaagccggagacggtgtattacctttgcgaacataacggatgcgtgatccgccagtcagaacttgagcagaaagaaggccgctggatttgtgacaatacaggcatgtggacccgcgacggcctgactttttacagtgccgctggtgatgaaataccgccgccgcgctctgtttcgtttcatatatggacagcctacagcccgttctccacctgggtacagattgtttatgactggctggatgcgctgaaagatccaaatggcgtcaagactttcattaataccaccctgggggagacgtacgaagaggcggtagccgaaaaaatcggttatgaggtcctgcttgagaaagttattcgctatggcgcggtggtgcctgagcgggtggtttatctgacggcaggtattgattcccaggccaaccgctttgaaatgtatgtctggggctgggcaccgggcgaagaagcattcctgattgataaaaaaatcattatgggacggcccgatcatgaggaaaccctgacgcgtgttgatgaggcgattaataaaaaataccgccatgcggatggtactgaaatgtccattgcccgcgtctgctgggataccggagggattgatcaggagatcgtttatcagcgttcaaaaaagcacggcatattcagggtattgcccatcaaaggggcgtcggtatacggaaaacccgttatcaccatgcccaggagcaggaatcagcgcggtgtgtttttatgtgaaatcgggactgacaccgtcaaagagatgatttacgccagactgaaagagcctcccaccccgcctgactcagcctcgccttacacctttcgttttcctgataatccggagattttttcggaagtggaagcgaagcaactggtggctgaagaactggtagaaaaggtggtcaacggaaagataaagctgcagtgggacgcaaagaaaaggcgtaatgaagcgctggactgcctggtgtatgcctatgcggcgtacagggtatccgttcagcgctggcaactgagtctggatgcactggccgcgtccagaaaaagcgagagtaaaacgggcccaacccttgaggagctggccgccatgctttcaggagagcttaataatggcaacaatggttga

SEQ ID NO: 387603 - DNA, 546 bp, Salmonella enterica
ttgaaagtgaacaaaaagcagttggctgagatttttggtcgggatgtcaggacaattacgacatggcaaagtcagggactgccgatgatatccgggggaggtaaaggagtggaggcggtttttgattcagcagaagctatcgactggtatacggagcgggatgccgccatagaaaacgaaaagctgcgtaaggaagttgatgatctgcgggctgcggcagagtcagatcttgtccccggaagtatagattacgaacgttatcggctgaccagggcgcaggctgatgcgcaggaactgaaaaatgcagaacgcaaatcagaggttatggatattgagctgtttacctatattttgcaaaggattgctcaggaaatagtggggatattgtcgagactgcctcttacactgcaacgcaagtatccggatttaaccactgaacacattgatgcaataaaaacggaaatagcaaaagcatcggacaaagcggccacgatagcagatgtggagaagtgggttgatgacttcaggagaacatcaggcgaataa

SEQ ID NO: 387604 - DNA, 309 bp, Salmonella enterica
atgagtacgcgtgcccatgccatttctccgactatcgttattgacggatactttagttccggagatccggatcatgcgctggagtatgaggttcttgtcccaatgtccacggagattactggtggggagtcatccgatggtttgagttggtacgtgaacctgaataatactcatcctttaactattaagcccaacagtgacacctatctgattgccagcaagatttggctgaccagtacaggaaaaaatccttcaaatctgggtaccactgtcagcggtggttttgattatacctttacctaccagtaa

SEQ ID NO: 387605 - DNA, 174 bp, Salmonella enterica
atgatgctccggagaattcctgttcacgcaggcagcccgtacagtgtactggctgaaactccctatacctcaacaaacttccactccggcgtgaaggtatcgttctggcgcagccaaaaagcatacgccggagactgtttgtgttttcaaatcatgggggaagtgtatgggtaa

SEQ ID NO: 387606 - DNA, 438 bp, Salmonella enterica
atgggcttacgttcacaggaagctgtacaaagcgctcagtcgctgaaaacgtggaaacaggctgttgagcgcggagagactcgcttaaccgtggttttcggcaccaaaggcggacggcctcgcgaaactattattcaggatactggcgcagtgaaaaaagcgctggataatgcgttagctgtcgcagaaagccgtaataaccggctgatcgataagcccgatctgaaaagcgcaatggactactggcacaaccaggtggtgcgcattggtctgactggcgcatattctccgcattcgctgcgttatgcatgggcgcaggatgccatacgtcactatctggcgcaggagttcagcaggaaagaggcactggcaatggtagcgatggatctggggcatggtgatgggcgtgggcggtatgtggcgcaggtttatgggtag

SEQ ID NO: 387607 - DNA, 372 bp, Salmonella enterica
atggattatgaaacaatgagtgatgcacttaaattaatggtcgaatgggatgcaacaaaagaacatccccctacggatagcgtaatatttatcggattgtgtgtagcagcaggagtggatgactgggttaggatattacgcaattcaagtatgccattagcctctcaaggggatgctttacgctttggctttgcatttaaaatgagacaagtgatagatggtgtgcgtccaatcagtactgaatcagctaatctactggagcaggctttccgcgaaattggtagtggagtgttacatttaggcatatgttttatcaataattctgtggaattatcgcgccttaaagtggcaattggcgacaagcaaatctga

SEQ ID NO: 387608 - DNA, 321 bp, Salmonella enterica
atgacctatacaagagcatcacatggtgatttggctaatggaataaccatggtcgctaccctggactggaatacgtgtagtgcttgcggttcccttgatggacgtaaataccggtgggaggaaattgagagcggtaatgtacgtatgccgccgcatcacgatggatgccgctgtacggtagtgttatggatgaagcctgctgaatcgttaggaatagccaatctcggaaccagttggcgtaagcgagccagtgcagtcggcccagtgccgcagacaatgacttatctacaatggatcagactttatcctcacgctaaataa

SEQ ID NO: 387609 - DNA, 1263 bp, Salmonella enterica
atgtctttaaacgattctaaaatccgcgacttaaaaccctcttcctgtcctgtaaaactctccgattcacacggtccgtatctgctggtcaatccgggcggttcgcgtatctggtatctcaaatatcgtttcagtggtaaagaatcccgtgccagcctcggcgcttatccgctcgtttcgctctctgaggcaagactgaaacgtgacgatatccgcaaactgctggcgcagaatatcaacctcgcccaacagcgcatggcagataaagccgcagcttcaccggaaaagtgttttaaagcggtggcgctggcatggcacaaaaccaacaaaaagtggtcggctgactatgccacgcgtatccttgccagtatggaaaatcatatctttcctgccattggtcacctgcccgtcaccacgctgaaaacgcagcatttcaccgcattattgcgggttatcgaggataaaggctttctcgaagtcgcgtcccgaacccggcagcagctttgcaacatcatgcgctacgccgttcagcaggggctcaccgaaaacaacccggcgcagcatctggaaggcgtcaccgcgccgccggtcaaaaaccactatcccgccctaccgctggagcggttgcccgaattgtttgagcgtatcggcgattatcagcagggacggcagttaacaaggctggcggtggtgctgactctccatctgtttattcgctccagtgaactgcgctttgcccgttggagcgagattgatttcagacataaaatctggaccattcccgccacacgggaaacgattgagaaagttcgtttctctggtcgtggcgcaaaaatgcgcactccgcatatcgtaccgctttcccggcaggctatcgccattctgaagcagatacaggaaatctccggtcatctggaactggtgtttcccggcgaccataacccgtacaagccgatgagtgaaaacaccgtcaaccgggcgctgcgtttaatgggctatgacacaaaaaccgatgtctgcggacatggttttcgggcaatggcctgtagcgcactggtggaatctgaactctggtcgcgggatgccgtggagcggcagatgagccatcaggaacgcaacagcgttcgggcggcgtatatccaccgtgctgaacacctcgacgcccgtaaagccatgatgcagtggtggtcggattatctggattcgagccgcgaagggtacattgcgccgtatatttatgcgcggcagcataaagcggcctga

SEQ ID NO: 387610 - DNA, 210 bp, Salmonella enterica
atgttctgcgacccggtgtttgctgaggtctgcaccggtaaagggatcaaccgtcctgataacaggcgcttctttcaggttgtgaagcgtgtcgctgtcaacgacagcatagggcaagggggagactacgccagtgccgctgacgcggaaaggagaaactgtttttacctgcgaaaagattttttaatcacttaccgttataaaaaatga

SEQ ID NO: 387611 - DNA, 438 bp, Salmonella enterica
atgccagacgctgggtttaataccactacggatttcaccatactcgccagtcactgcgaaacctttgccgaaaccctgattgaaagcaacgatcccgcgttgaaaatggcgctttgcggcagaatcaacacctgcctgacgctgctgcaacccactctgttagagcctgttcctcctcatctggttgaaagtctgaccgttgacacgctgcctgccagttctccgcgtttcgatcctgaatgtacggagctttgtcgttactgccttgcccttacgcaaaccctgtcggggctgggattcgcctctgaaacggagaagtaccttagctggctgctgtacgatctgattaactacttcgctgcggaaatgaaagcaccgcgctggctgcgtactgccggtggcgtgaagtttattgacggtgtggagatcaaagcatga

SEQ ID NO: 387612 - DNA, 1209 bp, Salmonella enterica
atggctgttcttacccgtcccctgagcgcctccgaagtccagaaggcaaaacccgccgaaaaagattacgaactgtttgatggtcaggggctgaccctgttcgtccgatccagcggcaaaaagatctggcgttttcgctataagcgccccggttcggatgccagaaccaccatcaccctcggttactatcccgctatgtcgctcgccagtgcgcgggcgctgcacgctgaacaactcgctttgctggtaaaaggtattgatccgaagaaactggagcaggaggaagtcgagcgggaacggcgcgccgtggatggtctgtttctcaacgtggcgacaaaatggtttgccgtgaagaaaaccaaaatttcagcagactatgcagacgatatctggaaatcgctggagcgcgacgtattcccggctatcgggcagatgcacgttactgaactgaaagcgtacacgctggtgaatgcgctggagcctgtgcgggtgcgtggcgcgctggagaccctgcaccgcctgacgcagcgaatcaatgaggtgatggtgtacgccattaataccgggttgctggacgccaacccggcatccactatcggggatgcgtttgtgaagccaaaaaaacggcatatggcgaccattcgcccggagcgtctccctgagctgatgcagcgcatttataccaccagtttgtccccaatgacccgcctgttgctgcaatggcagttactgacgctggtgcgccctgctgaggccgccggggcaatgtggcgtgaaatcgacatggaaaaacggctctggacgatcctgccggagcgcatgaaaatgaaacgtgaacaccaggtgccgctgtcgccgcaggccatgacggtactggagcagcttaaacccctgagcggcgcttccccgtttgtgtttcccggcagggtaaaacgcagccagccaatgcacagcgagacggttaacaaggcgctgtggcgcatgggctacggcggtgaactggtgtcgcacggtttccgggcgctgggcagcaccacgctgaatgaagcggagtttccgccggatgtggtggaggccgtactggcgcatactgacgccaatccgacccgcgccgcctacaaccatgcaatgtatatggcgcggcgtgttgaggtgatggactggtgggggcagaaaattagcgaggcggcacggagttcagcgctgtaa

SEQ ID NO: 387613 - DNA, 885 bp, Salmonella enterica
atgggcatactggcgcgggaaatgacgcacctggcaaaacaggcgggcggcgcgcacaaaacggtcagcgaccgcatggcgcaggcgaggcgcttctgcgatcgtctgatggcgcagaacgtgcagatccgccacgttcaacacctgaaagcgcggcatatcgaggattatatccgccaccggctggcgcagggcatcgacaaacgcaccctgcaaaatgaaatggcgatgataaggattgtgctgcgccaggccggacgggttaaactggcggacggcgaccggatcagtaaccgggcggtggggatcggcggcgcatcgcgcaccggcacacgccgcgccattacggacgataaatatcaggcggtgcaggaaaacgcccgcctgaaagatccggggctggcggcggcgctggaactggcccggctgatggggctgcgctcgcaggaggcggtacgctgtccgcagtcgtttggcacatggaaacaggcgctggagcgtggcgatacgcggctgacggtggtgttcggcaccaaaggtggacggccccgcgaaacggtgatcctggacgctgatgcagtgaaaaaagcgctggataacgcggcaggcatcgcggaacagcgcaacggcagactgatcgaccgggccacgctgaaagaggcgatgcagttctggcgcaaacaggcggaacggctcggtctgacggggcaaaactcgccgcactcactgcgctatgcgtgggcgcaggaggccatccgccattatctggcgcagggattcagcagacaggaggcgctggcgatgacggcgatggatttaggccacggcgacgggcgcgggcggtatgtggcgcaggtgtatgggcgacggggcggggctggctga

SEQ ID NO: 387614 - DNA, 219 bp, Salmonella enterica
atgaactggtatcaggggggggatctggacgatccgggggataacccgcgcaagcgggcggctgctctgagagcacaaccgacgccccgcaacacctcaacagccgtcgccccggtgctcagataccgttcgcagccccgactcaaaaacaggggctatggcctacgcgccggggaaggttgtacctggtttgggatcagtgacttgtggcattcatga

SEQ ID NO: 387615 - DNA, 216 bp, Salmonella enterica
atgacgcaaccggactggcatcctgctgacattatcgccgccctgagaaagcgcggcacctcgctggcggcgctctcccgcgaggcggggctggcgtccgccacgctggcaaacgcgctgcaccgccactggccgaaaggcgagaagatgattgcggacgcgctggaggtgacgccggagcacatctggccttcccgctatcgcaacgtgacgtaa

SEQ ID NO: 387616 - DNA, 462 bp, Salmonella enterica
atggctacaaccctcaacccgacacacccgttactttccgttcccttcagcgtcgacaccgattttaccgtcctcgccatccactgcgacaaactcgcgcttatactggcggagtgcgacgatccggcgctgcgtatggcattctgcggacggctggccgccgcgctcacgctgctgaggccgcaattatacgatccgatcccgccgcatctgatggacagcctgaccgtggaggcgctgcccgcccggttccctgcttttgagccggatgcaaacacgctctgcgattactgtcagacgctggcgcaggttttattgtgccggacattcccgccgcaactggaggaacaactcaactggctgttatccgaactggtggaatacttcgccgccgaaatcaacgccccgcgctggatacgcaccgccgacggcgtgaagtttattgaagaagtaatagcatga

SEQ ID NO: 387617 - DNA, 702 bp, Salmonella enterica
atgggaagacgtgttatcactcatgggcgagggcaggctcttgatggggataaaaccacaactggtgccaaatgtatcagttcactgcctaatgtgaaaaattgtggcaaaggtgttgttagactgggagacagaacaacagtttgtccaaaatgcagtaaacccggaacaattattactggtgaactaagtgtttcttatggcggctcaccagcagcagttgatggctcctttgtaatgtgcgggtgccctatgggaactaatagagttatagctcctattgggcaagtttcaatcagtgaagaattgtctcaatcacatgccaacaatgattttcttcctcaacaacctccgcctcccatgcctgttttcgctaaatcctgtcttcgcgggatgggatgtacagatgcaggtacatcacctgaacctagccaaaatttcatgcctgttggttattttatggcaactccattttctggtgatgatcaatacaatacccaacatattgctgataatacatcactgaataattctttggctgagagtgaacagcatgttgaaactgcggcaacttttcctgttggtgcagtagtcttttcttggattagtggccaatttagtactgtaggtacctctggggggccaaaagtgctgcctcaaatatcggtgagatactcgttggaggcgctggagctccagtag

SEQ ID NO: 387618 - DNA, 876 bp, Salmonella enterica
atgatgcctggaaagttgaattcaggtgaacaagatttcattgataagatgcgtttatcacaaatagccgatatagaaggcacagcgccaacacgtgtacgatttgcatgggaggaacaagctgatggtcatatgatgccaacgggataccataccgatgcgaatggaggatgggatcaagttcctgtacgcaatatggttcttaatagccagacgggaaattatgagtttacgactgaaggtataaagccaataacaatttattggaatccagccaaacttgattttgagttcaaaaataatacaggaaaccaagagcctctaaaccttccgccaacaattacagttacgccgattcctgaagaaactggtggatatattgaaacttacccagcagatgagaagaattttagcgattatattcttattcttcccattcctgatataccaccaatttatatttattttagtaagcctgatgtgaatttccttgaagtggatttatatgaaaattttaaaggacgctcaaggcagcaaaaatatcaggttgaccatattccatcagcagcggcagtaaaggcgaatcttaaagaaaataacccagatcttactacttcagaattaaatgaaaaagtagggagagttgcgtcaattgcggtaccaagaaatactcatctttatgatagtgagacgtatggtggacgtaacaatgaagggcaaatagcaaaagatgcaaaagatttacgtgcggcagcagacagtaattttaatgctataataccttcgttgaaaaatgaaggtgcaacttcagagcaaattgaaaatgctcgaaaaagaattcacaaattaaatgaagagcaggggctatataaatga

SEQ ID NO: 387619 - DNA, 468 bp, Salmonella enterica
atgacattacatatagaaaaattaattgagaacctaggtaatgaatgcaatagtatttttgaagcgggaataatcccgtataaaacaatacctaaaggttttccaggtgatcctatactaagccttaacatggcaagagaaggggtatgtttatcatttagtagggatagatatattttactatccatagatttgaatattcaaaacaacaaaattaagagctggaaattccctaatgaattaccatttggcttaaaatgtaacatgaatttaaaatcagtacatgatgagttgggtattccattgaaaactttaccctctaaatttattatgaatagttttgtgggacgggcagatttatattcaattaatggttttcatttgcccataagtttacaaatccgttatgatgatgttgaaacaataaaatctttatctatattccctacatctgaattacgttggtga

SEQ ID NO: 387620 - DNA, 231 bp, Salmonella enterica
atgaatgtcagactttggctcgacagtgcccgttttcctctgctggcctggcgcataatgctgtacgccattctggccggaacctggttttgcggattacgtcagtcgctgatggcgcagatccgttcacggagtgacggacgttcactctcgtcactgcgacgtcttgaggtcatggccatcgcactgatagcgctgtctgaatacaacgtctggctggcgccacgatga

SEQ ID NO: 387621 - DNA, 1527 bp, Salmonella enterica
atgacagcgaacagtattctggaatacatcctggtattttttggctggatgctgaacaacgccatgtgggacattctcagcagcaccggtctgtatctgttacctctttttttcaaggggatggggatatggctgaaggtccgggaggagggctttgatgaaggaaataaagggatgctctccctgccgaggctggagaatagtatctatgtttcgtttctggtgatttgcttttgttgtacgccgatgttcccggttgatatcagtacgatgaagtatgacagcagccgtgataaacagtgcaacatacaggtcgcctcccctcaggactccggttacaacgcggtactgaccgattttcagggcaaaactgcgaacgtgccggtgtggtggtatctggtgcaccggctgtcaaagggggtgactcaggccatgattgcgtccattccgtgcggtggaaaaatcaggcagatgcgctttgaagttcagcattctcagattaaggacccaattctgacgcaggaactgcaggattttgccaacagctgttattcaagagcgtattacaaactgaagagtaccaatcagtcgttaagtgataaaacgataaactctgtgggctggataggcagtgattattttctgaatacggcgggatactacgacacatatacgtcgcagaaaccgcgacaggcatggccttataatgcgacacgtgatgcgggctatgccaacacggggggcgggggatacccgacctgccggcaatggtggtcagacggcaaaaaaggcctgaaggaccgggttctggccagccttccgtcccgggttaaaagggaaatgcagcaacagaatatggcgagctgggaagagctggcgctgcgctggctggtcagcccccgtaatctgtcactgtccggaggcggggaaacctatacgatgggaagtagtgacaatgccagcgggttactgggtaacgtaacacgtctgacatcaagtattggactggggatgaagcagtttgaggcaacccccgggttcgatgcgctgaaacaggcgttacccatcgtacaggcattgcttgagatgatggtgattatcgtgattccggttctgctggtattcagcgcctacgagccaaaaaccatcgtcaccataacgttcgccatgtttgcgttgttctttattccgttctggtgggacattgctggctggctggatgaccagttactgactttgctttatggcaccagggacagtcagggcagcggtagcagtgtgccgtttgcggattttgtgggttcggtgaatgacggctggatcatgaatctggtgctgggagtgatgtatttaatattccccttgacctggtttggtatgcttggatggacaggagttaacgtcggagcgtttattgataaagctatttcaggtggtactaaaatgcctcaagatgcaggttctgagggttcgaaacatataaaggatgcagcatcaggagcgatatcgaaagggaagaaaatgtga

SEQ ID NO: 387622 - DNA, 498 bp, Salmonella enterica
atgagtaatgaaggatttaatcccgaagacattgaggacaccctgtcccgatttggtcgtggccagaagaaaaccatacgttcctcaacggccggtattccggattttgtgcctcgcaaggctaagttacagagcagtcccgttgaattatccaccaaagacgaggcgctctgggctgcagccgctgatcgtgcagaacaacagcaagcacaggaactcccacctgccagcccttgttttagccaggctgatatcgacgagtttctggcgaggaaaccgcagaaatatcagatgaccgaacgggactacaaggaactagggcgcaatatttttctgggggcgggagatttgattgtctcaaccgcaaaggtagctatctatggagtatcgtgtattcctgatcctacgcctagtaaagatgatgaagtttggtattactctacggacgagaacggatggagtcatgcttataacagaaacggtgataggttatattag

SEQ ID NO: 387623 - DNA, 873 bp, Salmonella enterica
atggccccgctggatgaggccctttatcactacgtgatggactgccgcaaacttcatacggacgatacccctgtgccggtactggcaccggggagaaagaagacgaaaaccgggcgcatctggacatatgtccgtgatgacagaagcgctggttcatcagatccgccagcggcatggttcgccttctcgccagaccgacagaggaaacatcctcagcaacatcttcggtgctataatggtgtactgcaggccgatgccttcgcaggctacgatcggttgttcagcgcagagcgtgacggtggcccgttaaccgaagcagcctgctgggctcatgcgcgcagaaaaatccacgacgtctatataagtactcaaacggccacagcagaggaagccctgaaacgtatcggcgaactgtacgtagttgaagaagccatacgtggtctcccggtaactgagcggctggcagcgagacaatcccaaagccagccactgctggcatccctgcatgagtggctggtagaaaaaagcgctacgctgtcgaaaaagtcccgtctgggtgaagcgttcgcgtatgccctgaaccagtgggatgctctgtgctactactgcgacgacggtcttgcagaagcagataacaatgcagcggagcgggccttacgggcggtatgcctgggtaaaaagaactacatcttcttcggcagcgatcatggcggtgagcgcggagccctgctgtatggactgatcggaacgtgcaggatgaacggtatcgatccggaagcttaccttagatatatccttagtgtgttgccggagtggccgtcgaacaaagtggctgaactcctgccatggaacgtggatctcaccaataaatag

SEQ ID NO: 387624 - DNA, 315 bp, Salmonella enterica
atgcaacggcgtgctcagatcggtcttaacaagggagaggcccaccatgcgctcaaaaacgcgctccgtatcgggaggcagggggaaattcgcgatcgcacgacagaggggcagcactaccgaatcgctgggctcaatttattgactgcggtgatcatttactggaataccgtccatcttggtcatgccgtcgcggagcggcggaaggaagggttggatgttccccctgcatttcttccccacatatccccattgggctgggcgcacattctactgactggcgaatatctttggcccaaggagccgaaagcttag

SEQ ID NO: 387625 - DNA, 993 bp, Salmonella enterica
atgactgaaaaaacaatacagaaaagtggattctctaaagatggcatgcgtaaactggagaatataattagaactcaacttaattttaaacatgcttccgtaagtaaattatcaagttgtcgttatgatgaacaatttgatatgtctatctctataatacatgagacagatgacgaatctcagattgttaaagttgaatcttcaccacaaaaaatacgtttgaatttccatgactcatttcatgaaaatgaaaggcataaaatattcatattgaactcatgttcaaatcttaacatactatctaatgataaatcaatatgtgtttatggcggtgattctgtaattattccatcatgggactgttttactgaaagtagttatgtgagaatggcagcaacttctattttaattaatatgagtgaaatatctaatgatataaatgtaataaataaattatgttggaaaagggttggtgaatttaattatggagactcaattaataggataattactggtgggattagtggtcgtgataaaaataaagcgacatgcaaaaaggcgttgaacgtaattaaaggtttgttgcaattggaattagatgatattgagtctgcttcagtgtcgccactctttgatattaatgggataatgctgtttattaagagtaattacagaaaccaagatttttgcgcgtcaaccatagctaattttttatcaatatcgaataggatgctccagtacaaattttcaagatatgatttgaagcccagtcaactcatttcactggaaaggagtcgtgctatagctaggtatataagggaatatccatatgcaccaattgacgctgtagcatttgattgtggatttaattcaatagtaacagcacgtaagcaatttaagaatttctttggtttaactataagtgagtatgcaaagaaatacaggattttaaacaatagcaacatggcattgcggaactgtaattctgtataa

SEQ ID NO: 387626 - DNA, 1029 bp, Salmonella enterica
gtggtatccacgtataagagttacgtggccaatggtgggcttcaggctgaaggggttgaggtcgcggcggttaaccacgactttttctgtgcgatggaataccaggcaaagactgacagtattgatgccaaagatctcgtacatatggtcgaggttatttttggtagccgagcgggtatacgcacagcgctgtatatggctgctcctgtagcaacccgctttaatccagtgataaaggtgttttacatgcttctgctgcttggtgaggaatatatgatgactatttcagaagaaacgattgttagcactataaaaaaaaatcagtttgtacctttttttcaacctttatatgacattcataccggtaagtgccatggcgttgaagtactctcaaggttgatacttgataatggtgatgtattatggccagaactttttttatcagttgttaagaaaaataatttgatgcatgaaatgaccttggaactgatgagaaaggttgcaaaaaatatggcgatattcgaaaaaataacatcagagcggtttattatagcaataaacatggcatcctctttattaagcgacgaacggtttattagagcaagtctgaatatgaatgagttatgcaaaatgcataactgccagtttgaacttgaacttacagagcatgagcagtttcaacctttattgcatgtcgagcctatgaaacttcttaataaggcagatattaatatcattcttgatgattttggaacaggctattcaggcctgagccatcttcatcaattttgttttcaggggttgaaaatcccaagggaaatactatttgacttgccagataacatgttatcaaaacttattattgataacatagtaaacttagcaaaaaaattaaacttaaaggttacatttgaaggggttgaaaataagcgtttgctggatgcgttaaaacaatataaaggaagtatgcagggatatctgctatcaccaccggtgacgattgaacacttcaaacaaatgcagtattag

SEQ ID NO: 387627 - DNA, 1107 bp, Salmonella enterica
atgataaaaatacatagaacaatagaacaatttactctaatgttatttttaccatccgtagctatagccacaacgccatctgatttttcagcctcgaccacaatcaattcatattatgaattgagttctccattcaaaatttatctttggaaagataaaaattttacaggagtaactcctaatggaaggctggtccccccggagttttttcttagttgcttttctgaaagtgactttgataatggagcatgtccgctctatccaagttgggggggggcagggagtaatgtttcattagctttttatgaaaaaaacacaaacatgaaacatgtggctataataggtggaacaagatatgcctatggttgtttaagtactgccggcatcactgatgcggtaacaggatgtcctgggggaggcttgatatataatatatatattacttcagatgaattaaagaaattccccgttggtggggtatggtctgcgcacttgagattgaaaacaggtcaatggcacggtggcccaggttctgtagatcctgggtggcctggttttatgtctgccgagtggaaagcagatattacattaaatgtaatcgataataaaaatatccatatctggtttcctctgtctcagagtggaacaactaacgttgtcatgccaattatacctgcttactggacattaaataaacctggtgttgtaacatcagaaaaaactatcgacgcttgcttatatgatggttacagcaataacagcaaaacatttaaaatcacttttaatagtaacaatgttgatgcggtgtctggggattttattttgaggaataatttaaatccagataaatccaccttgccttatcaagtgcttgtggcatctccaggctcatctgacacagttcagcaggtaaaacctggtgtacagctatcttactccggaataaacttcacaggaagccgacaagtaatgatacctggattgcacgcacctgttgcctgtattccatggccaatcaaaataaagcttaaaccttttaatttatccaagcagcaagcagggcattacactgggaccctagacttaatatttaccccatctttatga

SEQ ID NO: 387628 - DNA, 2607 bp, Salmonella enterica
atgatacatgtgcaggggaaaatatccctattttttattggagtagtaattggcatctgtagttaccctgcacatgcgcgcagtagcattcctccaggttttgaggcgctcagtcttgggcaaaatgagcttcttaacgtttcatttcatggtgaaaatgaaggtgtttttactgtctttgtcacacctgaaactcttacatttaaagagcctgaagcattattttcaaaactctctttggatggcgtatcggatgatattaaaaagaaaatacgccttgacttatcaatgccaatacctcgacatgataaagattttcatttgactcccgggaaaaatatcggggctatctatgatgaacaagaacaatcagtcatgctattgataacacctgcgtgggtaaaaaacaacaatcaactcttcttccccccaaatcacgattctcaccaagcgttagttagtcaccaatcgcttgtatttagtcatgatggatatatggaaagtttaggaggcacaggctaccttgctcagggggtaggcagttcaagctatatgcaaggtgaatggactctatttcagaacgccggtaaaaatacactgtcaaattcgcaattcaggtttagtaatctgtatttgcgttctgatataacacctcgtatttatagtcagatagggcaaatggatatgactaacttaaattcacgattgggtggggatttttcgctatctctactccccctatctcaaatagatggtttacgagttggttcaaccaacgcctatattaatacggaaagtattacaactgcggctacaccgttaacggtaatgttaacacaaccagcaagggttgatatttatcaaggcaagcagttactgggcagcacctatctgatggcaggcatccatgatattgatacgaacagttttcccgctggctcttaccctgtattattaaaaattttccaaaatgggaaactggctcgccaggaatcacagtttttcgaaaacagtggtagaaaccagcccgcggcaggaaggacacagtggttttttcaggcagggaatgaaaatacatctaacaattatagtgatgtgtcaaatctggctaaaaaaaagacacaatttgctggaggtattcaagttggtctatctcgtcgcctcagcctaaccagtgcattgatggggagaggaactgacacccccttcagtgaaaatgctctaaagtggacgttaccctctcaagcgggaatctggtcattaaaatccagctatctgatgaaaggaagaaaaggtattgctgacagtgagcaactgagttggagttacagtaaccatgctctttacttatcacgttatcatacattttgtaaaaaccgccatagttgttacaacaactatggcgtcacggccagcacaagtctatatggatggactgcctcactcggctataactattcacactcagcacaacgtttcttgcaaccattggttgatgaaggatatgcaacacctcacgtaagggaattttcgccatactcatctcagtatgtgacatccagtatgcagctaacactaggaacatcgaagaactatcagggttggaatatctggccaagaatgggcatcttcagcaaccaaagtagtggtgggaataatcatgatgatggcgttttcttaaccgtgtcattatcaaaaaatacacaatcggcatccaattttagctataacacaacagcttctctggactatcggcagcacagccaagataacaatatatcattaagtcaagagctggtctggaatgatcaggactatcgtatgctaaatgcaatgctatctggcggaaaacgtaaccaggataccttagttagcgctgagtgggatagttccttagggaacttgggggcaacgtttggatatagccactcaaaacagtatacaaataaagccgtaagtgggcactacgattcgacatttgctatctcatctacaggattagcgtgggggtatggtggaggaaatgaatccagtctatctggcattattatcgatactaaaaacggtagcgggcaaagtataacaggccccatagctaaaattacctccacgcaagggggggatgcatatattcgtgatggacgcaaaatattttttccgacaatggattatatgcccgacaagattaatatagaaggttcgagcgcacatggaaataatgccgatttgatttatggcgcaggagttaacaatgttttcctactgccaggtcatattatcattaaccatttgcgtgcaaatatactttatatttatgttggaagggtacgtatcaatggtaaaaattcgcttgcgggtagccatattcttaatgccaatgtaccagacatcaatcctgatggtagttttgtggctgaattcaatttcgcacctacctctctttatttgattaaaaataaacagatttactcatgccccataagatataaggaagaactcaacaacattagacatgtgggcttggtgaattgccataaaacgagcacacacgatctaccacaaacaataataaagtcagagcgattggcaaacctttactcaaaataa

SEQ ID NO: 387629 - DNA, 486 bp, Salmonella enterica
atgaaatttaaatgcgtgattttgagttcattggtcgctttgccatttttggcgaatgcagcagacggcaccgcaacgatcaatgtgtcagcagacgttaaccctaacgtaggtattgtatccgctaataacactccgttgactgatattcagttagcctttgttcctggcaaaggattgcaagctggtacagaacaggttcgcctagccagtaatgacgccacaaaaggggtcgatgtcagcctcgctaatgatatgcagttaacaaacgcagcagatgcatctactgtcaagatgactattacactcgcagataaaaccttaagtacgacagcgaccagctttgggaaggatttgtttgccaaaggtgaaaccagtccgctgcaattatccgttaaacctaccgatcaaactgcttccaaagaccttaaggcaggccactatgcagggactatcaatctggttttagcccaatcagcaaagtaa

SEQ ID NO: 387630 - DNA, 615 bp, Salmonella enterica
atgaacattactctaacctcagtagatcaatattctggaactgtaagagtcttctccgattcggatgaaacacaatatataaagacatcagtaaaaagaattatcaacccaggaacacctcaacaaaaggaagtatcagtctctcccgatgaagaggttggaattgtcgtatcgccacaacggttcatccttcccagacaaagctctcacctagtgagaatactgcctgtaaatatacctaaaaaagagggggtttaccgagtctatatatcatcattgccagatgacgatattgctcatgccgataataaagaggggaatgctcaaataacgattaacgtcatctggggtgttctggtttatgtaactccagaacagagcggcgtttcattatcatacaatgcgacatcaggaaaactaacgaacacggggaatgtgcacgtcaatatatcagaatatggcttttgtcaatcggaaaacaattgcaagtgggaggtttttaatcattcaatttatcctgagatgagttacgtaatcaaggatagaaaagagaatcattctctgtttgttaaatatcagttggggcaaacccacaccattctgaaagtaaattaa

SEQ ID NO: 387631 - DNA, 1038 bp, Salmonella enterica
atgttgtctgcgccgttgtcccaaaatctgcatgcccgttggctgatagtttcattacttttcgttaacatagttatctgggtatgggcattcgcagccttttgtcatagttctgctctgatgggtgcgagtctgctttcctggtgttatggtttgcgtcatgccgtcgatgcggatcatatcgctgctattgataatgtcacacgtaagatgatgcaacagggtaaaaagccctgcagtgtcggagcatggttttcgctgggacactcgactatagtcgttcttgcaactgtcgctattgcagctacagcaacagcattcagtaataaaatggactggttccatgaaactggagggattattggcactgctgtatctgctgtatttctgatcataatggctctggtgaatctcgttattctaaagagtgtatggcatgccttcaatcgactgaaaaacggacaagaaattaatcaggataccgatgctattttacagggtggcatgatgagttggatattcagaaaggcattccaccttgtatccagaagttggcagatgtatttggtaggttttttattcggtcttggttttgatacagccacagaaattggcgtcctaggtatttctgcggcgggggcatccagtggcatgtctgtctggacgattctggtattcccagcgttattcgccagtggaatggcgttaattgatacactggataatattattatggttggcgcatacggttgggcatttaataagccacagcgtaaactttattataatatgacaatcacaggcacatccgtcattgttgctctttttataggtggtacagaagctttgggattacttatggataagctggatttacatggcggtatatgggaacttgtgggtattattaatgataatctgggcaatgccgggttctttgttgtcggattgtttattctgttctggctgatttcgatactgaattacaaatggaaaggctacgacgcacttgccatcgatgatgttcgttccgtctga

SEQ ID NO: 387632 - DNA, 237 bp, Salmonella enterica
atgggcattttggctacctgtcgttgtgaattaaatcactataatttagggtataataaagaacaggatataaggtgttttttgtattatgagtatcataaagtgccggaaggtaattattttgtgttacgtggtgtgttacacatgcagaacaccggctgtattcgtaaacctgattgtgattcagccgttgttacccaacgtcagggggccgatatcgtcaattttagcggctga

SEQ ID NO: 387633 - DNA, 417 bp, Salmonella enterica
atgaaaaaatcctcccgaatgtctattgtccatcctcatgcagcgggcgttgatattggcgctgagttccacgttgtcgccgtaccgcctgatgccgacaccgagccagccaggacttttcaaaattttactggcgctcttcagcggatgtctgactggctcaaaacctgtcacattacgaccattgccatggagtccaccggcgtttactggttgcctgcttttgaaattcctgaagctgctggtttcaaagcgatcctcgttaatgcaagagacgcaaaaaatgttcccggtcgcaagaccgatgtcaacgatgcccagtggttgcagaagctgcattcatttggtcttctccgtgtcagtttcagacctgaacacgacatttctgtatctgaggcagcgggaacgcctgactga

SEQ ID NO: 387634 - DNA, 291 bp, Salmonella enterica
atgcgccgtatattagccaccactgccgcactttgtcttggcggctgtattactgtgtatggtccggttaaaacgggagggcagcaacagcaggacagccaggccgggcagcagccagggatgagcgaacagacatcaacctcattcatcggtaatcgtaaaccggatgagttgctgaatgccgtggcgctgtatttcagggaaaaggccatcacagccagtgttaacgaccagaccacaggaattatcgccggtatggcggaaatcacgtatccagtgtaccaatattga

SEQ ID NO: 387635 - DNA, 243 bp, Salmonella enterica
atgattaattcctttctaaatcttagcatcattgatgctatattacctataatcactatttttttcatattaaattctaaaataaataatatgcattatattcagcatagcaatagcattatacaccgaaaaatggataattttaaaatattattattgctattgctgctaaataaattcatctcgattactgaaaaatattttcctaatagaaaagaattcttaatcggcgaatttaattaa

SEQ ID NO: 387636 - DNA, 801 bp, Salmonella enterica
atgattgaaggtctaggaaatgctttcacttactataaaggaaagcagtctataaaaactagaataataaaatggatgcaaatttttttatataagctggcattaccgatgcttaatgatttggttctattaaataaagatgataaaaaagatctaatcgatcgacataatattaaggttaatgttacaatattaggcgggattggattaaatcttaatgaattttcatataaagagccacttacagatagaattacatttatttttatagcgagattgctaagagagaaaggggtatttgaatatatcgaagccgcgaaacgtgttaagaatatttatccgaatgttgaatttgtaattttaggaggttttgagaataacaatccattctccttaaaaaagcatgaaattgaactgcttagaaaagaacatgaccttatttatcctggtcatgtagaaaatgttcaagattggttagagaagagctctgtttttgttttacctacatcttaccgggaaggtgtaccaagagttatccaagaagctatggctattggtcggcctgtaataacaacaaatgtgccagggtgtaaggatataatcaatgatggggttaatggttttttggtgcctccatttgaaagtgaattgctggtaaaaaaaatgatgtattttattgagaatagaagtaaaattctcgaaatggggctttcgggaagattgtttgcagaaaaaaattttgatgctacggaaaaaaataagacactagcttcaataataaaagcaaatcatgatttttga

SEQ ID NO: 387637 - DNA, 570 bp, Salmonella enterica
atgcgggccgtacaggttggtcggcatcaccgaacggtagtcgcgaccgtactggcgattacacgattcacacaacttgataccggcaattttggcgatcgcatacggctcgttagtgggttcaagccccccttgcagcagctcactctccgccatcggttgcgttgccaactggggataaatgcaggaagaaccgaggaacagcagcttgttcacgttattgcaatgtgctgcatgaattacattgctctcaatcatcatgttttgataaataaaatccgccggataaacttagtctatacgcgcccggcaaaaaatgcctgtaccgcgcgcccgtcaagcagattcaactcatcgcgggtccgctgctccacgtcaccgcgctacgcaagctgccgtacaatggcaaaacccaccatcccgcgatggcccgccacaaaaattcgtttcttgttcatggttattccaaagataaatttacatcgaatccatgagatttcagcagtgagtgttttttcgcggcctccagatcgttcgccaccatctcggagaccatctccgacagggtga

SEQ ID NO: 387638 - DNA, 633 bp, Salmonella enterica
atggatcagctcatctctgcgctcggcaaaaaagatcatgcgttgctgattgattgccgtacgctcggcaccaaagcggtttccatgccgaaaggtgtcgccgtggtgatcatcaacagtaactttaagcgcaccctggtgggcagcgagtataatacccgccgtgaacagtgcgaaaccggcgcccgtttcttccagcagccggccctgcgcgatgtcagcctcgaggcgttcaatgccgttgccagcaagctggacccggtagtcgcaaaacgcgttcgccatgtattgagcgaaaatgcccgcaccgttgaagcggcaggcgcgctggagaaaggtgatttgcaccgtatgggccaactgatggcggagtctcatgcctcaatgcgcgatgatttcgaaattaccgtcccgcagatagacacgctggtagacatcgtcaaagcgactatcggcgataaaggcggcgtgcgcatgaccggcggcggcttcggcggctgcgttgtcgcgctgatcccggaagatcgggttcccgccgttcagcaggccgttgcgcaacagtacgaagcgaaaaccggtatcaaagaaaccttttatgtatgcaaaccgtcacaaggagcaggacagtgctaa

SEQ ID NO: 387639 - DNA, 348 bp, Salmonella enterica
atgttagataacaacacatctaaaatatatagatgtatttttgtcaagagagaaagccgctatgcagttgccagagcgatctgttacggtcagaaaggtgagacaagaaagcgatatactgacagtcaggaagagcaactgggcgcgctggggctggttactaacgccgtagtgttatggatgacgctggacccgttatttttttgcggcgctgaacgtcagctgctctttcagaaaaataagggtaacgccctggtcacgaagccgggttgtgacagcgcacatatccgacacattccggcaaaggcgatcgatggaatgaaccagaagcgtatcacccggtcgtaa

SEQ ID NO: 387640 - DNA, 849 bp, Salmonella enterica
atgcgtacagataacaatgaacataaagcactattctccatcccgacggcagcgcacagctccgccctggcaaacatcaaacctctgcctgtgcaacggagaattaccgggcataaacagaccgacgcctatctctgggtactggaggtcatccgcctgaatgaaccggcacatctggacgctgcagaagctgcgctggagaaaattaaaatctctccaaaagaggccgaggaacggtattcccgttatctgctggcgaatggcggcgatcctttccaggtagctttcggtaccatcggcatggataacccggccagggctattgagaatgcgcgtaagaacatcaggaaagctgctgatgttcgcgctacgttcggcagctatgaggtagcgatggaggacgtagaggctgagcgacttattaagtcctctgcgaaattcatcgatgattatgactggggatggactccagaggaactcgaagacggttatattggcggcggtcgtatgtttgaaattgaagatcagcgtcgtgattatgttgatggctatcgtgacgttctgccagagccgcatactctctctgatgttgttcgtgaattcgtttactgggactggctttatagctcacgcaatgttgccggcaaagaactcggttactccgggcatcataattcagtctgtgaccgtgagcattatctggaaaaattgatgacaacaatcaagccagtcacacgcacagaagcaatggaagtttgccggtgggtgctggagaacgaaagactcaatgacctgggcgaggttacaaacgccattatcctcaacctggtaggggagtgcgaacaatga

SEQ ID NO: 387641 - DNA, 816 bp, Salmonella enterica
atgaagcttgaggcatcgttaaaacacttcagccctcagggaatgcatatcagtgacgacgtgaaaggaacctctccggatcgtctcaccggcaccgatgttatggccgccattggtaccaccagcagccgcgcgcggtttggtctggctgctttcttcggaaaggccgggatcagcaaaacggatgaacaacaggctgtgcaggcgctggcgcgtcacgcgatggatactgcaccgaagaacgtgcgcaaagctgcaggtggtgaatttggctggtgtatgctggtactggcgcagtttgcctttgctgagtattcccgttcggcagctaccagcgtgacatgtcacagctgcaaaggcagcgggcgaattacccgaacgcagacaacccgcaaagtttcttacccgtgggggaaagcaccatactgggccagccgttcccgtgccgttcgtccgtcagactgggagcagtggacagaggtaacggaggtagtgcctgctgtctgtgaagcttgcgacggtaagggaacaataagcgcccggtgccgttgcggtggtaaaggtgaggtgctcgaccgtaaagccacaagcgatcgcggcgcaccagtcttcaaaacctgtgaacgttgtagtggcgaggggtattcaagggtgtcttctgcgaccgttcaccgggctatccttaaacgtctgccggatcttcatcagtcctcatggtcgcgtaactggaaaccattctatgaaatgctggtggatgtgttgtacaaaggagagcgtcagtccgcatcagaatttgagaaggcaacagcttattga

SEQ ID NO: 387642 - DNA, 813 bp, Salmonella enterica
atggctgaaaatgataatccaggaaaaatgatatggcatgttgcctgtgatgaatcaggtatagatgggcagcgtttttatggctttggtagcctatggatgaaatatcaacgccgtggtgattttgcaaaacttatccggaatgtccgtgaaaaacacggatacttccaggaaataaagtggcaaaaagccaattccaaaaaataccttccgtttcatatagatttaatcgagcttttttttaagcatcaatggctcgcgtttcattgcattgttgttgagaaatctatagtggataagagttttcataacggcgactatgatctggccatgcgaaagcatttcacaaaactaatgacaactaagatttcaaacgttttgcgtgctcaccctgagcgggattgcagctttcgtgttgaagtggacccaattgcctctcgatataagaaggctgatgaagcattccatgtaatagccaataatatgctatttatgcagcatgggataaaagatcttattacttcagttgtcaccaaagactctaagtcatctgaaaatatacaaatctcagactttttccttggagccataatgagcgcatatcaaggcaagatatcctctgaggcaaaagtaactctagctgaaaagatcgcagagaatcttgggggggacacgctgacctatgatacatggcctacagaaaggaaatttaatatctggtttttttatgacagaactcgaggatttcgcgaaatcgaaactaaacctgtcaaattgaaaaacccattgccggaaaggaatggcagtaggtga

SEQ ID NO: 387643 - DNA, 450 bp, Salmonella enterica
atgagaatcagtgaaaagggagtttccctgattaaagagtttgaaggctgtagcctgacagcttatccggacccgggaacggggggagagccctggaccattggttatggctggacccactctgttgacggtaagccagttaagcccggaatgatgattgacgaggctaatgccgagcgcttgcttaaaactggtttagtcggttatgaaaatgatgtgtccagactggttaagatcaagttgacgcaaggccagtttgatgcgctggtgtcgttcgcgtacaacctcggagcccggacattatccacatcaactctgctgcggaagctaaacgctggtgattacgctggtgccgctgatgagttcctgcgctggaataaggctggtggcaaagtactgaacgggcttacccgtcggcgtgaggcggagcgtgctctgttcctgtcatga

SEQ ID NO: 387644 - DNA, 585 bp, Salmonella enterica
gtgatacatgcgggcggcgtggatatcgtggggccgaaaatcaatcttaacagcggaggcagtccgggtacgccggtggggacgttgctgccgggtgtgctggaagcgcttatggatgaggataatgggcaggatagcggcggtgaaggtactggtgatgggcgcggcccagatgattcaggcgagcctgatgatgaaaataaggcaaacttacagagtttgcgatttgcttttcctggcgctgacagttcagttaaaactatgagctggttaattggtcaaccgtataagatcagtgacagtaaaggaaatgtactcgtatcgggaacgatcgagcagtcgggacggttgccgagagtgatgctggatgagcctgatgaactgacgttgatgatggggagtgaggaatgggaggttgaggatttagccctagggaatgatgacacttcgtcagatgatgccgcatatgatgatgaggggtatgatttggtaaatgatccttattacggaaaactggaacaggatgagcaatggccatcagatgcggatattaatgaattgcttaataattatgcggaggggtaa

SEQ ID NO: 387645 - DNA, 423 bp, Salmonella enterica
atgaataaaacaatgcagtctgtttttttgcttttgctgtttttcttttccgtatcagtaatgtcagcatgtctggatgaaggggataacgttacgctgaccggagtgctaaaaaaagaaacggcatatggtccacctggctggggagagcatcctcagaatgacgaaaagatgaattactggtttttatatccggacaggatacctgaatgttttaatgcggtggatgatgatacccgtcattacagtaaaaagatgcagatcattatggttgatgagcagtacagtaaataccgaatgtttttagaaaaggacgtaaaactgagcgggaaaatcatgtttgcgaacagtccatatcacagtacacctgtactgattttccatgtgtcaggcgttgagttaatgaagggcggtgataattaa

SEQ ID NO: 387646 - DNA, 1854 bp, Salmonella enterica
atggctcacaagttcatctcggcaacccataataaaaagacgttaactgccatgtataaaatggcagatggaacaatatatatccgtaaaggcgggactattccgtggcgtcttcagaatccaggtgatgtcaggccaaataagtcaaatgccagtgaatatctacaaccgttacggcttgccattgctgatactgcgagtggtcagttttctatgtttggcagtgaagaagatggctgggaaaccaagaaaaaactgttacgaagcagcctgtatcgcgactgcactgtcagtgatatggcaaaagtatatgcaccgaaagaggatgggaatgatccggaaagatatgcgaaagaggttctggctgaaagtggcgtttctccttcgctaacgatgggggatatggatgatgcgacgctggaacgcgtcatggaggctatgaaaaaagaggaaggatattataatttaaaagaaacccgggtggaaaaatgggtttataccaccaatatttctgtcactgacggaattcgccctgttgctggcgttcccttcaaagctacgctgggtacatgtgaatacagttgtaaaacggataaatacggaaagcttgcgccgattgttcataaaaccgaaggaatgaatattgaggtgaaagcggctaacgcagcgggggaatatgaaacggcttattcagctcaggcaggcaatgaaagcaagaatattcttctgaaaagaaattttgtccagtataaggcgcatactttagcccataatcctgaaccaccccatgaaaaaagtcagcccaaaccgacaggatatattattcagtccggagacacgctgtctgaaattgccgcccgttatgaggtgagtgtttccgagctgactgagaataatgggatcaaagatccgaacaaaatttatccgggacagcggattgttatttatggcaaaaaaggaacagatgatcctgtcatcgcacctggtcacattgatggtgatccagtggatggacctttatcccctggcgggtggacacctgatgcgacaggtgggtcgggttcttcacccgcggaaacaggtggcgctacaccttccgggacgggtgaatcttatcctcttcctccttaccccgaatctacatccggtactgatagtacgggccatccaactgttggggctggaggacagaaatccgattcgtctcagacaacggctacgccaaataaaccaataaatgtgccgactgtgggcagtaaaaatagtgggagaccggtggctcccatgggacatgagcagagagatgctccatggatggtcacagctatagctaaagcagaaaaatataaaggtgctgatgagtctattattgaacagtctgaaaattttcactccctatgcaaggtaaattggatacctaccatggttgggagaaaaaatgcatggtgtgcatcttttattaattattgtttgcaggtaaataattatgctatgtggagtgaggctcaaagatcgcaagatatagcgcttaaaaaaaacaaaggtagttttattgaaattaaagaaccagtttatggttgcatggtgatgctccctggccatgtaaccttaatgtatggattagataagaacacaaaagggaaatttattggattaggtggaaatcaggggaggattgaaggagtctttggaggcacgataagattttcatcattctggcttcgtcgagcaaggtttttcttaccagttgggtataagagtaaaagtgatagtattcttggtaattatgatgctagcgaactaaataaacattttatgattcaggttattgaagatggaaacggtacagaatga

SEQ ID NO: 387647 - DNA, 510 bp, Salmonella enterica
atgaaagtattgtctatttttttgtttttgttatgcatcccaatacattcaatggctgatacctatgagtattttataaaattgggaattaatgatataaaatatgatgttcatatctctattagagagtcgagtattagaatttacgatagttttgatctatcgtggtcatataatgacactatgcctcaatgtgttaatagcaataatacgaaaatattactgcgtgattttcatgttgaaaatgtaaaaaatatgcggaatatcatctttatatcctatggctttctctgtaatgaggatccatctcaagttaaatatgtagccatatataaaggtgtttcatatattttatcaggtatcccattgactgtatctgttagcgataattggaataatataagtaaaactaagatttcttataatgttagtgatactctgagagcaaatggcgaattatttagttttatgattaatagttggccgtctcaggcaatatttattcgttaa

SEQ ID NO: 387648 - DNA, 540 bp, Salmonella enterica
atgaatttaaaaaatgtattgctatttattattttcttgattcccttattttctgaagcaagtgaatatgtgttagagaaaaattataaacttcaatggaataatgataatggaactatcaataatataaatattgctatagatggcaataaaattaatgctaatgcagtaaatgtaagttcagggaaagaacagtggtctctaaaagactatgtatcacaatgtgagcttgatttagcattggatattatacctgaatctttcgaagtagttgatctattcaacgatggaaataaagttgctttattcgcctataatattgggtgtgttggcggagtagatcctgttagtgttaaatattttgcctttcataatggagttaaatacgcacttcgcggtcatgaaatgtttattacagataaaggcgttgatgaagattacatttctccaaagcctgatgataatttaaaaaaaaatgttaaactatttaactatatgaaaagaaaatgggcttcaatagcaacgaggattatgttttaa

SEQ ID NO: 387649 - DNA, 795 bp, Salmonella enterica
atgaaaaaaataaatattgaagttgatggaaaatcttatctgctcgttacaaaaaaggagaaaatggaattaggagtaaaaggtaacacaactactgaaaaagatgaggaagctcacgaaatcgacgtgcctaatattttaataatcacaaggaaaaacgctgatgttttgttcgttttaagagggggcgaaaaggattcttttagggtcatgacggctcaggaactgtatgataatttacaatatcaatggtttgaaccattagccgataactaccgtgagttgctgtatgtgaacgatgctgattatactaaagaagcttataaaatattttcctgggctgatattgcagcgttttccttgatagacagacgatcctatagcttttacaaaaatatggagggtgactggaaaaaaaattcagaaggtggtgctggttatcttttggtcttgatctctggtatgccttattggactgatgccgtaggccagataccatttgctgttgacacctaccgtgataaacagagtatcactaagacagtgcaggtcggaattgaatggggagatgggacgtgggcaggagatgcagattactctaatgaatatgataattatttcgttttgagaggagctatatatgcaagcaaaaaattcacatataaaacaaaatattctggggaaacataccctgctgttgttgtagaagagattaatcattcagtaaactcggaaatccttgggaactccattaataatagtgaactaatacaatatggtatctggaaaaaataa

SEQ ID NO: 387650 - DNA, 297 bp, Salmonella enterica
atgaactattttagccctcgaagcagaggggttacactaggttttgtaatattttatatggagtatgttattatccctgtagtttttttttctgctttcatgaaagtaaaatactctttattgtttattggtgtggttattttttatatgttttatgaatggtatggtacaaatccgcttcgagttgttttgatgtttttttcgtgctcagttggatatgttatggtaattatttgtagtgttataatgaaatgtttaggaaaaaataatacagccaaatctaataaagatttttag

SEQ ID NO: 387651 - DNA, 285 bp, Salmonella enterica
atgcctacagcagcccggctcagtgacaaaggcacgcagcacgacggttattacgagaccgtgattaccgcgggttcacccaccgtatttattgacggcctgcccgccgcccggatgggtgacccgctgacaccgcattcaaaaccggagcatccgccccatccgcgcaagatagcgggcggctcctctacggtatttatcgacgggctgccagcggccagaacgggcgatgcggtggactgcggcggcgtggtcatcggcggcggtacggtgaatacaggctga

SEQ ID NO: 387652 - DNA, 414 bp, Salmonella enterica
atggcatgcaatggtaaacaccttacgacttatcagtgcgaaatgctggggcgtattgatggtcgccaggtggcccaccagccgcaaatagccaatctggtttatggtggccgcatgggtaacaaagacgccggagatggctggaagtatcgagggcgtggacttatccagattaccggtcgtgacaattaccacaagtgcggcgatgcgctgggtattgatttattgctggtgccacaactgctggagcaggaaggatatgccgcccgatccgcagcgtggttctttgtgactaaaggatgtctgaaatacgccagcgacctggtacgcgttacgcagataatcaacggaggacagaacggtattggtgatcggcgggagcgctttgagaaagcaaaatcggtgctggtatga

SEQ ID NO: 387653 - DNA, 480 bp, Salmonella enterica
atgaatctgttacctgtattgctgaaaaaatactggttgcaactctcagtgactttgctgattgctgcacttgcatggacaacagagcattaccgcgataacgccattcagtataaatcgcagcgcgataccgccagccatagcctgaagctggcgaacgcgacaattactgacatgacgaagcgccagcgtgacgttgccgccctcgatgcaaaatacacgaaggaattagctgatgcacagaccaggaatactgatttgcagcgccgccttgctgctggtggccgggtgcgcgtcaaaggacgctgtacagtgcccgccagtaccacatccgccagccccggcagcatgggcgatgctgccaccgtcgaactctctccgggggctggacaaaacgttctcgatatccgcgccggaatcatcagcgaccaggaaaaactgaagtatctgcaggaatacatccgggcacagtgcagataa

SEQ ID NO: 387654 - DNA, 576 bp, Salmonella enterica
atggcaggtcagggtgcagcaggggcgttactgctggcagggctgatgatgagtgcgggcgcaatggcggcctccggcgacccggtacagggcggttcggggtctgtgaccatcaacgtcccgatagtgacgtcaacctgcagtgttacggtgccgacggagataaattttgaccccgttgacaaaaaatcaataattggtgatggggctgctcgttctgtagcccaaaagaatatggatatcactctcagtggttgtagtggtaaaaccctgctgatgagtacgcgtgcccatgccatttctccggctctaaatgttcgtggaaactttagttccggagatccggataatgtgctgggatatgttatttcttatccaaacctaccggagattagtggtggtagtatttcaagcttcttgatgtatctggataatactcatcctttaactattaagcccaacagtgacacctatctgatggccagcaatatttacctggaaagtacaggaaaaaatccttcaaatctgggtaccactgtcagcggtggttttgattatacctttacctaccagtag

SEQ ID NO: 387655 - DNA, 237 bp, Salmonella enterica
atgaatctgttacttgcattgctgaaaagatactggttgcaactggtgtttactttgctgatggcaggcgcatttatcgtcggtaatgtctggagtgacaggggctggcaaaagaaatgggcggaacgtgacagtactgagtcatctcaggaggtcaacacccagaccgccgcccgtattattgaacagggccacattattgctcgtgatgaggctgtaaaagatgcacaagcataa

SEQ ID NO: 387656 - DNA, 507 bp, Salmonella enterica
atgtttactgcgcaagccgggcatgaaagctctggttttacaaggctggtggagaacttcaactacagtatcgccgggctgaccgggttcatccgcgccgggagaatccctccagaccaggccagcactcttggacgcaaagcctgtgagaaggcgcttccactggagcgacagcgtgtaatcgctaatctggcatacagtaagcgaatgggtaataacgggcctggggacggctggaattaccgcgggcgcggccttatccagatcactggcctgaacaaataccgcgattgtggtaatgggctaagaactgcgctcgttgctcatccggatctactggcacaggatacgtatgctgcccgtagcgcagcgtggttcttcgcaattaagggatgtctgaaatactccgacgatctggtacgcgttacgcagactatcaacgcagggcagaacggcatctgtgacaggcgggcacgttttgaaaaagcaaaatcggtgctggtatga

SEQ ID NO: 387657 - DNA, 390 bp, Salmonella enterica
atgagactttccggcaggcgggtcagccggttaacagagaccgccagctcctgtagtcctggcggcagcgtcggcaggcgggtcaactggttaacagagaccgacagcgtctgtagccctgatggcagctccggcaggctgatcagctggttactagagataatcagctcctccagtcctgacggcagcggcggcaggcgggtcagctggttaccagaggcccacagcgactgtagtcctgacggcagctccggcaggcgggtcagctggttaccagggaccgacagcgacagtagtcctgacggcagcctcggcaggcaggtcagcttgttattagagacaatcagcttccgtagtcctggcggcagcggcggcaggcgggtcagataa

SEQ ID NO: 387658 - DNA, 249 bp, Salmonella enterica
atgattattaatggaaggaaaataaaagctaaagatttagcaaaacaggcgggggtatcacgctcaaccgtaattaaatattacggtattagtcgtgaagaatatgaaagagaagcagcagagaaaaggaagcttgcttttaatttaagatcttcgggtttgaaatggaaagaagttgccgaaaaaatggatacgacattaaacagtgctgtcgcatattacagaagatatatagcattacaacaataa

SEQ ID NO: 387659 - DNA, 204 bp, Salmonella enterica
atgacgcagaagaaaaaactaatccgtatttctgaagtaatcgaccgtacaggttatggtcggacgtggatttataatctgattaaaaagaatagtttcccaatacctgttaaaaccggtgaaagaactatcgcatttgtagaaagtgaagttgatgcgtggattgatgaaaagattttttcctcacgtaatcaggctgcttaa

SEQ ID NO: 387660 - DNA, 411 bp, Salmonella enterica
atgaaatactataatctaataatattaacattgttattttttggtaattattcatattcaatggagtttaaagtagctccttcagataattttgatggtgtcatctattacacattgcatatagaagatgctcatagaataaggaatgttgacatagctctggaaggcaactctaataatgttactgtaaggcaatattataatttttcctgtggttggggcgaagcttttggcgttagattaggtatgagctcagccacggaagatggagtgttaatatttgataatatatatgcgttagatggtcaattaaatatattgtttgctaaatcatatagtcgcatggagaataaatggattgaccctattaatttgaatagctcagtatataatcgtatggggggggcataa

SEQ ID NO: 387661 - DNA, 417 bp, Salmonella enterica
gtggattttgagtctattgaacaagggccattttatctaaaagatgctggcaatattacgattaaatatattagagacgattttttaaagcttgtacgcactgatgttaatggtgagaatatcgttgattcaattaaaaataataataataaggctccttttgttcggacggttttttttatgaaaataaaatccaaaatgaatatcattagtttaatatcttggggggatgtaatgggagaaggtggctattataaaacatatgcttatatatatgataaaaatggcattatacgtgctaatgaaatattgaataaagattctagcttatcagggtatagctcagaaaaaaaaccatttaaatataaaaatgctagcactataaaagattatatacttaaaaatcatggtttttag

SEQ ID NO: 387662 - DNA, 405 bp, Salmonella enterica
atgagatttaagttattagttgcaatggtttatttgattccattttttttattagctaaacaacaaattattgttggttgttttagctctgggaatattaacctaaaatatacagagatattttatggtgatgcttccttaggttatgtggtttatgaaaagtcgtcacgatttataccacttgcttttataaaaaaaacagaaatggtttttgatgatagaccttcagagttaacttattcttggagtgaggttatcgatggtaaggttaatggtttgtatgtggtttcttcacagggcgcgagatttaatagtttttattacaagtcaaaaactggaagtgtatttaactttcaagaaaatatagatgcttataataaaagtggtactgactgtatatggtga

SEQ ID NO: 387663 - DNA, 123 bp, Salmonella enterica
atgggctggcaaaagtgtagcggtattaggcgcagctatttagcctctaataattttattttcctcaccatatacagtcagtaccacttttattataagcatctatattttcttgaaagttaa

SEQ ID NO: 387664 - DNA, 510 bp, Salmonella enterica
atggtcttccaccagctccgtggaggttttccagccattcagcggatcggtgtatctcacttctgtcgcgttatggcggtctttcagggcgctgaagctgtatttaaagcgcccgcccaccacgttactgttggtgtaggtccatgctgtatcggagggccggtcctgaacgaaggtcatcctgctgccgttccacaccggcatacagcgcatcaccgaacagaaatccgccagcacgtcatacgccttacgctggctggtcatatacgcattaagcgtcatgcggggttccgtgccgccaaatccgtccggcaccggctggtcgcagtactgtgcgatggcgtacagcgcccatttatccacatccgccaccccgatacgcctgcccagcccgtaaaggggactggtcaggatatccagcaggcaccatgccggattattcgtgtacgccggtttaaacgtcccgtcccacagcccggtatatgtccgggtgaccgggtcatagtttga

SEQ ID NO: 387665 - DNA, 414 bp, Salmonella enterica
atgcccctcataaaataccggcgtccactccgtgacgccattttcattaagcagggtagaagagagggtctgaatatcctgctgctgaaagatgcggaagttctgccgcaggccacaacgccacaggggaggtactatcgtcagatgataacgcatctgccagtgattattttccccctgcatcacttcgttgataataccgctgacgtaacgttgcgcctccatgccctgccagatcgtcagtaccgcgttcttttccagaaaatttgtcgccgccagatccggctggtcgctggcgatatccacctccagtacaaagggggtggaatggcactggtaaagactgaaccccaccactgccgtggctgtctcctccagtccgtctatattcagcgtaaaacgcagaccttttaa

SEQ ID NO: 387666 - DNA, 399 bp, Salmonella enterica
atggtccccggtggtggtgtgttcctgcttccctcccaccgtcaccctgcggtcatttttcacatacagcccgtcatcgtggctgatacccgccatccggtcgttcgtcaccttcagcgtctggtcgttacgtaccgtgatgctacggttattcgccaccgtaatcgtctggtcgtgcccgccttcctttttcgtccccacgctgaccgtctggccggtggtcaccgtaatcctctggttattcccgatgctctccgtgtggtcgtgtctgacttttgtgctccggtcgttcagcacctccgtgtccatgtccttctgcgcgtggatatacacctgctcctggtccgtcgcgtcctcgaaccgcagttcattaaatccgctgcctttgtacgtttttga

SEQ ID NO: 387667 - DNA, 1449 bp, Salmonella enterica
atgtctgatgtgcccttaattgctgtagtaatggctggtggtacggggagccgtctttggcctctatctcgggaactctacccaaaacaatttttacaattttctggagagaattccttattacagacaaccctgcttcggctgtcggcacttgcatgtaaagatccattagtcataacaaacgagcagcaccgttttattgttgcggaacagttacggcaaatagatcaacttcacgataacattattcttgagccgtgtgggagaaatacggctccagcgattgcgcttgctgcattttcggcgcttaaacgtaatgagcaggaggatcctttacttttggttcttgcagctgatcatgttatcgctaaagaaaatgttttttgcaacgctattaagaaagcagtgccaatagccgaaaatggtaatattgttacatttggtatcatacctgagtatgcagaaactggttatggttatatagagcgtggtgcactgttctcggtaaacggaaattcaactgaaacaggtttttatcatgtgaaaaattttgttgaaaagccggatagattgacagcagaaaaatatatctctacagggaactatttctggaatagtggcatgtttatgtttaaggccagtgtttatctgaatgagttaaaaaaatttagaccagatatttatagtgtttgtgaacaggtggtttctgcctcatatcgtgatcttgattttattcgtattcctgaagctttgtttaaagattgtcctgcagaatctattgattttgctgttatggaaaaaacggaacattgcattctttgtccaattgatatcggttggagcgatgttggttcctggcagtctctgtgggatatcagcgaaaaaaccgatgagggagatgtttgtaaaggtgatatcctgacatataacactaaaaataattatatatactcagagtcagcattggttgctgctgtaggtgttgaggatattgttattgtacaaacaaaagatgccatactggtttctaaaaaatctgacgtccaggatgtaaaaaaaatcgttgaaatgctaaaggcgcgagatcgtacagaatatatttctcatcatgaggtttttcgcccctggggtaaatttgactcaatagatcagggcgagcgatataaggtcaagaagattatcgtaaaacctggagaagggctttctttacgtatgcatcatcatcgttcagaacactggattgtactttctggtacagctaaagttaccctggatgataaaacgatgctaattaccgcaaatgaatcgatttatatcccactgggtgcaacttacagtctggagaatccaggagttattcctcttaatctcatcgaagttagttcaggagattatttaggagaagatgatatcgttcggcagaaagaacgttacagaaaagataattaa

SEQ ID NO: 387668 - DNA, 867 bp, Salmonella enterica
atgaaaatagttgtgataaggttggctggagggttaggcaatcaacttttccaatacgctatgggttatgctgaagcaaaagagcaaaattgtcagctgaaaatagatctgcgtggctataaaaaatatcacttacatggtggctatcgtttaaataatttaaaaattaaacctgcaatgcttacaaaaagagagatgttatattttccgaatatactagttcgcgctataaatagatatcctagattatctttatatctaaagaggtttgagtcagaatattttccagtaaaaaataaagaacatagtaagtcaatcgaatttattggcttttggcaaaatgaacaatattttaaaagatataaaaatgagttgcgtaaaatatttactcctgtgaatctaagttcagatgttttgaaacttaaagaaagaatacaaggacaaaattctattgctctccatattaggcgaggcgattatatatctaatcatgaggcaatgaatactcatggggtttgctccttgaattattatatttccagtgtgtcttatgttaagaggatggttgctaacatttctttttttgtattcagtgacgatatacaatggtgcaaggaaaatgcaagagaaatatttaatagtgatgatgaagtccactatgttgaaggcaatagccaggaggtagatatgtggctaatgtcagcagcaaagcaccatatcatagcaaatagctcttttagttggtggggagcatggcttgctagggatgcaaataatatgacaattgcaccaattccatggtttgataaaaaagaactttcaggatttgatccgtgtccagaaagttggataagaattaaaaaataa

SEQ ID NO: 387669 - DNA, 702 bp, Salmonella enterica
atggcaacgacggacgcattcgatatggcggcaccggcaatggtacgaatctgcctttacggggatttacaacgatttggcaggcgcttcagtctcagtataaaaaccgcggcggaaggcatacaggcgctggcgatacagcttcccggattccggcagcgactgagcgagggctggtatcaggtccggattgccggaggcgacgtggtgccggatacccttacggccagactgcatgaaccgttacccgcgggggcagtgatgcatattgtaccgcgtctggccggggccaagtctggctgggcgggtgtgctgctgggggcggcgctgattggtgcatcgtttatacccggactgaatgccctggcagcgacagtgctgttttcctccgggaccagtatggcgctggggggcgtggcgcagatgctggcaccgcaagccaaatcgcccgccatgcacagtgccgataacggcagacagaacacgtatttttcctcgctggaaaacatggcagcgcaggggaatccggtaccgctggcttacggggaggtgatgaccggctcccggcggatttcgcaggaaatcaccacgcgggatgagagttcgccggataaggtggttgtatttggccgccggacgccggataagacgggggatacagctgcatcaggtattgcagcctcccgggtcattatgcgctga

SEQ ID NO: 387670 - DNA, 954 bp, Salmonella enterica; identical to SEQ ID NO: 387036

SEQ ID NO: 387671 - DNA, 1161 bp, Salmonella enterica
atggacgaaaagaaactcaaagcgctgtcggatgaactggctaagggccttaaaaccgaagctgatcttaaccagttttcccgtatgctgacgaaactaaccgtcgaaaccgcgctcaatgctgagctgactgaccatctcgggcatgagaaaaatgcccctaaatccggctcgaatacccgcaatggctactcgtcaaaaacactgttgtgcgatgacggcgagattgggctgaacacgccgcgcgatcgtgaaaatacctttgaacctcagctgattaagaagaaccagacgcgtatcacacagatggacagccagattttatccctctacgccgaaggcatgaccacacgtgaaatcgttgccaccttcaaagagatgtacgacgcggatgtgtcgcccacgctgatatctaaagtcaccgacgccgtcaaagagcaggtcacagagtggcaaaaccggcaactggatgcgctatatcccattgtttatatggactgtattgtcgttaaagtccatcagaatggcagagtgataaataaggccgtcttcctggcgctgggtatcaataccgaaggtcagaaagaattactgggcatctggctggccgaaaatgaaggcgcaaagttctggctgagtgtgctgacagagcttaaaaatcgtggccttcaggacatcctgattgcctgcgtggacggcctgaagggcttcccggatgcgataaacagtgtctacccgcagacccatatccagctgtgtatcatccatatggtacgtaacagcctgaaatacgtgtcctggaaggactacaaagccgtcaccagcggactgaaggcggtttatcaggccccgaccgaagaggcggcgctgatggcgctggatgcgttcgcgggcaagtgggacgacaaatacccgcaaatcagcaaaagctggcatgcgcactgggaaaatctgaacacgttcttcggctacctgccggatatccgcaaggccatctacaccacgaatgccatagaatcgctgaacagcgtgatccgtgcggcgataaagaaacgcaaagtgttcccgacggacgactcggttcggaaggttgtttatctggcgatcaaagatgcctcaaaaaatggagtatgccaatccagaactggcgactggcgatga

SEQ ID NO: 387672 - DNA, 813 bp, Salmonella enterica
atgcgcgctcatctcgccgccgtacaccgcatcctcaagacgcatccgctccttgataaaggcgtgcccggttttcgacatcaccggcgtcccgcccgccgccgtcaccaccgcctcggtgttccaggtcaggcgcgggtcgtggataatcttcgcccccgggtgtttctccagaaacgcttccgccagcagcccgacgatgtagtacccctcgataaactgccctttctcatcaaacaggaagcagcggtcgaagtcgccgtcaaaggcgatgcccatgtccgccccgtgttcgataacggccttgcgggtgtcgtcgcgacactccggcagcaacggattgggaatgccgttcgggaaggtgccgtccggggtgttgtggattttgatgaacgccaccggcgcgcccagcgccttcagccgcgcttcgatagcgtcgatgaccggccccgccgcgccgttgccggaattaagcaccagcttcagcggcgtaagatttttaatgtcgatataccccagcagatggtcgatgtaggcatcgcgcagggtgatttgtctgtagctgccgcgcgcggcttcattgaccggcgggaagttgttcgcttccgccaggcgctgaatgtcgcgcaggccggtgtcgccgcttatcgggcgggcacccccgcgtaccagcttcatgccgttatagtccatcgggttatggctggcggtcacttcgataccgccgtccacgccgaggtggaaggtggcgaagtaaatctcttcggtgcccgacataccgatatccagcacgtcgacgcccgcatcctgtaa

SEQ ID NO: 387673 - DNA, 495 bp, Salmonella enterica
atgtttattgcacaaacgggacatgaatcagcaggatttactgttctgaaggaaagctttaattattcggtggaggcgctgaaaaaaacgtttggtaaacgccttacgccttatcagtgcgaaatgctggggcgtattgatggtcgccaggttgcccaccagacacaaatagccaatctggtttatggcggccgcatgggtaacaaagacgccggagatggttggaagtatcgcgggcgtgggcttatccagattactgggctggagaattacaccagatgtggcgttgccctgaaactggatctggtggcgaatccgggacagcttgagctggaacgtcatgccgcccgatccgcagcgtggttttttgtgactaaagggtgtctgaaatactccggcgacatggtacgcgttacgcagataatcaacggaggacagaacggtattggtgatcggcgggagcgctttgaaaaagcaaaatcggtgctcgtatga

SEQ ID NO: 387674 - DNA, 309 bp, Salmonella enterica
gtgaataatgttgctctctatcatcatgttttcataaataaaatccgccggataggtgttattggcgacaatgccgcccactttcgccgccgccagataaacctggtcgatacccgccccggcaaagaacgcctgtaccgcgcgcccgtcgagcagatccagctcatcgcgggtgcgcagtaccagctccacgtcgccgcgctgcgcaagctgtcgtacaatggcggaacccaccatcccgcgatggcccgccacaaaaattcgttgcttattcattctcaggactccagcgcgatggccacctcgtaa

SEQ ID NO: 387675 - DNA, 282 bp, Salmonella enterica
atgctgaccccttacccgtcgccattggacgccggcgtacaggagtaccaccgttatctgctaatcggcctggcgccggaaggtaagatacgtatctggctggaaaataataaaaagcccaacacgcgattaacggagaataaagatatcgtggtcgagacggtatccggtgaaaaactggcgatgtgcaagggggtaaccagatttagtcacggatatcactatataaaagaaaccgaagattttatcaaagataaaaaatacccttacggcaactggtaa

SEQ ID NO: 387676 - DNA, 273 bp, Salmonella enterica
atgttaaccctgaagaactcagggggtctcatactgtacggagtatcgctttttgtacagataccagaacgtaaccagacgctaaaaactggtacacctcatgaaaataacccagtggctgaaaagcctcatccatacggagcaaagagaaatgccctgcgttcagacacggtaacaaccgcagttaaagcacagattaaatccacactggatcagcagattgacgctgcggttgatactgcgctggtggatttgtcaggagcgggtcagtaa

SEQ ID NO: 387677 - DNA, 294 bp, Salmonella enterica
atgttagttattaatgatagccaattagatagcattagtggtgcgggtggtggtattggcgaagcaatatcaggtattggtcatgtggttgagggggctacacatgtagcaaatgctgtaaatggtggcgatcttggcgaagggttaggacagcgctggggaaaagctggggccaaggattactgttcatatgaggcaactgaaaatggaaagatgtcttcatctttgtataatgactgtatgaaaaatcctgctggatttggatataaagatactggcccatggggaggatga

SEQ ID NO: 387678 - DNA, 3135 bp, Salmonella enterica
atgcggggtatcggagctgttatccactttagcccaccgacagatagtagcataccgtcccctgacctcagcgggaggtggaacagtatcagagactggttctccctgcccgttcaggatgaggccgcactgtgctttcgcgttttttatcagccggatgaagccatgcctccctccgacaggttgaagaactttttaaaactgaaagcactggcctctccgggacgccaggataatttcaccacagagcgaatactcggtaccggtgaaaccatctgcatgattgcctccggtaaaaacagcgacctcccctccgtcacacttcacctgagcgaccaggaatggcatatgacacaatctcaggaattagccccggcagccgagtcaggagaaggcccgcgttcaaaaggcattcccattacaagcacgcagatacaggcctggctggacctgccacaggaggcaaaacgcgacgcaggcggctggagaaagtggacccggacgcaggggataactttaggaagtgccggactctgtctgacaaacaccggactgaccccctatggcagggaacgattgcaccctcccaaagagagaagcctccccatcactgtcggccagctccggacgtggcgtgacctctctgtggaggcgcgcagtgaaacaggcggctgggtgaaatgggcgctcgctcagggaatcgctatcaccagcgccaaaaagcatctgacaaatacgggactgactctctatggcatggaacggctacagcgtcctgaagaaaggggggctaccatcactgaggcgcagatcctgacgtggcttaacatgccaccggaagagcgcaaccaggcaggcggctggataacgtgggcgcaggcgcagggtatagcaaccaacagtgccaggctctatctgtcaaacacagggctgactgcccgcggcatggcgcgactgcaactctccgaagagaaaggcgtccccatcacggacagacagattcaggcatggcgtgatctgccgcaggcgacaaaacaccaaacaggcggctgggctaaatgggcactggcgcaggaaatatctatcaccagcgcccaaaaatatctgacaaacactggactgaccctgcctggcgtggagatgctgcagccccccggagagaaaaccgctcccatcactgagtcgcaactcctggcgtggcttaacatgtcagcgcaagaacacaacgagacaggcggatggagaacatgggcgcagacgcagaagatagccatcaatagtgccaggaaatatctgacaaataccggactaacccctcgcggcatggaacgattgcagcgagccgaagagaaagaccactccatcacgaacagacagattcaggcatggcaggatctgccacaggcgacgaaacttgagatcggcggctggaaaaaatgggcgcagacacagggaatctccctcagaagcgccggaaactttctgacaaatgtcggactaaccccctttggtacagaacgtctgcaaccgccagaagaaagaggcgctcctattacaaatgcacaaattcaggcctggcgggacctgccgcagaaggcaaaacgcgaagcaggcggtcgaataaagtgggcgcagacgcagagaatagccatcagaagcgccgaaaactttctgaccaatagcggactaaccccctttggtgcagagcgcctgctcccgccagtagaaagaggcgttcctattacaactacacagattcaggcgtggcaggagctgtcgcaggaggcgaaacgcgcggcaggcggctgcataaaatgggcacaggagcagggaataaccatcggcagcgccatcgcctgcctgaccaacaccggactgaccttcaatggcaggaaacggctgctgccccccgaagagagaggctcaaccatcacagaggcacagttcctgaagtgggctgatatgtcaccggaagagcgtagcgaagcaggtggctggagagcatgggcgcaggcacaaggcatatccatcaggagtgccggaaacgttctgaccaacagcggattgaccccctttggtacagaacggctgaaatcgccggaagaaaggggcgcccctataacaaatgtacaaattcggacatggcgggacctgccgcaggaggcgaaacgccaggccggcggctggataaaatgggcacaggcacaggaaatagccatcgggagtgccagcggttatctgactaacaccggtttgaaggctaatggcatggcgcgactgcgacaatcgccgtcagcaaccgtcacgctctctcgcccacaggcgtcaacatccgcagacaccagcgatgagatacccgtcagcgagagtccatccccgcaggacagcgaggatatcgccgccccgccggcaaaacagatcaaggaagaagacgtcgtgacctggcgcacacaccagataaacaataacctgcccattctgcagcactggcatgacccgacgatatcagtgatggcgcaggcggaagggaggactgaaaccctgcaggtcacacgctggggtcctctttttaacgctttaccccggcagacaaaagccaggattaatcaggagattcgctggtttttgcaaaatgaaggaaggcatgatgcgcggatgaatgaaatgatgtccgtcgctatcccccttgatgaccgcgacggttacagggggcgtacagtctacgcacgaaccgatctggcggcgtttaccgtactgggcccctactctggccgcctgctggacagtgaaacggtacggggtgaatatgaaaaagagtatggcagggaagccagcaattattatttcgccacgcgaagccaggaacgaattgtatccggcttcccgcagggaaatatcctcagcctgcttaacagcccggtatttactcagcggacggcggaagcagaagcaagacagaacgtcagcgcggtgcttgtcgggaagaatattcactttttcctcaccacacgcgacgtccgcgccggggaagagctgtggtttgattacgggccgggctaccagcattttgagcccggcgaagcgctacgctcagcgcaggttaaggaggagccgctttcttcggaggaggaataa

SEQ ID NO: 387679 - DNA, 2271 bp, Salmonella enterica
atgcggggtatcggagctgttatccattttcgcccaccgacagatagtagcatgccgtcccctgacctcagcgggaggtggaacagtatcagagactggttctccctgcccgttcaggatgaggccgcactgtgctttcgcgttttttatcagccggatgaagccacgtctccctccgacaggttgaagaactttttaaaactgaaagcactggcctctccgggacgtcaggataatttcgccacagagcggatactcggtactggtgaaaccatctgcatgattgcctccggtaaaaacagcgacttcccccccgtcacacttcacctgagcgaccaggagtggcatatgacacaatctcaggaagagacggctgactgcacagtattgccgcttagcgctggtaacccggcagcgaccaccgcagaagagagcgccggagcaagccgaaaaggaagccgcattaccaatactcagattcaggcatggcgggacctgtcaccggaggcgaaacgaaaggccggcggttggaaaatatgggcgcagccccaggggatctccatcagtggtgctaaacaatatctgacaaacactggactgacctcccgcggagtggagcggctgcagccgccaggagagaaaggttcctccatcacgaacagacagattcaggcatggcgggatctgccacaggatgcaaaactcgaggcaggcggctggataaagtgggtgcagacccagggactctccatcagtggtgctaaacaatatctgacaaatacagggctgacctcccgcggagtggagcggctgcagccgccaggagagaagggttcctccattacaaatgcacagattcaggcatggcgggatctgccacaggaggcaaaactcgaggcaggcggctggatgaagtgggtacaagcgcagggagtatccatcgcaagtgccggaaactttctgacaagcaccgggctgaccccctttggtacagatcgcctgaaacaaccagaagaaagaggtatctccattaccaatatgcagattcggacatggcgggacctgccgcaggaggcgaaacgcaaggtcggcggctggatgatgtgggcgcaggcactggggatagacatcggtagtgcctgtagctatctgacaaacacaggactgacgcccaaaggggtagtacgactctctcctgcagcgagaggtatccccatcacagagacgcaacttctggcatggtttaacatgtcatcggagcaacgccgtgcatcaggcgggtgggccacatgggcgcagacgcaggggatatcctacataagcgccagaaagtatctggcaccgctagacagcgagataccatccagtggcacatcgcgtccgcagccgtccgcgaccgtcacgagtgacagtccacgggcatcaacatccgcagccacaggtgatgagataaccgtcagcgtgagtaccccaccggcgagcagcggggaaaaacgatcgcttccctcgactaaagaggatatctcagccccgccggcaaaacagatgaaggaagaggaagatgacgttacctggcgcacacaccagataaacaataacctgcccattctgcaacactggcgtgacccgacaatatcggtgatggcccaggcggaaggcaggattgaaaccctgcaggtcacacggtggagacctctttttaacgctttaccccggcagacaaaagccaggattaatcaggagattcgctggtttttgcaaaatgaaggaaggcatgatgcgcggatgaatgaaatgatgtccgtcgctatcccccttgatgaccgcgacggttacagggggcgtacagtctacgcacgaaccgatctggcggcgtttaccgtactgggcccctactctggccgcctgctggacagtgaaacggtacggggtgaatatgaaaaagagtatggcagggaagccagcaattattatttcgccacgcgaagccaggaacgaattgtatccggcttcccgcagggaaatatcctcagcctgcttaacagcccggtatttactcagcggacggcggaagcagaagcaagacagaacgtcagcgcggtgcttgtcgggaagaatattcactttttcctcaccacacgcgacgtccgcgccggggaagagctgtggtttgattacgggccggactaccagcattttgagcccggtgaagcgctacgctcagtgcaggttaaggtggagccgccttccccgaagtccgattcgatataa

SEQ ID NO: 387680 - DNA, 4176 bp, Salmonella enterica; identical to SEQ ID NO: 386481

SEQ ID NO: 387681 - DNA, 555 bp, Salmonella enterica
gtggaagataaaattaattttctatatcagtccttgaacgacacacaagcaaccattaaagctattgatgtaaaaattgggttcctctttgtaattgcatttatgcctatcactgtattacaaacattgaatagcaccgtgatgacaatatggtctgcaaatgcaatttataaattatgcttgatttcaatatgtgtaagttggctattatctgtagtatatctttttctggctttaacaagtatctcagatcctaacaaacacatgcatggagctaaaccaagcggattattttatggcaaaggtattttcaagattgaaacggaaaattttggttttaaaataaaagtaacatctaatcttacagtagatgaggtagttagcaatttacctgaccagaatggaatccttaaagaattaacatatgagaaaatgaaaataacatatattagagaaattaagttaggatattattctagatccactaaacttatgtctttttggctactactaagtacagccatttatttaataaataatttcattaagatctaa

SEQ ID NO: 387682 - DNA, 810 bp, Salmonella enterica
atgattaaattaattttatccgctcctgaacctgcaatggcggcggcatttgaatgttattttcagaataccgacaatgtggaaattattcgcagaccatttgaaaccgtacctgaatttgattgtatggtcagtgcggcgaactctttcggcctgatggatggtggcgtggatgccgctataacgacatatttcggcactcagttacaaagacacgttcagaaatatattattcaggaatatctcggagagcagcctgtcggcacagcctttatcactgagaccggtgacggcgaacatccgtggctggttcacgccccgacgatgcgcgttccgttgattattgacggtactgacgcggtttataacgcaacacgggcggcgttactggcaatatttcagcacaataaaagcgtggcggaatataaaaaaataaaatcagttgtgtttcctgccatgggggccggatgtggtcaggttcctcctgacagcgtcgcccggcaaatgaagctggcgtgggacagttttattaactgtgccacggaaattaactggcaatacgccagcgaccgccagaatgctgtattcagcacaacggcatactgtccacagacgctttgtccgaacgccagaacggaatatatcggttttggtgattacagaacgtattgcaaaaaatcaggcggcgtctgcatcagcccgcgccatcagtctgatatccgtatcggtgctcacgctcacggtgtagaaatcggcgcacacgggcatccacttcatacagaatgctcgcacgcgcattctctcgtttaa

SEQ ID NO: 387683 - DNA, 810 bp, Salmonella enterica
atgattaaattaattttatccgctcctgaacctgcaatggcggcggcatttgaatgttattttcagaataccgacaatgtggaaattattcgcagaccatttgaaaccgtacctgaatttgattgtatggtcagtgcggcgaactctttcggcctgatggatggtggcgtggatgccgctataacgacatatttcggcactcagttacaaagacgcgttcagaaatatattattcaggaatatctcggagagcagcctgtcggcacagcctttatcactgagaccggtgacggcgaacatccgtggctgattcacgccccgacgatgcgcgttccgttgattattgacggtactgacgcggtttataacgcaacacgggcggcgttactggcaatatttcagcacaataaaagtgtggcggaatataaaaaaataaaatcagttgtgttccctgccatgggggccggatgtggtcaggttccccctgaaagcgtcgcccggcaaatgaagctggcatgggacagtttcagtaatccacccaaagcaatcaactggcaatacgccagcgcccgccagaatgccgtattcagcacaacggcatactgtccgtcaaagacggtttgcccgaacgccagaacagaatatatcggttctggtgattacagaacatattgcaaaaagtcaggcaacgcctgcatcaatacccgtcatcaggttgatgatatttatatcggtgcacacacgcacaccatcgataccggtgcgcacaaccacaccattcagacaggtgtatacacatactctcgttaa

SEQ ID NO: 387684 - DNA, 939 bp, Salmonella enterica
atgcaggatttaatgccacccattaccacacctgataatgcctttcatgacggaaatccggcgaccggggaactgggaacgattgttgcggcggagtggcttaataatactcagggtgcggtcagagatattcaggctgaatgtattgccatacttgccgctgccggatttaaacccgacccgacgaaaaaacaactgctggacgcaataaaaaccattgtcggtaatgaagtcccggcagcgtccacaacacaagccggtattgtcagactgtccagtgccacagacagcgacagcgaggaagaagcggcgacaccgaaagccattaaagctctggctgaacaatgccagaatatgattaccggggcagtggttcctgcgggtattccatttccctggccgacagacacaccaccggctggctgggctattatgcaggggcagtccttcgataaatctgcttacccgttactggcaacagcctatcccgatggtgtcatccccgatatgcgcggctggatgattaagggcaaaccggccagcggtcgcgcggtattgtcacaggaacaggacggcaacaaatctcacacgcacaccgcgcgggcacaggataccgacttagggacaaaaaccacctcatcctttgattacggcacgaaatcgaccaatacaacgggcggtcatacacatacacagttagttcgggggattggtgcggtagacggaactgccggatcccgaggttccagcgagggtaatgatgggagtggtggcactacagcatcagccggagaccatgcccatacagtttatattggagtacacgaccacactgtatacataggcccacacggacacgtcgttattgtggacgccgacggtaatgcggaaaccacggtgaagaatattgcatttaactacatagtgaggctggcatga

SEQ ID NO: 387685 - DNA, 798 bp, Salmonella enterica
atgtttataaagagagtgaaactcattcttcaaagtgaagacagtgaatgtgggcaggcctgcctggcaatgattttcaattactatggatatggtatttctttgccagagttaagaaaaaatcactccgcccagacaggaggaacaaaagtcagttatcttatggagacatgtaatgatcatggttttagtgcaatagcatatagccttactattgaggaacttagaaaattgacactcccctgtattttgcactggaatttttcgcattttgttgtactaacaaaaataaataagaatattgtagaaataaatgatcctgcactggggtgtatgagagttgaccaagacaaacttaaacaatactttacaggcgtagctgttgagataaagaaaagtgaaagtttttcccctgtaaagccaaagaagataaacatacgtgatgttactggcagagttattggttttattccatttgtttttaaaatgttagccgcatctattttgattgacattattgcattgctaatgccgcgtatttcacagttaatacttgataaagttattcctgatcatgataaaaatctgctgattttttgctttcttgtttcattagcattgctggtccttcaatttgttatttcaactatgagtgatttaaccaagattaagtttgaagcttattttaaaagtaattggaggagtaatgtattttcaaagctaaccagattacctgttgattttttaaatctcgtggttttggtaatatcatgtacagatttaaatcaattgacataa

SEQ ID NO: 387686 - DNA, 411 bp, Salmonella enterica
atgaaaaaactcttccgtatattaagagcgttaaaagctttttatccattttataataatcgtgtttttagattttttttgggcattgttatattttatttatttggatttacagcgcaacgttggattggtaacatctcatccatatgggagggattgttatttgaaatgttattttttatatctgtctatggtgtcatatattttacagttttttcattgatagaccttttttgtgatagagcaacctcgtttcatgaaacatataataagaataatattgataaacagcctataaaatggttttttaagaacaaagtaaagctatctatttgcattaaaatgttgtttaatttttggtatatttgtgtacttattgctgagttaagaaaaattattaaatttttttga

SEQ ID NO: 387687 - DNA, 1116 bp, Salmonella enterica
atgagcgtcttcgataaaaatgatgttgtttattttcctgaaaaaataacgtacgattttgattatcagaaaaaacatttctggcgttgtcgttatacttcggcaagcttaaaaggtttacattacaaaatactgcttccgctgacggtcagacctattattatagaaccaacatctgttgatggattggagggggttaatatcattggtagttaccaaaccatacctgaatatcaatcttcatttatggaggtgaatgtggtttatgggcatataaagaatgatattgacgccagtgactggcttgataagatattatctcttcttggtgaaaaaattattcatcgtaaaaacaactatagtgttagtggtaaatattctgatgtattaacaagtaatgaattcgatggagataaagtaatatccagaattagggtgttcaaaaattatgattttgaacataaaggcgctaatctgatcatggtaaaagccagttgttcccataaagactatgagtcattggctgaggattttcttcactgtgtcaaattttttactttagtcaatgattccaaatggcatctggcagaagaactcaaaagtataaatttagatgtgccagcaaactattcatttttttatccgaattcatggcagtacacagaacgatataataacgaaaagatgagttatttttctttatctctggaaggaacgaaaataatacctggtagtattagtggctattttctatgccatgacacaacaattaataaagaaatgatttgtaatttgattattgaaaatttaacgaataataagtattcagtgacagatgaaattcgtctaaatgaagaacggagtgtttttaataagaatatatctgaactgtggtcgggtacatttagtgtgagtgatgaacagaatcgtaatggtgaactgattgtgtccgccgaccgaattgaaaatgcctggttttattttattgggacatcggcagatagaacatcaaattttatgtcatgggcagtggtaaaacgcgcaatggatataatcattaattctttaaataattacgatttatcttatgaagataatttctatgaacagaagtag

SEQ ID NO: 387688 - DNA, 549 bp, Salmonella enterica; identical to SEQ ID NO: 387098

SEQ ID NO: 387689 - DNA, 657 bp, Salmonella enterica
atgtggcgggtattctgtctcgaactgcgcgtggcgttccgccacagcgccgacatcgccagcccgctgtggttcttcctgatggtcatcaccctgtttccgttaagtatcgggccggagccgcagctgctggcgcgtattgcgccgggcattatccaggtggcggcgctgctggcctcgctgctggcgctggagcggttgtttcgcgacgacctgcaggacggcagcctggagcagttgatgctgctgccggtgccgctgccggcggtggtgctggcgaaggtgctggcccactgggcggtgaccggcctgccgctgattattctctccccgctggtggcgctgctgctgggaatggacgtgtacggctggaaaatcatggcgctgacgctgctgctcggcacgccggcgctggggtttctcgccgcgccgggcgtcgggctgacggccggtctccggcgcggtggcgtcctgctgggcattctggtgctgccgctggccatcccggtgctgattttcgccaccgcggcgatggacgcggcgtcggcgcatttacccgttgacggctatctggcggttctgggggcgctgctggcgggcagcgcgacgttaagcccctttgcgacggcggcagcgttacgcatcagcgtgcagtag

SEQ ID NO: 387690 - DNA, 660 bp, Salmonella enterica; identical to SEQ ID NO: 387059

SEQ ID NO: 387691 - DNA, 378 bp, Salmonella enterica
atgaaaacattaacgcatgaacaatatttagcgctgatttattcccagaatgttaagcgtcaggattatgccgttatctgcccgatgtgcggcaccgtacagtccggccgtctgttgtttttgtctgctgctgcgcctgattttgacggtgttttccggtatctggggttcagttgtgtggggcgctttaccggtaaaggttccccgtctgtcgaaaaagggaaaaaccacggctgcgactggacgctgggtggtttacttcacttccacaccatggaaattgtggatgcgcagggtgttaaacaccgggtgtttgaacccgccacaccagagcaggcccgcgaactggcggcacgtctgggggttatttatgagtaa

SEQ ID NO: 387692 - DNA, 192 bp, Salmonella enterica; identical to SEQ ID NO: 387154

SEQ ID NO: 387693 - DNA, 234 bp, Salmonella enterica
atggcgatgcgtgtgaatgaacatgctgcaaaaaacaagtatgccgcatatgcgctgggtgcgggccgggcggaacgtgatggtgaatacgggaaggcggcagagttgtggcacagagccgcagcggctccgtgtacggcccttcgccgggaatgggcgctggcgcgggcagcgttctgtgagaatgcgcaactgaaaggctggaggccacgcgatgaatgcaagacggtttaa

SEQ ID NO: 387694 - DNA, 144 bp, Salmonella enterica; identical to SEQ ID NO: 387118

SEQ ID NO: 387695 - DNA, 390 bp, Salmonella enterica; identical to SEQ ID NO: 387117

SEQ ID NO: 387696 - DNA, 468 bp, Salmonella enterica
atggaggaaaatggccatggtatatttactacattaatgttagaagccttgtacggtgcgggagctaacatattaggatatgttactccggggagtttatacagctttgttgaccaagctttgggtgaatgggagcaacgacctgtatttaaaactaatgtttctaggtttgttatcttgagagaaacaggtccacggatttccttagacacactcagaatgttaccagtatggttcaaatcagaatcggatatttttgcattagatcctgatttcgaacctgactcaccgactccgtcggatgaaaaaactgcaattttcaaacagcttcaaaactgtaatcgacacggtattatagagccggttgatagcgaccatatgtattttgcagcaatgaattctaaaggttgtcgcttaacagctttaggcgtttactatcgtaagttagcagaaaaacagcgaatttaa

SEQ ID NO: 387697 - DNA, 465 bp, Salmonella enterica
atggctaataaaaagattataagttttcatattatcattacctattttttagacggttctaataaatatccagaaacggctttgtctcctgatccaaatgattttaatctgaaacggagtgttccatttttagatgtcggccattgggcatgtagattagtatccacacaaatttcgtttcttcctgaagatagtttcgttgctctaaatacacattcaccaaatgctttaacttgtctttccttcggaagtccaactaaagaaactattgctttactgatccccattcccacccctagatcaatttctggcaatctatatctttcaaatataatacggttaagtaaaggtcttaattcgccgataatatcatttgcagccctgcgagccctatacatagcatcagttttgtcttcctcatcgactaaaaaaatgccaagataccatctcccaaatattctgtag

SEQ ID NO: 387698 - DNA, 300 bp, Salmonella enterica
atggctggcttgggggcaggggaaattgttatcaattatatagataatgatggtgtcatgaatggttatgatattggatactcttctactataaaatctcatgtgaacgttcctgttacgtttctcggtggtgcaggtagttatgagcaccttaccgaattgattgaccaatgcggtatcgtcggagcagcagctggaagtctttttgtatttaaaggtaagtatagagcggtcttgataagctatcctacgcctaaacaaaaagatatgatttgtaatggctcgatgaagaatttttaa

SEQ ID NO: 387699 - DNA, 378 bp, Salmonella enterica
atgaaaacattaacgcatgaacaatatttagcgctgatttattcccagaatgttaagcgtcaggattatgccgttatctgcccgatgtgcggcaccgtacagtccggccgtctgttgtttttgtctgctgctgcgcctgattttgacggtgttttccggtatctggggttcagttgtgtggggcgctttaccggtaaaggttccccgtctgtcgaaaaagggaaaaaccacggctgcgactggacgctgggtggtttacttcacttccacaccatggaaattgtggatgcgcagggtgttaaacacccggtgtttgaacctgccacaccagagcaggcccgcgaactggcggcacgtctgggggttatttatgagtaa

SEQ ID NO: 387700 - DNA, 321 bp, Salmonella enterica
atgcatgactctcttgattcagctcagaagaaaataattgaattattagataaatcagaaaaaattgaaactggtgaaaaagaaccggctaaccagcactatatgctttatttcaaataccaccactcttctactaaatcacaagaggcttgtctctctgacgaccctgcgaccatgttaattgaggaattcttcgataatattcaaatagtgaataacatcaaattatcatcaatattagcaagttatattaataagaaaatattgaatgtgttcttacctttaacgaagaatgataacaccgacaaatatgacggttaa

SEQ ID NO: 387701 - DNA, 201 bp, Salmonella enterica; identical to SEQ ID NO: 387120

SEQ ID NO: 387702 - DNA, 288 bp, Salmonella enterica
atgagggatggtaaattagatggggtgttcaatacttggtttgccgatggtaaaatacgcattcaaggaatctttcttagtggtacacgtatagggcaatggaaattatggtataattctggtcagcaatcatcagtagtaaattttgaattagataaaattcttgaatgttcactctggaataactctgggaaaatcgtttatcaagggaaagatacgaaacgatgtaatgatatatatgttacctattacaatacttattctttagagtcagatgagccagattaa

SEQ ID NO: 387703 - DNA, 621 bp, Salmonella enterica
atggacggtgatcgtgatggaaaagtgacggaagagaaaatcaggcaggcgctggtggtgcgtaattcgctagtaaggaatgtggtgaaccgcctggtggtaaagcactacagtgagtggtgcagaggtcgctcgacaggaaggagggaggggttctacaaggatcttgacactgatgaagtggcctactgtgagaagtggcagttagatcaggagtggatgagtgaggtgtcaccctttaataatgatgagccggtgtggcattttcatccggttgtgtttttagatgctattaatgatatcaattacccaaaaactcctgtaaatgatggacttgttccattggattttttgcggttttataacggtgaaactattgatgacgcagattttgaaaatgccgcaaaggaactagagtgtgaaatggctgcaatcaaggctgtcgcgaaaactgaaaccggtggctctggaagctattttaaatttgaacaagaagatgattatgtttctgcgatcctttttgaaaggcatcattttcataaatatacaaatggtaaatatgattctcagtctgatatttctaacagaaattctggtggttatggggtgagaacagattaa

SEQ ID NO: 387704 - DNA, 252 bp, Salmonella enterica
atgaaacttaatatattagcacgttttttctattatattgaacaagctaaagatataccttttgattactccagctatgatgaacaaagcttatgttattttgtcgctaatagatacattaacgaaaataaagcagatgagcttatacaagcattgatagatacaaatgacgatgattatataaaagccataagagattatgttcagtatacagctttgaatgaagtgagaaagaaatatgaagacagatag

SEQ ID NO: 387705 - DNA, 372 bp, Salmonella enterica
atgaagacagatagaaagcgaggacgcatagaattaaatcacgaagaacgcagggatatatctatacagttcagagtaaacaaagcagagtttgaatatttaaaatcattagtagaagcatcagggcttgaaagggggcattacattagaaaagagattttaaactctgaaccagtaattaaaagaaagatgcctgagtttgaacaatcattatatagagaaattcaacaccaaggtaataatataaatcagattgctaaaagactaaatgcgaatgaagactttaaacaatctgtagccgcagaagctaactttgctatcaagcagttaaggaaaagaatattaagagcttgcgaggtgtatgctgtatga

SEQ ID NO: 387706 - DNA, 1467 bp, Salmonella enterica
atgaaaggaaatgtaggcaaacacggaaagtcatttaaaaacagagttaaatacatacttaaagatgatcacgatttcatatgtagtaatatgacaagtgatagtaataatattaatgagttaactgatgagttcaaatccgtaagcaaatttaggcaagatattaaaaagccagtttttcacgcttttttatctttacccccaaatgaaaatattacggatgaaaaatgggaagagatagcaaaagactatttgaaagaaatgaatattgatatagagaaacatcaatatatttgtgtgcgtcataaagatactgataaagatcatatccatattgtagccaatcgcatcgggcttgatggttcagtatggcatggtcaacacgatttattaaaaacaatatcagcttgtgggcgtttagaagtaaagcacaacttaactattactgacggtttaaaaggtcaaaaatcagatgtatcagcacctactaaagcagaaattgaaatggcacttcgaacaggtgataaaccagcccgtttagtgcttcaagcctctatacaagcggctatggcaggaaaagcagatttagggacgttcgtagaacgtctgcaggccgtaggcattgaacctcggttcaatgttgccagcactggcaacgtagcgggggtttcattcagtgtaaatgacatagcatttaagggatcttcattaggtaaaaaattcagttggaacacaattaaagcaaaggtgaaatatgacaaaaatagagatgatgaaatcgttagaagattctcagcaagaaaaacaaatgacgaaaatagttctggacgatcacttgttgaaccagatttcaacagtgatagagcctctgacagaatcaatgatgatactatcagaatcagtcagtacagcattaaatcagacacaacaagtattagagaagacagagaaaacggcttcaacaacatcatcgatactaaatctttcaaggaatacgatagacaaacaaatagacgatttagaaatacaaaacagaaaaatacacaaatactcaacggagttaaaaaacaacactataaaaaatcaaacaaaattaataatcaaagtcgcttcaatcgttggcatgataaatctgatagcagttctatcagtaggatactttatcatgcagaaacagctaccacagccacagataaatttagactcaaaagtcgtggcaacatcaatagtagagcaactaagatcgaagaaataaggaaccgattaggaataagcaaacccattatagtgcctaaaaataaagagaagatcattcaagaggaaataaagaaaaagccatcccgtttatctgagtatgaaaatagattgaaattgaaattgaaatcaaatttggaaaaagaatcatcaaaactacaacaactggaaacagttccagatattaactatccaacctttaaaccaaaataa

SEQ ID NO: 387707 - DNA, 1275 bp, Salmonella enterica
atgcgcttaactgatattgcagtaaaaaacgccaagccttccgaaaaaccaactaaaatttccgatggcaaagggctgtatctgcttgtgcatccgaatgggtcaaagtattggcaagctgcttatcgtttcgatggtaagcaaaaagtctactcaattggcacctaccccactgtatcactcgcagaagctcgtacaagcctcttggagatgaaatctctgttagccaatggtgttgacccattgcagcaaaaaaaggctgtaaaagctgaagagcgtggagattttacatttgaggctgtggcgcgggattggcacaaaaaaatgtctgtcagtgagcgctggatacctcagcatagtgaacggattttaaacagcctcatcaatcatcttttcccagctcttggttcaagagatatttcgaagctaactacccgcgatctgcttcttcctctgcgtaaaattgaggccaaaggtcagcacgaaacagcttcacgtctgaaacagcgtattaccgctatcatgcgttatgctgtccaagaagatatgattgctcaaaacccagcgaatgaactcggcggcacattaataacgcctaagcggactcattatcccgctcttgaacttgagcaaatacccgatctattaagtcgcataaatgcttataaaggccgaaaactcactgtattagctttaaagctgactatgcttgtattcattcgttcaagtgaactgcgcttcgctcgttggtctgaaatagattttgaaaatcaactttggatcattccccccaatcgtgaagaaatcaaagatgtaaaattttctgagcgtggttctaaaatgcgtataccgcattatgtgccgttaagtcatcaggccattgatgttttaaaagaactgaaagaaatcagttatgatatgtctgatggacaaggattaatttttattggttgccatgattaccgtaaaccaatgagtgaaaatacggttaataaagccttacgactcatgggttatgatacccaaaaggatatatgtggccacggtttccgcactatggcttgtagtagtttagtcgaatcaggtatctggacagaagacgcaatagaaagacaaatgagtcataaagagcaaaataacgttcgtgctgcttatactcataaagctaagcatattacgcagcgtcgtttaatgatccaatggtgggctgattatttagacgcaaacaaagagaggcatattatgccatttgattttgccagatcagtgctatga

SEQ ID NO: 387708 - DNA, 1419 bp, Salmonella enterica
atgaaacaagacgtcatcctggttctcgactgcggcgcgactaacgttcgggcgatcgccgttgatcgccagggaaaaattgtcgcccgcgcttcaaccgctaacgccagcgatattgccgcagaaaatagcgcctggcatcagtggtcgctggacgccatcctgcaacgtttcgccgactgctgcaggtcactctccggcgccctgtcggagtgtgttgttcgcggtattacggtgactactttcggcgtcgatggcgcgctggtcgatgcgcagggcaagctgctctatccggtcatcagttggaaatgcccgcgaaccgctgccgtgatggaaacgattgagcgctctatctcgccccggcaattgcagacgctctccggcgtcggcgcgttcagctttaacacgctgtataagctggtctggcttaaagagaatcatccgcgcctgctggaaaacgctcactgctggctgtttatctcgtcgctgattaaccaccgtctgaccggcgagtttacgaccgatatcactatggcaggcaccagccaactactggatatccatcagcgcgactttagtccggaaatcttgcaggcgacgggcctggcgcgccgcctgttcccgcgtatcgtggaggcgggcgccccgataggcacgctacagaacgatgcggccaggttactcggactaccgccgggagtgccagtgatctctgccggacacgatacgcagttcgcgttattcggcgctggcgcgcagcaaggtgaaccggtgctctcctccggaacatgggagattctgatggtgcgcagcggtcaggtggatacctcgctgctcagccagtatccgggctcgacctgtgaactggacagtcagccggggctttatgaccccggaatgcagtggctggcctccggagtactcgaatgggtacgaaaactgctgtggacgccacaaacgccatggcaaacgctgatcgacgaagcgcgcgctattcccgctggcgcggaaggcgtgcggatgcagtgcgatctgctcgcctgccaaaatgcaggttggcagggcgtgacgctcaataccacccgcggccatttctatcgcgccgcgctggaaggcctgacagcgcaacttcagcgaaatctgcgcacgctggagaaaatcggccattttaacgccacagaactgttattggttggcggcggcagtcgcaacgctttgtggaatcaaattaaagcgaatcagcttgatatccctatcaaggtgctggacgacgcggaaaccaccgttgccggcgctgccatgttcggctggtacggcgtgggagaatttagtagcccggagcaggcgcgcgcgcaggtcaattatcagtatcgctatttctggccgcaaaccgaacccgatattattgagggagtatga

SEQ ID NO: 387709 - DNA, 261 bp, Salmonella enterica
atgaaaatcatcacgcatgtagtacccggttcagatatggctggaacatatgatgatatcgctgacagttcacaacttgttattaaaggcaagctacgtcatgttgaaaacgatccgaaagagttgctgatatgtgtcccgacacgtagtgagtggctattctactggattaaagaagataaacattgcgcccggcgacgggcgcgaaaaagtatcaaatattatgtaaacagagtaaatttgaaaaaacaatcttattaa

SEQ ID NO: 387710 - DNA, 408 bp, Salmonella enterica
atggcggtagtgcgcctggtaatggtggtattgcgcctggtaatggcggtagtgcgcctggtaatggtggtagtgcgcctggtaatggtggtattgcgcctggtaatggcggtagtgcgcctggtaatggtggtagtgcgcctggtaatggtggtattgcgcctggtaatggcggtagtgcgcctggtaatggtggtagtgcgcctggtaatggtggtattgcgcctggtaatggcggtagtgcgcctggtaatggtggtagtgcgcctggtaatggtggtattgcgcctggtaatggcggtagtgcgcctggtaatggtggtcgcgcacctggtaatggcggaggaggagggggtaatggcggaggtggcggtggtggaggcagaggtagctctggttcaggcgtag

SEQ ID NO: 387711 - DNA, 384 bp, Salmonella enterica
atgacttccacatcgatgacaacggctaatatcgcgcaggataaagccgggcagacattatccgtacgcgaaaaaataggctatggtcttggcgatgcaggcggcaccgtcatcacctgcctaataatgaactttctcacctttttttataccgatgtcttcggcctgacgcctgcattggtcggcacattattcatcgccctacgcgtattcgacgcaatttccgaccctgtgatgggcatcattgccgaccgtacgcaaagccgctggggacgttttcgcccgtggcagctatggatggcgattcccatcggcattatcggcatactgacctttaccgttccggacgccggtatgggcgtaaaaatcacttgggcattctga

SEQ ID NO: 387712 - DNA, 1956 bp, Salmonella enterica
atgaacgtaccggaagtcgacctgcataaacttacggtcagcgatccgtttctcggacaatatcagcgattagtccgcgacgttgttattccttatcaatgggatgcactcaatgaccgtattcccgaagcagatcccagccacgcgatagagaatttccgcatcgccgcaaaacgccagtccggggagttttacggcatggtttttcaggacagcgacgtcgccaaatggttggaagcggtagcctggtcgctgtgtcagaagcccgaccctgaactggaaaaaacggcagacgacgttattgcgctggttgccgccgcccagtgcgccgacgggtatcttaatacatattttacggtcaaagcgccgcaggagcgttggaacaacctggcggaatgccatgaactctattgcgccggacatatgattgaagcgggcgtcgccttctttcaggctacgggtaaacgccgcctgttagaggttgtgtgccgtctggcggatcatatcgatagcgtttttggccccggggaaaatcagcttcacggctatcccggccatccggaaattgaactggcgctgatgcgcctctatgaaatcactcaacagccacgctatatggcgctggcggactattttgttgagcagcgcggcacgcagccgcactactatgatgaagagtacgcaaagcgaggaaaaaccgcttactggcacacctacggcccggcctggatggtgaaagacaaagcttacagtcaggcgcatctgccgttatccgcccagcaaacggccacgggacacgccgtccgttttgtctatctcatggctggcgtagcacacctggcgcggctaagtcaggacgaagacaaacgccagacctgcctgcgcctgtggaataatatggcgcaacgtcagctctatatcactggcgggatcggctcgcaaagtagcggcgaagcgtttagcagtgattatgacctgcccaacgacaccgtatatgccgagagttgcgcgtctatcggtctgatgatgtttgcccgccgaatgctggaaatggaagtcgatagccgctatgccgacgtgatggaacgcgcgctgtataacacagtactcggcggtatggcgcttgacggcaagcatttcttctacgtcaacccgctggaagtgcatccgaaaacgttaacgttcaatcacatctacgaccacgtgaagcctgttcgccagcgctggtttggctgtgcctgctgtccgccgaatatcgcccgcgtcttgacctctcttggccattatctctatacgccgcgtaacgaggccctctacatcaatatgtatgtgggcaatagtgtggaaataccgctggaaaatggcgcgttgaaactgcgcatcagcggaaattatccctggcatgagcaaattacgattaccgttgaatcatcgcagccgctacgccatacccttgcgctgcgactgccggagtggtgcccacaaccgcagatagaggtcaatggtcagccagtggagcaggatattcgcaaaggctatctacatatccaccgtgactggcaagagggcgatactatcgcgctaaccttgccaatgccggttcgtcgagtgtatggcaacccgctggtacgccacactgccggcaaggtcgcagttcaacgtgggccgctaatctattgtcttgagcaggccgataatggcgaagcattgcataatctctggctaccgaaagagagtaaattcaacgcatttgaaggcaaagggctgttcgctaatcagatgttgattcaggcggaaggcgtaaggcggggtacgacagaaacgccgccgcaagcgttgtggcatttcgatgccgcgccaggcacagcgcagccgcatacgctgacatttattccctggtttagctgggcgaaccgcggcgaaggcgaaatgcgcatctgggttaacgaacgataa

SEQ ID NO: 387713 - DNA, 537 bp, Salmonella enterica
atggcgcagctacaggtgttggaacattcgcccgcgatcatgcccattattcgtaccaatgcgatcaccccggaagtgtgggaagacgatttcgcccccgttgatcgttacagccagccgcagaaacgtgcctttgccgccctgacgctgcgccatcgtatcgtcagtttcggctggtcaaaggtggcgctacgggtaatggtcgatgcggcgacagaagcaggtgcggtgtttatgaatgtggaaaaaatatttaaataccagctacctgatgagcttaaaccgttttgtgaacacgcccgactgatgggcaaagccgctcgtcaacatgtcgccgccaccggttttgcgcctgaagacgtagatatcattgccaggaaatatattcattgctcagctcactggaacgcggtggaacttaagcaaagcggggagttacagggcggcgcttcagcgtcgaaaaccgtcagctttgtgaacaggccggacaaaaactggatacgaacaatttataacatggacggaaagaaacgatga

SEQ ID NO: 387714 - DNA, 417 bp, Salmonella enterica
atgaaaaaatcctcccgaatgtctattgtccatcctcatgcagcgggcgttgatattggcgctgagttccacgttgtcgccgtaccgcctgatgccgacaccgagccagccaggacttttcaaaattttactggcgctcttcagcggatgtctgactggctcaaaacctgtcacattacgaccattgccatggagtccaccggcatttactggttgcctgcttttgaaattcctgaagctgctggtttcaaagcgatcctcgttaatgcaagagacgcaaaaaatgttcccggtcgcaagaccgatgtcaacgatgcccagtggttgcagaagctgcattcatttggtcttctccgtgccagtttcagacctgaacacgacatttctgtatctgaggcagcgggaacgactgactga

SEQ ID NO: 387715 - DNA, 594 bp, Salmonella enterica
atgtcttcaggaaacatcttttggggaaatcaatcccatattacagttagaaataatttcggcattagcaattttgatacaggggggcaggatgacttatcccaaaaaaatccttttgccgaagggtacgatgttttgacctttctccttatggttatccaggctatcgcaaacgataaatttatggagattcagaagaactctgagcgcgccagagattcacaggaaaaatcaaatgaaatggatgaagttattgctaaagcggcccaagaaaaagaccctaaaaccaaagagcaggtgcctgaggacgtaattgaatacatgcgcaagtatggtattaccgtcgatggtaagaccattgatgattatatggctgaatttggcgatcgtgggaaactggataaaggtggtctacaggcgttaaaagcgtctctggataatgacgccaaccggaataccgatcttatgagtcaggaacagttaataattcaaaaaatgtcgcagcagctgaacgctgtcattacccaactgacgagtctgatcagtaagtggggggagatttccagtatgattgcgcagaaaacatattcatga

SEQ ID NO: 387716 - DNA, 591 bp, Salmonella enterica
atggaagcgagtaacgcagtatcgatattatcgccatcttccttgtcagcttcatctactacatctcaaacccagtccggggagaaagtaaattctgattcattactgctgttatttgatgagatctggatgaagctactagagcttgccaaaaagctgcgcgatatcatgcgatcatataatgaagtaagacagacgttgagttgggaactacagaaaaatgccttacaaacgcaaatggaggcgattaataaaacatgtgaagcagcaatatttactggggttggctcatgtctttcgggtgtgctgacaatggggttcgggtttgcaggcggagaatccggcgttatattcggtcaaggcgtaggacacaccgctatgggagggtttggccttgccgctggtattgtgcaacgtcaaggcgatcaagatagtgcgattgctggactgcaacaaactggggctcaatcttatagcaaaaacatgatggatattatggataaagcgcttgaaatcatgcagcaaattctgggcatggggacgtcattggtcgaggttcttgctcaaatgctccggtcattagcgaggtaa

SEQ ID NO: 387717 - DNA, 483 bp, Salmonella enterica
atgatcttggcattcgtcaaaacatactggaaacagttgcttatcttggtaatacttgctgcgctggtgatgggggtccgcgtcgcatgggaacaccatggcgattctcggtacgatgcagggtacgcgcaggcaaaggcagaccgtaaggccgaagatgataaagctcgtcagcacgacgaacaggagaaagcgaacaatgaacgtgaagcacagcgtgctctcgataaggcacgcaatgatgctcttgatgctgccgctcgcgctggcaggttgcagcaacagctcgttgccatccgtgagcagctcaggcagtataacgccactgtcggcgctgggacgtcagccgcagacaccggagttttgcttgccgacgtgctcagcaaatctctcgagcgaaacagacaactggcagagtacgctgatcgggccgccgaagccggaagagtctgtgaaaagcagtacgattcgctgaccaggtga

SEQ ID NO: 387718 - DNA, 192 bp, Salmonella enterica
atgggaatattaacaaatattgggttgataatgttctggtttgccgtagtcgtggtggcgggtacttcgtatgtatgtgcgatcatcttcgccataaagaaaggatggctaggagaaacttcttcgaaggtcgtttactgtgcgacattcgtcatacttgctgcgatagtgtttaaattgccactgttgtga

SEQ ID NO: 387719 - DNA, 2757 bp, Salmonella enterica
atgaaacaggcatgtgttgaagccattgcgcagactcttggtcgccagccaaaggctgatgagctaaaaggtattgaggatcgcatcaaagaagccgtgcgtcaggtgcataaaaagaatgccagggaaggtaaaactggcattccggatgcgcaaacatacatggaggcagctgatcttgtgcgtcagcgcgttgtgcatgatgtctataagaagtgccagcgcgtagctcagaacgcgatcgccataagcagggttacagatacccttgacgccaatatcccgccagagcagcaaactccagccaatttgcagcagtttatcttttccgggaggcgcacaactgacggtaaagatattgctgttacatctgctgaggaactggctaccggagcctatcaagactggtctcgccagctcagtgctgaactgctcaaggctggtgatgatgtacgcaaattcttcgagcagagcaaagcgcttagcgagcagcggttccgcagcctgttcgaccagcaggcggcaaagtctgcacagttccagatcctgaaagagctttacggagaagatactggtaacccgcaagcgaagaaaattgcacaggtatggaatgacgtaaccagccgtgcccgccaggagatgaacgacaacggttttgatatcggtctgcgcgacgactggcatcttccgtatgtggacgacgctgattttattcgcaactctggtcgagatgaatggctggcttcactccctgccgctgagcgtgtgaaggctcagttatcaggccgtcagccgccgattgagtttgcccgccaggcatgggtagatgatgtctacaacacgcaggatcgtagcaattacgtcaatcctgacggcagcccgatgaatgacatcgagtaccgccaggcactggaggcaatctttgaaacaaaggctactgacggggcaaacaaaatcggcccgggcgcattcatgggaacaggcgggataaaaaatcgtggttctcagagtagggttatggcattcaaggatgcgcaatcccacttcgcgtatatggagcgctatacgcagcagccggtggctggagtgatgatgtcacacctgcaatcatcttctcgtgaccttggggtcgttaaagctttcggccctgacgctgcgcgaaacttttcccttgtgctggaccgtgtgtaccagcgagcagtcacaggaggaaaggcggtagggcatatgaacgaagagcgcaagatggttgagcgcatgtttaactcgatggctgggcttaacggtgcggctacttctagcgtattcacgtcggcagtcggtgggctgcgtaacctgatgaccagtgccatgctaggtacaagtgtgctgacagctaccagcgatcaggccattatgcgcgcgaacgcccaagcccttggttttacgcgcaacggcatgcgcctttctgcaaacaccattaaaaacctgttcagcggtgatgcaaaacgtgctaatgctgagcttggtttgctggtggattcgcatgctgctgtcgtctcgaagatgggaggcttcgacctgtcacgcggcatcaccggttggtttgccgagaaaacactgaagtggtcagggctaatcgcaatggaccgtgcaaacaaagcggcgttcgggctgttgatgtacaaaaatatcggcgagctgacccgcaaatttaagacgctggacgatgtgaaaggatccgataaaaccatcctggctaataagggatggagcaatgaggactgggctatcatggctgcagcagacctacagccaatgactacctccggtcatatgggtatgactcctgacgctatatatgctgttcctgatgacgtaatcactggcatcatggctgaccgcattgcacaggtgcgcgcaggtagcgaagaagcactggcagcgcttggagatctaccgcctgagcgccttaagcgaatgaaggaagcatttgacgctgaagcagagcagaccatcacacggatggtgcgcaatgcccgcgccgaggccgcgcagaaattgctggggattacgcacggtgagatgaccagcgccgtgacaacagccaccggactggacacttacgcccgcgatgatgcaggccagttaattaagagctttatgctcttcaaaacaacgccgttcgccggcttccgtcagttggttaaccgtgctaatgatctggacacagttcctgctattaaatttcttgcttcctatattgctggaacgacactggctgggatgttcgccaaccagatgaatagtctgttgaccggaaatgacccaatggacatgacgaaaccaacgacatgggtgcaggctttgctgaaaggtggctcattcggaatatatggtgatttcctgtttcaggaccatacgcaatatggatccagtatcgcggcaacaattggcggaccagtgctgagctttgcagaacagttaaccaagctactgataactaacccgcagaaagctttacagggagaagaaacatcattcggtgccgacgcgctaaagacggcccgcatgatcaccccgtttgccaacctctggtatgctaaagcaatcaccaaccaccttattctgcaacaacttcaagagatggcaaacccaggctacaacgacagagtaagggatcgtgctcagcgtgaattcaacacaactagttggtgggagcctggcgcaacaactccgcgtcgcgcaccagatttaggaaaggcggtaggacaatga

SEQ ID NO: 387720 - DNA, 1569 bp, Salmonella enterica
atggctgatgtattttctctggctccggaaggccaggtgtggaccgacgataaaacagcatccaacccggcgcgtccagaagactatgagccgactttcttccagggttcaatcgctgcaccagtgcgcggcgtggcggaaggtacgctcggtctcgcgcagtctgctgtcggattcagtaagcgcctgataagcgatccggcattcaccgcagacgttgcgcctaccgtcaatatcttccgagtgatgtttccagatgccgacaaggcgctgaatgatacctacgacacgatcggcaaacagttaaaggatgccagaggatatgtgaaacctgatgccggtagccagggcactgctgctgaggtgctttacggtctcggtcagttcgttccggccatcggtgcaaccattgtcggcggcccaaccgtcggcgctgctacagcattcagctcgacgtatgagcagtcatatcaggatttcaaagggaagggagtagacgagtctacggcgcgaaatcttgcaacacagcagagtcttttcaacgcggctggaatggctttacctgctgcagttggtaccacgctgacaacacgtatagcttcaggtgtggcaatcaatactggtttcggcggactgaaccgttattcagtaggtgaaacgctggaggaaaaaggctacacagagatggcgaagcagtaccgtgtgttcgatgggcaggctattctggttgacgcagtgctgggcggtgcttttggtggtgcccaccatcttgccgcgcgtaatgctgatttcccacctccagcagatactgaagcaccgatcccggcagcagaggtgcagagcactcctgattccaccttagatacttccccttcgacgactgaagtagcgccagtaactgatgctcctggtgcgccagatagagcagatgctcaggctccagtagcagaaactgcttcatcgccagatatcaccggcatcaaaccgagcgacattgatgcagcccacacgttgaatgaggggctgtattacgatctggaatcttcaccagtgctgcacgccagcaacgagagcatcaacagtcatgtggcagccatggatgaagcgtatcggcaactgaatgacggtcaaccagttaacgtaggaatgatggcgcgcgggctggatggaccggcccggcccggcatgctggaatctgcaaacgaacagtaccatgcaatgcagcaagttttcgaagagaatggtgtcaggtatgaaacgccgtcagaacttgctggagaagctccagcgccgcgcgcagaaagtgcattcacagcagcagacgaaacaggcggtcaggtcagtgtggatccagacaccggccaggcgatttcatccaacagttatgacttgatggcggcgcgcgatatggctgccacaaatccggatttaactatttcgcacccagacaccggacaaccgacaaaactctccgatgtactggctgagtttgatgagaaaatccagaccgtgcagaaagaatcgaaagtatattccgttgccgccgcgtgcttcctgaggaacccataa

SEQ ID NO: 387721 - DNA, 2529 bp, Salmonella enterica
atgccaacagtaccaacagtcactggtcgtcaggttgaaagtcgcgggtttcagtctccggggttacaaacatttaatactccacagatgggcgatgttttaagtggagttgctgataaatatgtcgacgtttttgcacaggcaaagcaacgtgctgatgttgctcaggctcaggatgcctcattacaactcagccagatttccagtgatctgctgactaacccggatactgggctgctcaacatgcagggtaagaacgcccttggtaaggggcaggcttacactcagcagttcgatgctcaggcagagcagatcgcgatgacactgccggatggtgctcgtgctgggtttatgcagcaggcgcagcagcaacgcattcagttcaccacccaggctggcagacatgagataagtcaacttaatgcctatgaagaagggcagttccaggcgactctggcgaataacgggaaactggcttccgccgcctatggagacaatgccaactatgtgctctacaaccagcagacatttcagcagatcgaggattacggtgctgcacatggctggagttctgaacagattcaggccaagaagatcgagtttaaggagaaggttgcagacgcatcactatcgcagtggtcagcaaataattcgatcgagttcattcagagtaatggtgagttaagcgatactgttaccggttcccgccgtgctgtatcagaaggtgtttctggtgatagcgcccgtggaattcgcaacaataaccccggaaaccttgagtacagcaaaaccaatccgtgggtaggccagaccggtgatgatggtcgctttgccaagttcgaaacgccagagcacggcattcgtgcgcttggtcgcaacctgctgtcgtaccaacgtcagggtattgatactgtcaacgacatcattaaccgctgggcgccgccgtctgacaataacaacaccgacgcctatattcaggcggtatgcgcgcaactcggtgtgactcctgaccagccgcttgatgcctcaaaccctgatacgctaaaggctttgtgtgcctcaattatccaacatgagaatggcagccagccgtacagcgatcagcaacttgctaccggtgttagcgcggccatcggcctgtcgcaactgcctaccagcaccaaacgctacacaggcaacgcggcatttgacgctgcatctccggaggcgcaggcgacattccttcgccaggctgaccagatacgcaaacagcagcaggcggagtatcgtaccaatatcgacagccgtgtgcgtgatgccagcgcggcatacatgcgcggcgtggatttccctgatgcgcctacgcagaacgacttcctcgctgcctacggcgtacgtgaaggtaatctccgctataccgagtttcgcaatacgcagatcgccgggcagtacatcggatcgtttcgcaacatgccgaccagcagcattactgcatatgtagagcaattgcgtcttggtactgaagaaacaggggaaggttatgcttcacgtgctcagctatttgatcaggtaacagctgctgccacaaaggttatcagccagcgccagaataacccgtttaatgccgcggtagatattggggcatataagcccattgctagcaataacccaaatgacatcacctctgaggtttctaaccggttctcgtcacaagaaagcctccgcgcgctgggaatcaatgctcctatcctgtccagtgaggaagcggcttcgttgtctgaacaggtgcgaggcaccaaagacgtaaatcagactatcagtctgttgcagagtatgggtgaaactcttcctgctccggctatgcggcaggttgcatctgctatcgcgccgaacaatgcggcaacggcatattctgcgctgctgcttggcacgccggataaccagtacgacaacactaagccttctatcgcctacagccagttcatcggctacaagccgaccgtgaataaatacgacgtatcgaaggtaatcctagccggtgaccagttactcaacccaaccaaagcgatgaaagacgctgggataactccggtacagttgcctagcgaggataagctcaagcgtgcatttgacgatcaggttggcaactcattcgccaataatccgcaggctcgccaactcagttacaatctattcaaagccgcgtacgccgggatcgcttatcaatctggtgatgcctccatgacccgcactgatgcagccaactccgatgtagtggagaaggcagcacagtacgccactggtggtgtttacaagggatttaatggcggtgacgtggtaatgccgtttggcatggataaatccactttcaaggaccgctacaccgcatctgcacagcaggcgcttaaagatgctggccttaacgtcaatgctgcatcaaatttcactccggtcaatatcggcaataaccagtatcggctggtaagtggtagcggtcgctgggctacggatccgaaaaccaatgaagctatcgtcgtgagggttgaataa

SEQ ID NO: 387722 - DNA, 543 bp, Salmonella enterica
atgtgtagcccagctatagcaatggttgcagtcacagtggcatcaactgctgcgtcaatgtacagccaaaaccagcaggcaaaatacacttctgcggtagcagagaaaaatgccgatgtggctgaggctcaggctcaggattccataaacagaggtaacgcagaagcagatcagcgtcgtagagaaatgcgccaacgacagggaacgcaggcggcaaccatggcagcaaccggagcagaattggggagcggttcatcactggatattttcggtgatactgcgcagttcggtgcgcttgatgctttgactacggtgaataatgcacagagagaagcgtatggtttccgtgtgcaaggtgcaaattatcagtctcaggcagattcagcgcgcagtacaggaagtgcaggcctgactcagacattactaaccgcgccactgaaggcatatggggcttatcagatggggggaggtacttggaatccttttacgcaaagtaaagctgcccctatatctgccgcaataggcacaccaaccggtcgataa

SEQ ID NO: 387723 - DNA, 171 bp, Salmonella enterica
atgagcgacaaagatattgaatctgaaattcaagctaaaggcttaaccgcaccgcgcgttactccgcaacgcattgaaagcattattgccagtgagcattatttcacggctcaagatggcgtaattgggtcgcaatattgccatattcctaatggagaaatttccgtctga

SEQ ID NO: 387724 - DNA, 870 bp, Salmonella enterica
atgactattaccaaagaacgcctgctcaaaattcagcattggcgcgaaacatatggagctgatagcaacgttatgctgccggcagaagaggcggaagagctggcgcgtatcgcactggcatcgctggacgcggagccagttggtgaggtttcagagaagcggcacggtcttgttatggatggaactgtagatcttggtggaaaatcaacttaccgcatcattaagggagaaaaggcgatgaagcggttgccgctgggaacaaagttttacatcgtaccgccagtaccggtagacaacgaatttatccccaaaaatctggacagagcgctcggcgttgttggcgtggcgttacctgaatcaaaggaagagtttaatttccagatagagcgctggatacagcgtctcattgaccgggttattcgttatgctgacgaattcaaagagcagcccgcaccggtagtgccggaggaatgccctgccgagttgccatacgcgcaggttaaggcagccgctgacctgtacgccctgtgctggcaatcgggagaagtggttacttatacgcctgacccagaaaaggcgaccatttggcttaataattactcaggcacctgcgtacaggagtacgtgaagctggaacgatttcagggagtagcatcggacaactctccggtaattccggatgactggataagctgtagtgagcgaatgcccgctcaagatgattgggttttaatttattcaaagcacggcgagtatttggcaggtcaggtgcaaggggaatacgtggagttgaacgacggcacgctatcgtggctaggaagtgccttgcattggatgctgctaccagaaccgccgcaggaggtgaagtga

SEQ ID NO: 387725 - DNA, 162 bp, Salmonella enterica
atgaaaccatttggcgagtatttctctcgtgagggctgcacgtgcgcgttatgccgctctcgcggatatagaaaaaataatgcgtatgacgcctcaaatagagtttgtaaaaaaagagcgcgtcaggctgctaaaaaagaaattcaaaaagaaattaattag

SEQ ID NO: 387726 - DNA, 567 bp, Salmonella enterica
atgagcaaatcaatcgcagatggagcaaaacttacgcctgaaacattcgctgattttgttgaacgactgaaatatcaccatcgaggagaaggtgttagccgccatatcaccgcagacccaattttcatggttcagaaacaggcgacaatttacggtattgacaccgattattgcgatggccgtttcgtagcgttcgaagatagcgtctggttttccccgcaagaatactgggatgacctagacgatgatgaacaggatgatctcaatgctgaatgtgaggaaacatacgacacgccattcacagatcttagtgaagatactcagtggtctgttctcgaagatctagaaaatcatactgtaagcgggttcaaaaaagaatggcagcacgtaaacgcccaccttaccagagaggccgcagaggcgttcattcgaagaaaacagcacgactatccaccgcttcgagtttacgtcgagagcatgtatttcgggtgggaatatcaggaaatcatcaaggccctgtgtgatggccgcttagtgctcgcagaaagtcaggaggaagcacaatga

SEQ ID NO: 387727 - DNA, 495 bp, Salmonella enterica
atggaaagtatggctgaaggtatgatcaaagatttagtggcatcaggacatgcgttagctgacgacatgacaggcgcaccatccgtgcttgttcgctgtttggcagcgcaactggaagtgcaactggtgcgtgctaatgcgctggctgcggagaatgcggggctgaaggccgcacaccctcaaccattcggacttgagatgatgaaggctctggatgcgtatgataagtgtcaagatgaagtgccggagaatgggatgctcgatgcatttttcatcctgcgcgacagcatccgtgttgaaaccccagccaccgacgctttactggctgaagtgcgggcaagcgagcttgatagcctggctggcgtggctgaaacaatgttggtcaagtttgcaaaccagggcgcatctgaaatcctagaagctaaaggttgggaagccgttcgcagtcaagccagccatcgcgccgcccaacttcgcaaaggagccgtgctatga

SEQ ID NO: 387728 - DNA, 1062 bp, Salmonella enterica
atgatccaagcagcctactacaacgaaatcgacccatttgcagctcaatggctgcgtaacctgatcgccggcggtcatatcgccccgggcgaagttgatgaaaggagtattgaagatgtcacacctgacgacctgcgaggattcacgcagtgccacttcttcgccgggatcggcgtctggtcgcattccctgcgtctcgccggatggcctgacgataaaccagtctggaccggttcatgcccgtgccagcctttcagcgcggcaggcaaaggagatgggtttgctgacgagcggcacctatggccccacttcttccacctcatcagcgagcgcaggcctaagcatgtctttggcgaacaggttgcaagcggtaacgcaaacacatggttcgaccttgtacaagctgacctggaaggaatggaatacgccttcgggcttgtgccgtttgcggcagcgggcgtcggtgcgccgcacatcagagagcgggcttattgggtggcccacgcctgtagcgaatacgaatccgcagccggaaacgaaacggggattacagcacgtctccggagcagctcgactgacaggctggcaaacaccggtggcgaacgactcaaccgggtcgactcattgctacagcgggaagaatcaggacgggtcaccaaaagtgtgcttgaagttgccgggcacagcgttactggcgggatgggttacgccgaccactcgcgactggaaagacacgtcagggatgacagcgcagcgggaagggaaggacaggctggaccaactgccgcgacaggcttacatctgtggccccttgagattaacggtttttggcgagatgcggactgggtgttttgtcgagatgggcaatggcgtccagttgaacccggcacattcccgctggttgcaaggtttgccaaaagcctgggacacggcaagtcctcattacgagcaatggctggacgcaaccgcacaggccgacttaagggctacgggaacgctataaacgcacaggctgcggctgaattcattcgtgcttacatgggggttagctatggccggtga

SEQ ID NO: 387729 - DNA, 882 bp, Salmonella enterica
atgagcaacgatatcgcaatcacatcacagccaggcgctaccgtagggaccgctgcagcaatattcagccctgaaggcatgaatcaacttgtgcgcttcgctgaattgatggcaggcagtaaagctaccgttcctgctcatcttgcaggtaagccgtcagactgtctggcagtaaccatgcaggcggcgcaatggggcatgaacccgttcgctgttgcgcagaagacgcacgttgtaaacggaactcttggctatgaagcacaactggttaacgccgtcgtgtcgtcttcaaacctgctttcaactcgcctgaattaccgctgggatggtgactggtcaaaggtgaatggcaagagcgacaaatcaccatcactgaccgtaacagtatcggcagtgctgaaaggcgaagcagagccacgtgagcttaccatcagcatggctcaggcaggtgtccgtaactctccgctgtgggaacaggatccacgccagcagcttgcttacctgtgcgttaagcgttgggcgcgtctgcatgcacctgatgttctgctcggagtatacacccctgacgaattgcaggaggcaacacctcgcgttgagcgcgatatcacgccaccggcggcaacggctcagggaatgaacagcctgatcaactcaaagccagaacagaagcaggaagagcgtcagcagcataaagacgatcgcgggcctgaagaaattctgcacgcattttccggcgcggcgatgaactacaacacccaggctgatctggacaaagcatataaatacgttgcccagaaactggctggtgatgatgacctgctggcaaaagcaactgacgtttacaccatacgctgcgacgaactgaacgaagtaccgatgtaa

SEQ ID NO: 387730 - DNA, 141 bp, Salmonella enterica
atgctcgcctcctccggcatccgatttgttcctatgccagcggctacagacgctgagtacgcaatgctgtctgcaatgtttatggataagctggaatctattgctgtcgaagctgagaagtctgaaggcggtgctgcatga

SEQ ID NO: 387731 - DNA, 987 bp, Salmonella enterica
atgaccgatacactaaaaatcctgaaagctgaagctgaccaaaagaagctggaagctgaaaaccttcgagcgcaaacgaaagcagcatatgccgcagcagcacgcgcacaagttgcctacatcactgaagaaagacacctgaaggcgatgggtacagataagccagttgattcagctcaggaagccactacagaggtgattacgcattcacacagcaatcctgcatccagccccgaagactaccatagagacaaaatagcccaatcagaggcgataataaccaaccttgagtatgaaatttcgaaggaaaaagacaggctcgacatttataaacaaaatctgcgggaatcacaaagcggtgagagcttaacggctccctcatctgaaagagatgaacgtgctgaattctggcttgaacaaatccagaccaaatatcgtaactattccgactcagaaatcgccataaatctgaataaggccggactctcgtccatcgatttatgtcatctagtcgtcgatatggcgaggattatcaagtctgagacggcggaaaaccttaaagtgattgatatcatgaaaaaccgggacggcttgctcactacccccggaaatgtgaaagattcaatctattaccacatctgcaaaagtcagggtattgacctgagcactaagagcgtgaaggcacgcccctcagtcatacgagaagcgctaaaccgatgggcttccgataacgcttttcaggaaagcaatcgcatcatgcggcattgggcttcgctgacgcatacccagcgcagcgcaggaggcagcaagagtcaatcaccaagaggtaacagcaataaagcagaggcgttaaaacattatgctccagggatgaccgcgaaaaaatttcgaaaaaagcttgaaattaaaggatttacactcacagaaacagataggacgctacagaactggatgaaagaagcgaaagctaaaaacgaaaacagctag

SEQ ID NO: 387732 - DNA, 477 bp, Salmonella enterica
atgttgacacatcacccgcgcttagcgcatcatgcaaccgcacctgcaaaatcaagtgcaccagattggcgtctggtaacagtcaaaggcgataatgcacgcgccaaagcgtgttttttattgtctaaatatcagcacacactatctatggtggggctggttgtggagcttctcacgaagcgccgggatcctttgacgccggtacgccaatctgcaatcagtctcaccacccaacgattggcgtcgtttggtggtgatttaaaatcactgtcaaaggagattgcctctatggctatcaacacccgcgcacgcctcaaaaccttcatctttgccgccgttgagcgtgcaaacctcaaatcaagccgcccggtaatgctgcatatcaccgccgcaactgaacgccttgctcgccaatcagcaagccgtcaatacgtactctctttcgctggcgttatccagaaagggggagctctgtaa

SEQ ID NO: 387733 - DNA, 255 bp, Salmonella enterica
atggctgctaccgctatcaacttcaaacacaaaccttttgacccgaccaaaaaacatatccgcattaacgaagtccgtgaaatggtctggcgctctacgtcatggatctatgccgaaatgaaaaagggtaactttccggcgtctgtaaaaatctccccttgcctgtgcgtatggcgcgtcgaggacgtagaaaactacctgattgaaaccgcaaagcgtatcggttctggcgtagtagaaggtgcatccaaatga

SEQ ID NO: 387734 - DNA, 447 bp, Salmonella enterica
atgaataaccgcccttcttccgtatcagcaagcccaaagaaacatgctccaaacggtaaaacgccgggggtggttgtgtcgcttgttggtgagttcgtaggtaaaacctcccaggcctctgatggtgtgacccgccgctttcgtgttgattcgcactgtatcgctggtggttgtgcgggcgagaccattactctgtgcgccaaaaatctccatgttgcggcgatttatgcagtccccgacagagtaaccgttgaactgcgtgaggtgtatgttgtgaacaaggggacgcactcctacgcatcagcaaattataatttcactaccgattacgagccaaaaaagtcagagaagcggagtcagaaaaagagtcgtcgcaaccagcaaaaaagagctagcgttaccgtaaaaactccgaaagtcaaacccgttcgggggaaatgcaaatga

SEQ ID NO: 387735 - DNA, 3123 bp, Salmonella enterica
atgagcgccctcgataacgttaagcactggatgaaaaccaactactccgccgcttgtgcggcgttttcaatcccctgcgagcaatccaataaagaacatgagtgcccattgtgcggcaaagctaagttccggattcgtatgaccggcgcgacggcaggcacttacatttgtacgtgcggcgtgaagggttgcggcttcggcattctcgatcttattgcccgtaaagagctgggcgcatcatctaatgagcgcgtatccggctcgctaatacgtcaggccgctaagctggtggatgagcgcatgggattaggcttcttctctgccgatgatagttatacgcccccaacttccgaggaacgaaccaaaagagagcgggaacagaaagaagctcttgaacagcgccagcgcgaatccgcagagctggaggtgcagcagattgcagcagccgcgccgcgagttcgtgccgttatggacaaagcaaaaccatcagaatgcgcatacttaaaggccaagggctttgaaaactgcgttcttcccgtcaccgctcggggtgatggtgtaatacgtctgacggacattgataatcgtgaccgttcagtgcaatacctgcccgcgccaaacgctgtagacaatgaaggtcagccccgacacaaaagcttaatgaaggatgcgccaatttcctgcgcgtttatcgacgtacagccaaatgacaaagcaaataccctcatcattaccgagggatatgccacagcgcgaagcgtatcgatctgtgcgccgctttcacgcgtagtcgctgccatatctgcttcaaaccttaaaaacgtcgccacggcctttagagatcgtttcccagcgcttgagattgttatagccgcagataacgactaccacgcacccagcgatgtagacgcgaacggcaagccaaaacctaacacgggactggtaaaagctaacgaagctgctaaagccgttggtgggctggtggtcgccccgctatgccttggcagaaagaaacatgactgggacgatgtacgcatggagctgggagcagaacggatgacagaagaatttaaccgcgaaatggagaaggccagaaaagaaaaagcctccggtcaagaggctttatcagatactacgcaaaataaccgcgtagataataaccctatgccgtgggatagcaatactgcaaatgtaacagcaggaaaatcacctgcaaatcttcccgtagcaagcgttctacgcatccctgctacggtaaacattgcaaaattccgtatccccgatcacttcaaaaaatactattccgacaaagttacaccacaagaccaacagcccgacggcacagatttaattgtcgagcgcgcagatgaatcaatcgccctggtagatccaacaaccgggcgtggtgaagatggacaatcaggggtatttaaacatgccagaacctctgagattctgcgcggggttcgcccagccctgcgaggatacaaagaacatgaggcatatatcacctttgaaaacatcggcaattcttcgcgccgcgtttctttgccatggtcaagcgatgctaagcgcctcgccgccgctttaaggtcgctcggctcagaagtcgttgtagatggggcgtacattgatttctatcgcaacgcttatcttgttgagcaagatttgccatccgctgtatatggttcggctccgggctggcatgagcataacgccataaaattctatgtatcccaatccggtaaaacatatctgtctgacagcgtgctttttgagttcgatagtccagtagatagcaaatacagatcggctgcggttggtactgttgaggattatcggacaagcgtcattgagctaaccaaaggcaaccacagccttacgtttcagatcctgcttgagctggcatccgttctgtttcctgtccgtaacggctcaatcaaagctgaaggtatcacggtcaatgtatatgggcgctcaggcaaaggtaaaacactggctatgaagctcggcgcaagcttatggggcaatcctgaccagctcactgaaagcgcgaacgccacctatacagcaatcatcaatagcgccgtatgttccagcggttctgcaatgcgtatcgatgacctgtcagcaatgcccaaccttcggggtgctgactttgaaaaccttgtttactcgatagcgaacggcaaggccaaaggccgcagcggtcaagacggtaaaaacctgcccgtaacttcgtttagcactatttgcctgatgactgcggaaaaaacgatagccgacgaactttggcaaaaagagaagcaccgttttaaagctggcgcggaaggacgcttgattgagcagcctttcatcgaaccgcaagacctcaagggctgcaacgatataagaagtttcgccagtgccctgacatctgcaatgctgtcatgcaacggcgtagcgggcgtggaatggctaaatcatttgagcaagcttggatggcgcggagttcaagctaacttaaaaacctactcaatgcagtttgaagacttgatgcgcaagcagtattccgaagcaatgaacgcacgtgagggacacaaagtcagggcgcacgcgctgtacggcattgtttatgctgccgggatgatgtctgcaagcataaccggttacaccgaaactgaaatttttgaagctgtacaggaaaacatgattgcagaaatggcaagcaatgatgtaggccatgcgcgaaatatggctgcggctgtcgagctttgggactatctgacgggcgcaatcaaccgcatgggtgctatagccagagagggcaataaagccaaccttcagcgcggcggcgatgaatcagcaggatggcttgatatggttgaatctggcgacgatgatgaataccgcccggttttctatctaaataagcgtcagcttaacaacgcggcaaaggaagcctgcggtatgtcgggcggtgatttgttgtccattctcactaaatacggctatcacgaaacaccaaccgacgcgcgcggcgaacgggatgggacggtacagcgccgggttagaagtggatcagcgacgactaatgtaagggtgataaaaatatcagccccagaggaaataccagaggtttaa

SEQ ID NO: 387736 - DNA, 234 bp, Salmonella enterica
atggaaattgatgagcaagagcaaatcgtaaccgaacagcttcaggaactggcgttacaagagatagagggtgttgccgcagggcttatcattgcaggagagtatttagatcacattcttcataaagatgacgcagcctcactagagaaacaaaaagccatgtcttccatattagcgtgttttgccctgtttgctgggcgcgatattatgcgcagcctcggcgcgtttcgctaa

SEQ ID NO: 387737 - DNA, 321 bp, Salmonella enterica
atgctgactgatagccccaaatatatgagcgataccagattcacaaaatcaaccaccgaagcagcgcaaaaactcaaagtctcaatgcggcaacttcgcgaaattcagggaaatgcacgaacgtttgccgtccgtgagttcgatgcggcgcctaataatgcgctcggtatccgcgcccacgccatcaaagcttttttcagtagccggaatacagaaatgttagcggagtacctttcagggttaggattcgtcaggcagaaccttatagccgctcgtgatgtgcttaatactgagggtaaaaaaaatatgaggcatacataa

SEQ ID NO: 387738 - DNA, 375 bp, Salmonella enterica; identical to SEQ ID NO: 387408

SEQ ID NO: 387739 - DNA, 1770 bp, Salmonella enterica
atggcggtggaaaaactgattgtcgaccatatcgatacctggaccacggcgcggcaaacccgctccaccgccgggcgcggcagctcgggcaagattgacctgtacggcattaagaaactgcgtgagctgattctggagctggcggtgcgcggcaaactggtgccgcaggatccgaacgatgaaccggcgtcggtgctgctgaaacgcattgcggcggaaaaagccgagctggtgaagctggggaaaattaagaagcccaagccgctgccggagattagcgaggaagagaaaccgtttgagctgccggaggggtgggagtgggttgcattacaagcaatatgttcattagaaaatggtgacagaagtaaaaactatccgaataagtcaacactagtagaaacaggaataccatttgtcaacgcaggtcatcttgaaaatggaaatatacgacaagaagacatgacattcattacaccagaacattttagcattctccgttcaggaaaattccttgatggtgatattttattttgtcttagaggttctctaggtaaatcagcaattgtacaaaacctatcaggagcaattgcttcatcactagtaatcgttcgtgtttttgagcctacatttaataaatatattcatttatatttcgatgcgccattatcttatgactttataaataaatatgataatgggacagcccaacctaatctggcagctacagatttagctcgttttttagttccattaccaccactagatgagcagtctcgcattgttaataaaattacggagctaatgacactctgcgaccaactggaacagcactccctgacctgtctggacgcccaccaacagctggttgaaaccctgctaaccacgctaaccgacagccagaacgccgatgaactggccgaaaactgggcgcgtatcagcgagcatttcgacacgctgtttaccaccgaagccagtattgacgccttaaagcagaccattctgcaactggcggtgatgggcaaactggtgccgcaggatccgaacgacgaaccagcctccgagctgctcaaacgtattacgcaggaaaaagtgcaactggtgaaagacgggaaaattaaaaagcaaaaaccgttgccaccgattagcgatgaggaaaaaccgtttgagctgccggatgggtgggaatggtgccaagttaatcatataggtgatttaaagcttgggcggcaacgatccccgaaagatcaccacggcccatatatgaccccttacctacgggttgcaaatgttcatgataatgaaattcgaactgatgatattaagcttatgaactttacaccggaggaacaaaccctatactcactcaaatttggtgatattttgctaaatgaaggacaaagtttagaattagtagggcgttcagcaattttcagagatgaaatagcacaagtatgcttccaaaacactttaatccgtttgagagcaaatgagtctgttagcaatgaatatattcttgaatatttcagacattgcctctattctggaagatttcaaaaagcagcaacacaaacaacaaatatagctcatttgagcatatcaagactcgcaccgatcgaattcccgctaccaccttataaagagcaggttagaattgtgagtaaaattaaaaaattagagattttatgtgaaaatataaaaacaaaactaaaatcggcccaacaaacccagctccatctggccgacgccctcaccgacaccgccataaattaa

SEQ ID NO: 387740 - DNA, 1140 bp, Salmonella enterica
atgaatcaacgtctggttctgccatgtttaagaggctatataggtagctggattacatatagttgtatgatgaggctttcagatgcctctgagctgataggttttgctgaggaacttcatcagattgataagttatcagataaaatacaacgtgaattaaatacagatagagcagaagaaatttcacgttatctagttagtaatgaagatcgtttctttaactcattagtcgttgctgtttatgatggtaatcctaactggcacgaaatcggtggcataactccaaataacgaagaagcatccttgctcgaatttccagagtatgcaggtaattgtttggggtttttatctataactagagatgagaaatttttcgcacttgatggccaacatcgtttggctggtattaaaacagccttaaaaagtaatagtaatattgcagatgagcttattagtgtcataatagttgcccattcgaatacaccagaaggtaaaattaggtctagaagattatttacaaccctaaataagaaagcgaaattggttagtaaagatactatcattgcattggatgaggatgatatagctgcctgtataacaagacgtctcatcgaatcggatgactttccctattttaatgaagataatatctctttcaattctggtccagttagagacaggacaagcattacatctatagtgaatatatatgataatgttcaaaaattggtcgcatacaaacttggcgttaaaattattgaattagagcggtttcgctatagagataatctgggtttattcggctttgtctctgatttttacggacatacttttgaagcgtgtccagagttgagtcaggtagctaaaggtgaaaggcaggctggattttataggaattcagagactggtggtcatgtcttatttaggcctattggctgggatttgtatactgatgtggttttatttgctttaattaatgccagatatgaccttttaaaagcaattaaaaaaatcacaagtaataatctaaatatgtccggacctattttttctaatagggtatggtcattaaagcaaaagaaaattttaaaaatcagtgctaaaaatgttaaggcaatacaaaaggccttattattgtag

SEQ ID NO: 387741 - DNA, 144 bp, Salmonella enterica
atgattaatctcaatgaagaaatagataactctatagatgattttgatgaggaagatggaaggcaggcctacctggcgttttttaaagatagttttccttttttactttgtcctactttgtcctactttgtacagacgaagtga

SEQ ID NO: 387742 - DNA, 1287 bp, Salmonella enterica
atgtcagatatcaatccacgcgatgccttaccccaggatcgggaagcgctctataaacttgtctggcgcgaacctgcggagcgcatagccgcgcaatatggcatcagtacaactttactggcaaaacgatgtacagaaatgcggatacccaggccgcttgccggttactggaaagcgctggcgaaagggactgcacctgcagtgccagcattgcctgctttgaagaagggcaaggtagaaaaagcttcaagcaaagctagtttggccgttccgccacccaccaaagtaccatctaaactagcagtgccagcaccgcgaaagcgagcaaggacagcgggtagtggctatgcactgatcgatgatctcaaaacttaccttctcgtctcttccgtcacaaaagacggctactacaaaccaacgaaaaagaagctactcgatctcaacgtttcagaaacggggttcgatagcgctatcgattttctgagtcggttctttgctgcactaggaaagcaagggtattgggtacgattagctgagggcaatgagggacttcattgtcagggcatagatatcaaagaagatccaaaagagggaggtttacgctacgacagtttatggtgcccttgttcagccagtattatttgcgttggggatatgctgttcgcctttaatctggctgaaatgacggaatatgttccagcaaaagaaattaatggtcgatacattcgtgatgaaaccatggtccgctggatgcgaggaaagcatgaacagccgtttcgctatgtcattaaacataacttacctacaggacgatttctgctacagctctactcgccgtattcgtcaacaaactggcaggtgcaatttcgacagacaaagcaatgtgggcttgtaagccagatcccgaagatcatttctgcgatgcatgatgctgttctgctgattaagaagcagttggaagaggctagagttaaagctgaagcacggcggatccagtgggagatggatgagaagagatatcgggagcgggatagaatcagagaggagaaagacgcgtatgatgccagcttagctgaattgaaagttattatggcccagtgggtggaagataaacgtatagagcaatttttccatgaagcggcattggatgcatctctgcttgaagaaaagcagaagggacaggtaatggagcgtctgcaactggcccgccagctcttttcggtggatacagcggttgagcgattgcttaggtgggtaatgccgaaggagcgattgaataaagaataa

SEQ ID NO: 387743 - DNA, 186 bp, Salmonella enterica
atggctaccggtacaaagaatgctaaatcacaagccttaaaggcacgagtgccacatgacgtagttgaagcgatggaaatggtgaaagaagaggacgaaagtacgtcacaattcatcattacatccatgcaaagtgagatcaaacgccgccagcgcaggaaagttaagccagagcaaggaggctga

SEQ ID NO: 387744 - DNA, 1350 bp, Salmonella enterica
atggtctttgttggtctcttgtggtctaccctcttttgggggcataatcgggggcatgtcaattcgatcaggatttatgcccccaaaatgaaactcaatgctcgccagatagagaccgcaaagccgaaagagaaagcctataaaatggctgatggaggcggcttgtatcttgaagtctccccaaaaggttccaagtattggcgcatgaaatatcgccgcccatctgacaaaaaggaagatcggctcgcttttggtgtatacccgacgatcactttggctgaggctcggggtaagcgcgatgcagcaaagaaattgttgtctcagggcattgaccccaaagctgagcaaaagggggcacaagctgaaattgagggggcatatttatttgaaactatcgcaaggcaatggcacgcaagtaacctaacttggagcgaagatcatagccgtcgcgttctgctgacgcttgagcagtatattttcccctcgataggtcaaattgacgccagaacgttgagaaccagccagcttctcaatccgatcaaagctgttgatgcggcaggtaaacatgatgttgcgcagcgactggtgcagcgcgtaaccgcaattatgcgtttcggtgtgcagaatgaccttcttgaatcaaatcctgccagtgatatggctggagcgcttttaagcgttaaggcaacccatcacccagcactacccccaaaaagaatccctgagtttcttgaaagactatcacgctataaagggcgactaatgacacggcttgccgttgaattaacgctactcacatttattcgttcaagtgagatgcgttttgctcgctggagtgaggttaactttgaacgaagcgagtggacgatacccggaattcgtaagcctattcccggcgtaaaacactctgagcgtgggatgaagatgaaaactgaacatattgttccgcttagcaaacaagcatttgatatttttaaacgtttacatgccttgagcggtaaaggcgaggttatatttcccagcgatcatgatcctaaaaaagtaatgagtgaaaatactgtaaataacgccttacgtgtaatgggatatgatacgaagacagaagtatgtgggcatggttttagaactatggcgcgtggtgcgctaagtgagtcgaaactatggaatgatgatgccattgaaagacaactaagtcacgttgagcgaaaaaacgtgaaaggttcatatatgcatacttctgaatatcttgaagaaagaagattaatgctgcaatggtgggctgattacattgatgctaacaagaatggatctatcacaccatatgattttgcgcgtgtgcatggaaaataa

SEQ ID NO: 387745 - DNA, 342 bp, Salmonella enterica
atggaaaatctattaaatcgtttatatgacgcgttaggcctggatgcgccggaagatgaaccgcttctcattattgatgatgagatacatgtttattttaatgaatccgatcttacgctggaaatgtgctgcccctttatgccattgcctgatgatatccttaccttacagcattttttacgcctgaactacacgagtcccgtgactatcggcgcagatgcagacaatacggctttagtggcgatttatcgcttgccgcaaaccagtaccgaagaagaggcacttactggttttgaattatttatttcaagcgtgaagcaattaaaagagcgttatgcataa

SEQ ID NO: 387746 - DNA, 213 bp, Salmonella enterica
atgtgcctgggaaccactatgtcgattacaggtattttaagtggcgtatgctcagcagccgtcgccagtgtcagtagtagcagtgttacctatggtaccgccttgacggttttaggcgcatcgattggtgtaggggggttgggtatgatgggattatgtgccggactataccttagcgtaaattccattagaacccgaccagcctatccatga

SEQ ID NO: 387747 - DNA, 315 bp, Salmonella enterica
atgagagaacttaatgaacatgagattaaatgtgctgctggtggtcaggattatggtcgtgagatagctcaaggcgctggggccgcagctggaacatttgtagcgggaggtggtggggctattgttggccctatcgtggcaggaatggtgtatgactgggcatcaaacaagactccagattcagctctttctccatctggactaggcagcactcttaaaaagaaaccagaaggacttccatctgaagcctggaattatgctgaaggcaggatgtgtaattggagcccgaataatctcaatgatgtttgcaaataa

SEQ ID NO: 387748 - DNA, 267 bp, Salmonella enterica
atggaacttattattttattaatttcttttgtttttgcctttgtttctaaaaatagtttctttgtggatatttttgtgattttaaaatcggtgtcattattttttataatttttacaaatggtgcagtggatatgagtatgccatcaccatttttaatttcctccaggatgctgacaatatcattatatatgaatggttgcattttagttggatacggaaaatatttatggatagagatgtttttttcatcttttgaaaattcatga

SEQ ID NO: 387749 - DNA, 486 bp, Salmonella enterica
atgaatttattcagttcaacaaaactcaaatactttattgctgttatggaagaaggaagtgttagcaaagcttgcgagaaaataaatatatcccgcacaccattgagtagagctatttctgaccttgagttctgccttggttttgaactctttaccagaagtaaaaatggtatgatacctaatcaatgcggaataaaactgtataacagagttaatccgttatattctgagttgttaaaaatagaaaatgatcttaaaaatgaaataaacaaaacatcgttaagaattgcaattacaactgaaatacctgattccatccttagctatttaaggaacgcactaaataaaaataatattaattttaacatgcatagcatagatctcgtccacaatgattatagcgcattacaaaattttcatgatattatcataactgagggaaatgagcccccccactttaaatgtaaccgaattcattatttttga

SEQ ID NO: 387750 - DNA, 3504 bp, Salmonella enterica
atgaacgataaaaaaaaccagttaacgagtagaattcataatacctttgatattaatggcatatcacctctggctgactattcatcggtacttgatattgtacgaaaaccccggacgcagtttattcgagaacataagtccgcattggggcgtaaaagtgaaaaaatttacgacctggcccagggatatgctaaccaaatccgccgtatttttcgcaagaataccctgactcagacgatacaaaaaaatacgctatccagaggaagccacaacattcaggggttaatgaaaaacggtcccacctggcagaatttatttcaggatgactggaataactattgtctgagttcagcgccggaagctaacgattcaccggtctcttatctgtgctggttatataatcaggccctgagctttgaaacacagatgggagacagcaatattatttcactggccagccgtcgcccggatttaccgaatctgatgctggacgacaatgccatcaaccaggtgattccatccctgcagctggttaatgaagtgctggagctggcggtgaaagattatatcgaggtccttgaccccggttcaaccgttgatgaaacactggcggtgacgcgttatccgacgctgctaccttatcattatccacatcaacaaacattgctgtcgctggaggccgacagtgaatcgctgcaggatgtgataaaaaaatccgatattacgtggccatggtttgtgaaagaggatctgctgcaggggaatgcggaaatggcctggcaactgggcagtaatcttgcgccggagcagcagactatcgtaaccgaggccgataacagtacattgagtgatttgtcggcgttctacgaactgaattttggcattaataccgctgattacagtgtgtttacggatcctgacctcttgtgtacgcaaatgggaatcactttcgggcaacttgagggacttgttgcggggactgtggggggaacaaccgtcgtggtgtcgcaaaacatcccaccagagaacatcaattcggcaagttatggcgcagtctttattaatgaaaaaaatgcgccgcccgtattgttgactcatcctgctgatgatcccacaacagctggaataataagtaattcggtcacgatatctaatctttctgacaggcggatggataaaattaaccgtatagtacgcctgcaacgctggttgaatttaccttatgaccaagttgatttactggtcacttcagttatgggtagtaataattcagagtccgataccaatacgctgcgtacgctgagtgtgtttagccattaccagcagaattacgcagttaatgcgtatcagtttgcgtcagtgttgaatcagataacgccttatgccattgcgccagctgtcccgttttttgaccagatatttgtttcaccttcgctgtttgaagaacctttatcgattaccaatgacccctttgattacaccgcgttgacgggtaacgacgggcgcattgtaaaacagatttgtgccggcttagggatcgaccgggcacaatttgtattactggcacagcaggtcagtaaagctcagggggatggcagcaccagtctgaactgctctctggatgtggtttccgctttctaccgcctggtcatggttccgcgctggctggggctgaatttcagtgacggtatggcattgctggagctggttgaagccgggcaggcaatgggtaaattggccggaataccggtttatgccgccctggacacacaggggcagcctaccgccagtgatttgctggacactttaatggcccttgctgatacagccacctggctggcggacaataacctgtcggcattgaaaatactggcgttgttgcaatccggtgaagggaatatgccggcaaccacggcagaactgaattttatcaccgaaattaatcagcagttacctgcggtactgcttaacgaacaaagttttaccggcgtacctgttcctgaaaatactaatattctcgaatttcctgcgggttatagttcgattaccggggtcgtgacaaatgatgcggttcagcttaattcgaaggatggacaatatgccatgctcgatgatgaggcaaatacgaaagtaaccggaagtaatgattacacactggggggatgggcgtatatcgatagcgcttcggagaaaacgccgctgtatgccaccgccacgataggtgctgataacacgcacaccggagccggaatttctgtcactttaggcgatggttataacctggtggctatcatttcggatgatacagggaaatcgattacctccagtagtacaaccggccaggcaaactgggggaaaaatggagcatggttctattttgctgtggttatggacactgcggccgaaatattaacactttatgcgtttactgattcgggtaccaatgttaccagcgcaatactggattatagtagcctgacaggttcaatcgggacgcctgaaggaaatacgggctcatttaatgaagatggttctgagcagttctattcaaccgtttctaatatgtttttaacggtaagatacgataatgtctgcatgtgggactctgttctgacagaatccgagctcaccagtatcgttcagtcaggaaagcctgtgctgtttagtagttggctggatacgttctccgacttaatcgatgatcagggcctggtcatgcctgtcgcgatcgattacagcacggttctgagttatgtccaggcagatattgctgagtatacgtttgatgatcctgatcaggtagccagtatgctggctaccgtcatctggcaggcgaaacacagccaggatgggattgcagacagctcgctggcgaaagcgttgaaaactgacagtaatctgtccacattcctgctggcatgggctgacgcttctgaatacagcttactgagccagacgctggcgctcagcactatcactcaggctgccgatatcccggacagctattctcagatgctgtaccaggtggcgcgccgggcaggaatttgtaccacagttggcctgacaccagccatgatgttcactttcctgagcaatccggcgtggtttggcgtaacggataccagcattgattttaacctgatgtacctgttcagccgttacgctgactggctgaagctgacgccgaaagaagacgacgtattagcctatctgagctgggtaaatagcgactcattaccgccagttactgaggcatcggaagctcttgctgcgttgctaaactgggatagcgatcaggttgaacaggctgcagcgcatgccaatgagactgacggtatcgctcgtaacctgtcacaggtggacacggttatgcgtctgcaaacgctatgcacaaatactcagacgtcagtggaaaccgttcttaacgtttcggcgctgacaatcgcatcagactattccgcatggcaaaccgttggagagtcgctaatcgccattcaggcatag

SEQ ID NO: 387751 - DNA, 2703 bp, Salmonella enterica
atggcaactactatcagcagtgaattaaatcagggctaccgtaatgcattgctctcttattatctgggacagtatgtgccaaatagtggcaatgataatctaacatctctggttcaaacaccagaggatgtctatgaatatcttcttatcgatcccctggtgaacaacgatgtacaaacgtcgcgcgtagcacaggcgatgtcaagcattcagcaatatattaatggtattgtgttaaatatggagccgggatatagcacacaaatgctggatgctgataaaattactcagtggaataatggcggtaatcaatatgctatctggggagggtatgtcgaacttgatacctatcctgaagattatattgttccgacgctaagaaagaataagacggaatatttttctgacttgcaaaatgctctggggcagaactctttaaatgaagataatattgagcaggcagtgcaagtgtatttaaatgatttcgaaaccgttgctaatctggatatggttagtgggtttattgatggtaatgttgtcgataaagataaatactaccttattggacgcacaaaaaattcgcctgcggattattattggcgaactttggatatgagccaaaacgctcacaatgctgttgcccttggtgcatggagtgaatggaaaaaaatagatgtcaatatcaatactgatgtgatggttggtacattgcgacctatggtatttaataatcgtttatatattgtctggtatgaaaaaacaaccagttcaacaagtgatggtagcagcaacattgttaatatcaagatgtactccgccaacatacaatttgatggttcctggtctgcgccacaaataatttataatatatctagtgatgtcgatcctatgtatgaggaactttttcaggcaacagattatatgactgttgctttagctaatggcagtattaattatgagacttttaatgcaatattcgcactctacgcagaaacatcagaagaccaggattccatgtatacttcgctgtcggccgtgatggatccctggggtaatatagaacaagaaaattatgttaatagtgatgatatattttctttctttgctggtgatgaaaatcaaaaatatatacaattcaatatttctggtaatgggatatctgtaacaacattgatcagcagtgatcttgttaatgacgattttaagggggagatgcagggttttatgccgagtgggggagatgttagtgcatctgttgacaatgaaaatggaactcttactctccggctaaataatgctattaatatttttcagtttcaaacaattcaaagtgactataataaaaagtataacgataataatcaattcggcttcactatagaaatggaccctgtagttgagaatatttttggctatggaagtattaacctggaggggaaaactaaccaggcaccatttaccgaactgcgtttagttgctgataattatgagacttcacatatatatgcatcagatgatactatatattatgaagatgatcacaaaatgtactatacagatggtatttattttaacaaagatgtctctatgtatttaaattcagagtctgattattatttgtgggtgcgaacaggaactagttccagtggctggagaagctattccttcaaactgcctgcggtgacaatttatagtccgcagtggagtcttggttattcggatggtgatagtgcgttaatctactcccctgtagattataatacaattaataatatcaataaaatatcttgtaattataaggattcaggaagttatgtattcaattggtctgtagaagtaagtgaaacactttcttctgaggagaccagagttagaaactgtactatgcagtataccgttgaggtaattaatctggttaatattgcgccaccaaaattagcacaacaggatagtggcaatggtgtggtgcaatatctggattttaatggtggtactttttctgatggttcagatttggctatttctccattacgtcttaatactctttttgccatgacgttgatcaacaaagcaaatatcggtattgatgagctgctgacctgggatactcaacttaccgaggaacctgctttagatggtggtgatcctgtcgtcatggattttaacggcgctaacggcctttatttttgggagctgtttttccatatgccgtatctggtggcctatcgtttgtaccaggaggcccaatatgatgatgcgcagcaatggctgaactatattttcgccccgtcagcgcgaggacgtaccagcagtaacccgaattatcctgaacccgattactggaacgtacgcccactggttgaaaccggtagcgctcaggcggtagggagtatggtgcaggatcctaccgatccggatgccatcgctactgccgatcccgttcactaccagaaagccatcacgatggcttatatcagtaatctgattgcggcggcggacgccgattatcgtctgttaaccaatgatggcctgagtctggcaaaactgcgttattgccaggtgagggatttggttggcagatggtggtgccgagcccggcgcgccaacgctggctaccggaatggttcttcagttaaccggggaaatccagggtttaactgcgcaacaaaccgaaatgtcagaaaattaccgccgtcgcagtga

SEQ ID NO: 387752 - DNA, 1005 bp, Salmonella enterica
atgtcagaaaattaccgccgtcgcagtgaagactggcagattcagtatcagcaagcgcagtctgaagtggatgccattgacaaacagttggatgcgctggctattcgtcaacaggccgcacagacatctcttcaactgagccagacggagcaagcgaacctgcaggatacgttgacctttatgacgacccgcttcacgcagtcatcactgtatacctggctgaccgggcagctctcttccctctattatcaggcttacgatgcggtgctttcgctttgtctgagtactcaggcctgctggcagtatgagatgggggatgtcacctccacctttatccagacgaacgcgtggaatgacagctatcacggactgttggttggtgaaacgctgacattgaatctcctgcaaatggaatccgcctggctgtcccgtaatcagcgtcggctggaactgaccaaaacgatttcgctgaagcaactggacagcgaagcgcttagcaagttgatttcattcggtacagctcaatttgcgctcagcgaatcgctgtttgacaacgattatccgggccattatctgcgtcaaatcaagtttgtgacggtctcgcttcctaccctggttgggccgtatcaggatgtccggatgacgctgacccagtcagggagtagcacactgctaaaagcggatatcaacggtgtgaattacctcaatgacaatacgaagggtaatgccaataacattgttactaacctgcgcgctagtcagcagatcgcggtttcaacagggctgaatgacagtggattgttcatgctgaactttggtgatgaacgttatctgccattcgaaggcaccggtacggtgtccagttggcaactgagtttccctcgttatcagagtgatgaacagcaagccattctcaataatctgaatgatgtgattatccaggtgcattataccgcgctatacggcggcagtagttttgagaatgcggtagtcaacaccctgtaa

SEQ ID NO: 387753 - DNA, 441 bp, Salmonella enterica
gtgataagcccactgccgatttatacccctacttttgaaggatgggacgatccgaaacggagcaccttcccgctacaactgtttggctttcactataaatcccgtacccattcaagctacggcaatattgatgttctgcaggccgcctgtcgccaggaggtgtggataaatccgctcgatgcgcaaaaacgcggtatcgcgaatggcgatagggttcgcgtctttaacgatcgtggagaggtgcgcctacccgccaaggtcacgccgcgtattctgccgggcgtcagcgcgatgggtcagggcgcatggcataatgcggatatggctggcgataaaattgaccacggcgcctgcatcaatacgctcaccacgcagcgtccttctcccctggcaaaagggaatcctcaacataccaatctggtggaaatcgaaaaaatctaa

SEQ ID NO: 387754 - DNA, 1002 bp, Salmonella enterica
atgtcccacagagtctgcagagtgcgttcagacagtggattcctttccagacttactcttgcggatgagggcagacctctgatactttccggcaggcgggtcagttggcaattacgggcaaacagccattgtagttctgacggcagctccggcaggcgggtcagctgtgggttattagagacaaacagcgtctgtagtcctggcggcagctccggcagtctggtcagatgtgggttcccatcgaccgacagcgtctgtagtcctggcggcagcaccggcaggctggtcagtcggttatcagataccgacagatcctgtagttctggcggcagcgccggcaggctggtcaggtgtgggtttccatcaaccgtcagcacctgtagtcctggcggcagcgtaggcaggctggtcagttggttaccagagaccgtcagcacctgtaatcctggcggcagcgtaggcaggctggtcagttggttaccagataccgtcagcacctgtagtcctggcggcagcggcggcaggctggtcagttggttaccagagacctccagctcccgtagtcctggcggcagcggcggcaggctggtcagttggttaccagagatctccagctcccgtagtcctggcggcagcggcggcaggctggtcagatggttatcaggaataaccagtgttgtaatatgcggtggtaaacggtctggtaaggtggtaagacctgctcctcccacgttcagcactcgactgctattattcaggcagtcacgcattttctgtaccgttgctgcgcggccgggtgactcttctgctggcgcagccctttcccattctgaccagacagcatcatattctgctgccgtctgtggagccgttgcgtcaaggagaaaggatgtccggactatcccggatgccccttccgcgtgtcctgtgcattcctctccctgtgctgtgtccagggtgaggcgatgtgtttcattgtccccctggcaattcacggtatag

SEQ ID NO: 387755 - DNA, 132 bp, Salmonella enterica
atgaatataatttatttttcatataagttatatgattccattctgaaaaggaataaaaaaaccggcgtaattgccggcaatgtgagtaatagtaaaataaatgataaaaggctaataacggggttattctga

SEQ ID NO: 387756 - DNA, 618 bp, Salmonella enterica
atggcattaacagataccgctatccgcaagactaaacccactgaaaaacccttcaaactggcagacagttcaggactgtacctgctgatcaaacccaacggctcgaaactctggtacatgaagtaccgcatcgatagcaaagagaaaaagctggccttcggcccctacccggacgtttctctgtttaaggcacgacagttacgtgatgccgcgcgtgcgaaagtacgtgaaggagttgatccctccgctgacaaaaaaattgcacagcagaagaagaaaaacggccatacctttcgccagatcgccatgaactggcacggtgagcacaggcgctggtctgaacattatgcaaacaccatccagcgcagactggaaatgtatgtcttcctggatatcgtggacagccttattgatcaaatcaccacggagacgctgttattcaccctgcgtaaagtggagaacaaaggctttctggaaatcactgcacgactgaaaaactatgtcacggagatcatgcgctatgcggttaagaaacagttaatcaaacccggcgctggatctggatggcgaatttaccccgccggaaaccagccattacccagccctgccgctggataa

SEQ ID NO: 387757 - DNA, 561 bp, Salmonella enterica
gtgcgctcaagcgagttgcgttttgcccgctggagtgaaatcgactggcagcagaaattatggataatcccggaagaacgggagcaggtagaaaacgtgcgcttttctcaccgcggtacaaaaatgagaacgcagcatatcgttccgctgtccgatcaggctattgcgattttaaagcagatcgaggcgctctccggtcatctgacgtttatcttccccggtgaatacgatcaggataaatgtatgagcgacaacaccgttaataaggcgctgcgcgtaatgggttacgacaccaaaaaagaggtctgcggccacggcttccgggcaatggcctgtagtgcactagtggaatctgaactctggtcgcgggatgccgtggaacgtcaaatgagccatcaggaacgcaacagcgtgcgggcggcatatatgcataaagcggaacatctggttgcgcgaaaatccatgatgcaatggtggtcggattatctggattcgagccgtgaagaatatatcgccccatggatttatgcccgagaaaataatacgatcgggaataattaa

SEQ ID NO: 387758 - DNA, 381 bp, Salmonella enterica
atgagcagcagaaaaaatgacggtggtggcagtattgcccctaaagagcgcgtaaacattaaatttcagcccaaaacagaaaatcagacggcggaagtggaactgccacttaacctgttggtgacgggcgatctgactggagggcgggatgacacacaactggatgagcgtcagccagttgctatcagtcgtaacaattttaacgccggactcggaatcgaaccaattacaccggatttgctttattttattgatttttatgtgtttattttttcaaggcaagcgccggatgtattggtagcgatgcgggtatgtgattttattttgtgtaatatggattacatcggtcttattaaatgtatagtcgggcagtgcgtttga

SEQ ID NO: 387759 - DNA, 267 bp, Salmonella enterica
atgatgaaaccgttaataacactcggagacaaaacatctcatggtggtgttgtaatcagtgctgatacaggttttttgcacgaaggacaaccggtggcttgtgacggtgatcaggtcacatgtccgattaaggggcacgggcctgcgaggattatagcatcaggtcagggtttctctgttaatggtaaacaggctgcacatgatggtgataaaacaacctgtggagcaaccctgatagccagccatcatattgtgcgtcataaataa

SEQ ID NO: 387760 - DNA, 927 bp, Salmonella enterica
atgactgataggaaaaaaaatcgactggaaaaaacgcttcctcttgtttatggttgggcgcggggggataagccagttactgaccccgaatttaactatatggatcagtatctcaatgggcgatctgaactgtatatggcactgaatcagttattctctcttggtatgagtgaagtagctagcagtctgctgactattgaacaatcggtaggctcttctattatctatatgtcacatggcttttctcggatgattcattccgacggaatcagtatattagaattaaagcaaaacaagttaactattgtttccagtttagattctgtcacacgtaatatgttgggcgctgttgcattaggtatgcctgaattggcgaaaaagtttcgtcaggttatttttactgctctcgaacacggttacggtattgataatggtcatgatgatcctggtcccaatacgttacgctatgccgctatggggttgtccattatccatgactggctacaaatcccgttggatctggataagttaggattgccgcgcgatcctgcctgggggcctctgattaagcactggaataaccccgatccggctaaattgcagtcagttttgtatggtgcttgtgacattcatatagaacgtatcgcgctaacggaacgtgaagtgaacaccggtgactttgaatttggttctgagtttgaagccgttcacccaacggaaattctggcggtactgcgcctgagagatatgctgaatctgccaaatccagagttggatcatccattgatgaatacgccttacgcacaaattaccgcgaggccgggacaaatcgtccagcctgatagattgctggaggcattcctgttcaaggctcgtgaacgggatccacaaatcatggctgaatgggacaaggttcaggctgattaa

SEQ ID NO: 387761 - DNA, 1872 bp, Salmonella enterica
atggcagatattcctcaggcaggcagtccctgcgccacctgtgttgacggcgtggcgatcccttttgatatcaaaccggataatgacccccatccggccgatgagcggttgagtctcgacagcacgtcagtaacaagcgactggttgtttaacaatccgtggataacagaggtcagaagggaacagaatatacgggactcttttctacttcgggtgctggagcagtttggtcaaacctatggcgcggaaaaacaggcggaaatgtatgcttttctctcaactgaagattatcagtttgtctgcctggatgatgagttgttgattaattccgttgagaccgttgttcctggctccctcattctacaggatcttaactgccgggttgtcaatatcagtaccagtctgaatggtggaaaagatattgttgaatatcaactgaacgacaattttctgtttgcagatcacaacatatattatgccaccttcacacgagcgtgcggggaaatgaacgatcccagcccgctgatactcgactggtctgtttttgggcattttgatatcgctgcggcgactcaggccctgaaacaacgttatgaggttgctcaaaagtccagccagttctggacacgattctggggaggtgtggaggcggcgttgtcggctatgatggtgatacctgtcgttggcacgttttccgctgcggcacgtggtacgattgccgctgtcagagggattaaatatgtattttgcgttatagatacggcgctcaccgttaatatgctgatagatggcagcagtaaactgattaacggtaaagggcttgatctgggagaggcgctgtttaagcggataggcgaactggctgatcctaaagatggtgctgaacggggggcgcaggtatttatgaccattaatctgctgatgctggccccgcttgccggtcaggcgggaaagtgggcattgctacgctttcccggaaccagtcggactatggcgacttatgaattatcaaagggaattgaagaatctgcggtccgctatgccagccagggagaagcggtggcgctctgtgtgaattttgccagaataccgaaggggctggaggcgctcacatccactattagccgtattgttacccggattatgccgtcactggatacccgcaactggtttcactggatcgagtttactggtggtgcagcgcacgttaacctgcgtgctcccagccagcaaaggcatctggcattacttatccataataatggtggctcgatccgggttgccgggcggattagtaaaatggtggggaacgtgggagaagagatcatggctcgttctctgatgagcagatacagggtattgccggagaatattctgggttacagtcgtggtcaactggggctggttaataagagcggtcaggggcttgatattctggtgagggtgccaccaccacccagcttaacattgcgtacaccggccactgaggtcgcacgaaacggtattgaaggggctcacggcaccagtgcgactacaacagtggcgtttcagccggatacgttactggtgattgaggtgaagacgacgctgggagggcagaaaacaccagggttgagtaaggcaactcaacaaggtggggggatgggagatttacgacgtattcagcgtttaataaataccagagctaaaggatgggattctggaaaattgcagagttttgatcctgaatttaatcaaaaattacagacaatcaattctgctttacatcaggggaaaatcgaatttgctcatgctcaggtttttttgcgtaatgacggtactgttaacacgactgtgggaaatggtacaggaatacagtggaatgattggtaa

SEQ ID NO: 387762 - DNA, 849 bp, Salmonella enterica
atgaacttgtttgaacgggtcgatttatccgcgattgccagagcgcagcagaaagagaccggcaggcaattaatcctctatttgcagcgacattgtggcgcgttactttatcgccaggccattgatgtggagtcattaaagaattttatcccggcagccatgcagcaggctaactctcagggatatggggtcgatactcagtttacgttcttcattgtcagcagttttctattgggtactgactggttacaggatccggcatttattcctctcagaacattgctgacagagtgcgatgctgacagtgacaatcagttacgtctgaatcattgcctacatgaaaggcagcggctggatatgatgctaccggcaatgcatgatcaaacacttatcgtgttgcacatgtcagcggagaatctgtcatccagaacggtattgcaacactggcaggcaattgcccggttacggggaattgagaatatacagttattaactgaactttatttttgttattacgccgatttttgccaatttttcggtctggcggacaaaacagaggaaataagaaaacgtgctcagggaaagacgcccgcctttttatacagagaactgtcgtgggaagatgctcttcattttatcgacgatttgactttccgacagcgataccaattcttgcttcattttcatctggcattaagttttggacgtttctggcgtatcaatccattacataaacagctacgtcaggcaatgaaaacagcggatgacacagggcgagcggcagcactgattgatttcctacgcatgtatcagcagcgcttagcggaaaatatcaaggacggagtataa

SEQ ID NO: 387763 - DNA, 585 bp, Salmonella enterica
atggtacatcagcaatggcagaatttgggcctgcccgcacccgctcacctctatgtactggcagaggcaacgcctgaaaataaattactccctcagatggagtttcaccaggtttcccatcgtgccctctggtggctggatggacaaccggaactggcgttttatgccccctatctgattgatatggcgggaagtctggcctttagccagtggtttgataaacacagtaatgagatggcttttaccgttctggacagtacgctggcgttttcccctctgtggcagcatctgcgccattttaccaaatttgccgatatccatgaaaatcgttactactttctgcgtattggcaacgcggcgatgttacatctctacgtctcatcaattaccgatcggccggattgtgtcagcagactgtttgccggtggtcaaattagcggctttttgtttcagaatcatgcgacggatttactgatgtactgccacccgttgtttaaaaatggcacctttagtaaaggccgcgaggaaggttgcctgttatggcatgacctgatggaggatcttttattcaggagagatgcatga

SEQ ID NO: 387764 - DNA, 2055 bp, Salmonella enterica
atgtcacagacaggtctccggtttacggtcagtgtgggcgacctgcccgcagaaacctttgccgtcacccgctttcacctctcgcaatcttactcttccctgtttacgctggacatcgataccgtcagtgaacgtaccgccttacaggccagcacgctgctggagcggactgcgcaactggctatctggcagggtgacacgccgttacgctatgtgaccgggctgatcaccgggcttgagcgtggtgaatatgatggacgaaaaaccacctaccgcctgacggtacgtccgccgttctggcgcagtagcctgcgacagaattttcgtcattttcagcagcaggatattcagtccatcatccagcgaatactggatgacaaccgggttggcgatagcgcatacctgctggatgaagcacatccggcgcgggaattttgcgtgcagtacggcgaaacggactatgaatttctctgccgtctgctggcggaagaaggcatgttcttttatgaggagcacgcccgtaaagggacgcggcagatgctggtgttttgcgaccgggtggtctgcctgccggatgccttcccgttgccgttcaacccacaaccgcgcagcaccacgacggagtgtatcagccagtttcgccacagcgcacaaatccgcccggcatatgtcattgccaaagattacacctttaaagcgccgggctggcaggcgcgctaccgtaatgatgccgccagtctcaacgggcagcgtaatcagtatgaggtgctggactatccggggcgtttcaaggatgagcagcacggacgggattttgcccgctaccagacagaaggcagacgcaacgatgctgaaattgcctccgggagcagtaattcaccaaagctgtggccgggggcgcgctttacgctgacggaccatccggcggacgatctgaaccgtgagtggcaggtgacggcgagcgaactgcatggcgaacagccgcaggccatgccgggaacccgtaaggaaggcaccactctggtgaatgattttcaggtgataccggcagataaaacgtggcgacctgctccgttgctgaaaccgaaggtggacggcccgcagccagccgtcgtgacggggccggagggcgaagagatattttgcgacgagcatggccgggtgcgggtgaaattcctgtgggacaggtatcacaaagcaaacgaggacagttcctgctggatacgggtatcccagccgtgggccggagccggatttggtcatctggctattccacgagtcggtcaggaagttattgtggactttctgaatggcgaccccgaccagccgataatcatggggcggacgtatcaccagaataaccgctcgccgggaagtctgccagggacaaagacgcagacgatccttcgttcgaagacatacaaaggggacgggtttaatgaactgcggtttgaggatatggccgggcaggaagagatttatattcatgcgcaacgtaataaacgtattgtcatattaaatgataaagatgagcaggtagaacatgatgaaaatcgctcagtgtgtaatgaccagcagttcagtgtcgggcgcgacagaaacaagaaaatagcgcgggatgaaatactgactatcgggcgcgatcgtaaagagcatattgaacaggacgtgtttgttactattggtcgtaacgaagaccgcaatatattgagccagctacgcgaagcagttacgggcagtcatactgttgctattggcgagaatgaaaccattgccattgaaggtattcagtcagtcgaggccaaaactcaactaaaaaccctgacccgcgattatatgttgcagggtactgaccggatactgattcgcgggcctgctggtagtattatattcgacgcgacagggatcacgattaatgcgccgcaaattaatttacgtggcaatgtcagtgcaactggtccggcaggcaaccaagtggacgcgataaaaagcgccattcagcagggcgcgccttttgttgaggagtgtccgcttaaagagaaggagcctcagtaa

SEQ ID NO: 387765 - DNA, 1860 bp, Salmonella enterica
atgatctctgaagaacgttattaccgggaagaactggattatattcgccagtacgccaggttactggcgcgggaaaatccccgtctggaactgtttctcggcagcaaaaatgccgatcccggcattgagcgtctgatggaaggttttgcctttctttccggcaggttgcgtgaaaagattgaagacgtatttcctgaaatcaccgtcccgttaattaatcgccagtgtcccaattatctgcgcaccgttcccgctatgaccgtgattgaatatacgccagataataccctcaccacaccgataacggtcccccgtaatgcgcaggtcatgaacacaccgcagaagagtactgcgacagaagaagattatctgctgcctggcgggcaggatagccagccggaagaggaagcgccgccgtgtatttttacattatgccgcgatatccggttattgccattgcgtgtcagtgaagtgaataacctcagcactccggcgcagggtattcttgatattaccttcacgccgctgccgggcgggagaataacagcatcagaccttaacggcatcagcctgtggctggcgaatggcgatgatgccagccgccaggacatttacctgtggctgtgccgccaccgacgggaagcggaagtgataagcgacggacgccattacccgcaaccggaactggcgctgaaaccctccggtttcagtaatcatgaatcactgctgccgcagcctgaaaaacaccacaatggctacagggtgatgcaggactggttttgcttccaggaggcatttttcttttttgaactcagcggggtagcgctgcccgacaacgccattacccgccccttcacgctgcgactgcacttcgaccagccgctgccagagacggtctgcctgaaccggcactccctgcgtctgcactgcgccccggcggtgaatctgtttatccacgatgcggtccccatcacgcctgtcagtccgcatcaggaatatccgttgcaggccagtcatctctggccggactattttgatatttttcgtgttaacagcgtgcagggacaggaacatcacactttccgggaggaagatctggacgggctttcgcgccgtggcagtgcgcgccactggctatcctccgaccattttccccgcccgctggaataccaccgggagcggcagattatttactggcagcacatgatgcgtcgctcgttgttcagtgaacagccggatcattttatttcactgcgccattcggataacagcataccggataccacgctgaccggtcgcgaaccggttcagatatcgctgacctgtacaaaccgggagcagccctgccttctggcgcctggtgatatcagtatccccgtggggcagaatgcctctgtggcatcactgcgtaacgtgaccgtgccgacaaaacccataccgcccgtaccagacgggccgctacactggtcgctgctgaacacgctatcgctcaattacctgaccatgaacgatgtggaggcactgcgcgatattctgcgcactttcgatcgtgccgccattcacacaccattctgcgcccgcctctcgccggaaaaactgaacgcgctggagcggctggaaacacgccccggcgatcgcatattcagaggggttgcagtacgcggactgtcgtccacgctgtatgtcaatccacagcccttctccggtaaaggggaaatgcaccagttaggcacagcgctgtcacattttttcgccctctatgccagtaccaacagctggcacatgctgacgatggtaaacacccacacccaggagacctggcgatggacagagagaaccggccagtttccggtcatgtag

SEQ ID NO: 387766 - DNA, 1053 bp, Salmonella enterica
atggacagagagaaccggccagtttccggtcatgtagagtctgcaaccgaccgtaatgaaacacaggcgctgcgtgatgcctgttatggcaatttttacgcggtgtgcgatttgctgtaccgcagccgtaatgatgcggtttcgctgcgcacggagccggaacaggaaacccttcgttttcgcgccagtgccagtatcgcatttccggtacgcgatattgaatcgctgggaaaaaacgccgccgggcagtatgtcataaccactcattttatgggtttttccggcagcgcatcgccgttgcccggttattacctggatggcatggcctggcgcgaggcgcaggaaggcggcagcgtcatagcagattttctgaacctgttcagccatcgcctgacacagtttctgtaccatagctggcgaaaatatcgctggcatatcagctttcgcaacggcggtaccgatcccatatcacagtgcatgtacgcgcttatcgggctgggtaatccgcgagtgcgtgagcggctggatatctgccacagcagactgctggcgtatggcggaatgcttgcgggaacggggcgctcgccggaaattatctgcgatctcgtatcccactgttttgatttaccggacatcaggctggagggctggcagcttcgccgggtgccagttccgccggaacagcaaacccggctgggtgtcagcgaactgaccgatgaggggaaaatgcagggaaaatcggtgctggggaaaaattttattattggtggacgcgtaccagatcgcagcggtaagtttatgctgtgcatcagcaatctgaaactggagcgctatctggcctttttgccggaaggcgaggaacacctggcgctgaccacctttatttctttcctgctgcgcgaccagcttgcatgggatttgcaactggggcttgcaccgggggagattggtggaatgcggctgggagataagcgctcatcccggctgggacaaactatgtttattggtaaccccccgcgcgaacactttacgatcctgcacatcagggaatga

SEQ ID NO: 387767 - DNA, 267 bp, Salmonella enterica
atgtgtatgtttaatccacctcatccgggtgaagtccttcgtgattatctgggcgatatcagtgtcgcgcaatgtgcccgatcgctgaaaataacgcgttttcgactgtcccgcctcctgaacggccatatccccgtcactgcagatatggcacttcgcctgtcagcattgctggaaacacatgctgaactgtggatggatatgcagtctgaatatgcactctggcaggcgcggcagaaaccagtgcccgctatccgtccactgtaa

SEQ ID NO: 387768 - DNA, 885 bp, Salmonella enterica
atgggcatgctggagcgggaaatgcggcacctggcgaagcaggcgggtggcgcacacaaaacggtcagcgaccgcatggcgcaggcgaagcgcttctgcgaacgtctaatcgaacagaatgcgcagatccgttatgttaagcatctgaaagcgcggcatattgaggattacattcgtcaccggctggcgcaggggatcgataaacgtaccctgcaaaacgaaatgtcgatgatacgcgtggtactgcgacaggccggacgcgtaaagctggccgatggcgaccggatcagcaacagggccgtggggattggcggcgcatcgcgcaacggtacgcgccgtgcgatgacggacgggagatatcaggtggtacaggaacatgccagtctgaaagatccggggctggcggcagcgctggagctggcaaggctgatggggctgcgctcgcaggaggcggtacaaagcgcacagtcgctgaaaacgtggaaacaggcactggagcggggggaatcccggttaaccgtggtgtttggcaccaaaggcgggcggccccgcgaaacgatgattctggacgctggcgcagtgaaaaaagcgctggataatgcgtcagatgtggcagaaaatcgtcacggcaggttgatcgacaagccggatctgaaaagcgcgatgaaatactggcatagccaggcatcatatatcgggttaacgggcgcatattccccgcattcgttgcgttacgcctgggcgcaggaggcgatctgtcattatctggcgcagggattcagcgagaaagaagcgctggcgctgacagcgatggatttggggcacggcgacgggcgcgggcggtatgtggcgcaggtttacgggcgaagggaagaggctggctga

SEQ ID NO: 387769 - DNA, 1209 bp, Salmonella enterica
atggctgttcttacccgtcccctgagcgcctccgaagtccagaaggcaaaacccgccgaaaaagattacgaactgtttgatggtcaggggctgaccctgttcgtccgatccagcggcaaaaagatctggcgttttcgctataagcgccccggttcggatgccagaaccaccatcaccctcggttactatcccgctatgtcgctcgccagtgcgcgggcgctgcacgctgaacaactcgctttgctggtaaaaggtattgatccgaagaaactggagcaggaggaagtcgagcgggaacggcgcgccgtggatggtctgtttctcaacgtggcgacaaaatggtttgccgtgaagaaaaccaaaatttcagcagactatgcagacgatatctggaaatcgctggagcgcgacgtattcccggctatcgggcagatgcacgttactgaactgaaagcgtacacgctggtgaatgcgctggagcctgtgcgggtgcgtggcgcgctggagaccctgcaccgcctgacgcagcgaatcaatgaggtgatggtgtacgccattaataccgggttgctggacgccaacccggcatccactatcggggatgcgtttgtgaagccaaaaaaacggcatatggcgaccattcgcccggagcgtctccctgagctgatgcagcgcatttataccaccagtttgtccccaatgacccgcctgttgctgcaatggcagttactgacgctggtgcgccctgctgaggccgccggggcaatgtggcgtgaaatcgacatggaaaaacggctctggacgatcctgccggagcgcatgaaaataaaacgtgaacaccaggtgccgctgtcgccgcaggccatgacggtactggagcagcttaaacccctgagcggcgcttccccgtttgtgtttcccggcagggtaaaacgcagccagccaatgcacagcgagacggttaacaaggcgctgtggcgcatgggctacggcggtgaactggtgtcgcacggtttccgggcgctgggcagcaccacgctgaatgaagcggagtttccgccggatgtggtggaggccgtactggcgcatactgacgccaatccgacccgcgccgcctacaaccatgcaatgtatatggcgcggcgtgttgaggtgatggactggtgggggcagaaaattagcgaggcggcacggagttcagcgctgtaa

SEQ ID NO: 387770 - DNA, 168 bp, Salmonella enterica
atgctgacggtgcatcatttaaatcagtctcgttcgcagcgcatcctctggacgctggaagaactggcgttgccttaccagattgtgcgttaccagcgtgaaaagacaatgctggcgccgccagcattgaaaaaagtgcatccgctgggcaagtctccggttatctaa

SEQ ID NO: 387771 - DNA, 210 bp, Salmonella enterica
gtgtatgtctgtccggcaggcgcggaactgaactacaacaccacggaccgcaacggctaccggcattaccggtcggataaagcggtctgcgcggggtgtccggagcgggagaaatgcacgaaaagccgtcagatgcagaaccatcacgcggcatgtgtgggaagaggtgaaagagaaggcaaacgcactgcggctgacgaaatggggtaa

SEQ ID NO: 387772 - DNA, 198 bp, Salmonella enterica
atgtatgacaccataacctttgacgggtgccaggcacaattattgccacaaacactctcccctgatgacatgtctatgctgaatgaatcaactgaaatcatgccgcttaccgtccagatcatgaaacacgtattactcgcccaacgagcatggcagttgctgttttcggcgaaaaaacagccggcagatccggcgtga

SEQ ID NO: 387773 - DNA, 1872 bp, Salmonella enterica
atggcaattaaaatgtcttatttttttgacacagcagtaaatatcgaaggtaatacaaaacttagagctccgcagatcgaagcctatataaaaataaaagatttcttcagcgatgaagaaaataaagaggctctagttgtcttgcctacaggaacaggaaagagtggtcttatctcaatagccccgtttggtgttgcacataaaaaagttttaattatcaccccaggactcatcacaaaagatagcataagaaaaacccaagaagttctcgctgataatttttgggtaaacttcgatattgtatttagtagtaaagatatacccattgttaatgaatattctgccgagttatcagacgagcatcttttaagtagccacattgtttactctaatatacaaaaggttgcgtcaactcgcgataatgcattaatcaatagagttccttcggatttttttgatttaattatcattgatgaggctcatcatgcaccggctcagagctggcgtgatacgctccgttatttctctaatgcgaaaatacttcatgtaacaggaacgccctaccggggagataatcaggaaattccgggagtaagaattcatgaaacacctttatctgaagttatgagagataaatatgtaaaatggttaagaaaagaaacagtcaatgcgcatgagttatttttttcaacaccagaacaacccggtgtaaaattatctaaagagcaaatactaatgctcaaagataaagaatggattgaaaaaagtatcgcattatctaaagagtgctctttagatgttatagaccatagtattagtaaactcagagaacttaaagaagcctcgccaaacgttcctcacaaaattttagctgtgggttgtagtatcgctcatgctgaagatttacttacttggtataaagacagaggcatgacctctgtaatagtacatagtgaaatggaacaaagtgaattagctgatgcattaatgaaagttgaacatcaccagtgtgatgttgtcatttccgtaaatatgttaatggaaggctacgaccataaatacttaactgttcttgcgatatttaggccatatagaagccttaatgcttttgctcaagttgttggtcgtattttacgagttattcctgaatctgaaatcacacatttcgaaattgataataacggcatagtgatatttcatgaggaaataggcctaaatgtaatgtgggagaatttccagaatgaggtagaaaaagctcgtagagcaactgcacgcgagtatacgtttactgacagagactatgtcgaaagaagcaacgaattagcaggagtcgaaagtgaaagtgcttatgtcagcgatatagattcttacttaaatgacattgacttcaatgcgttattcgaaaaaaaacgccatgagataagcgattcggtaaatcagcaaatagaaaaaatcagactggcagggttagaccttccagaggacacattagaagagttacgccagaaattagctgaaaaagaagttcagaaagctgctgaatacattgatcctgagttaattgagaaaagacctcaccaggcaagaaaattaatgagggatattctgaaaacacgtactcaagatgcggtatctaatctactgattgataatggcattggtgagaaaagctcagagctttatccgatttttagccgttacatgccatatttaaagacaactgaggctaatgatgctatattagtgagatatgtttttctaaagctagccaaagcttatggcccagttgataagcgagataacaaagcccttctccagtcgattaatgatttagataaggttctcgcagaagttgagaggatgattaaatga

SEQ ID NO: 387774 - DNA, 423 bp, Salmonella enterica
atgacaaactatactcaaatcatgaaagagattaataaaataatttctttttgcatggtaaaaggggtgcagccgcatgagttagttacatctatttttgagcgtgaatatcaacacatcgaaacttataagaaaggtgagctagttcatttcattttaacttattcagacattcatgatgatggtgtcaatttaattaaaatgaaatatgtctataacgatagacaacaattactatcgattgctcaaaaaattgattcctcaagctataagatccaatgggatcgcagtgaaaagcttgatgcgctgctcagtaacctagcatcacagttgcctaagaacagttcgattatcagtcaacttcgagaggcgattcctgatgattttaaagctattttttatcctgttttaaaagttgcctga

SEQ ID NO: 387775 - DNA, 1281 bp, Salmonella enterica
atgctaccgcgcccaaaaattacggaaattctcgatgaggtaaacagctggacgacgtttacccgacatttttcgcatataaaaaatgacattacccgtcccgatacccgcctgcccctcaccaccattcttgcggatggcatcaatcttggcctgaccaaaatggcagaagcctgccccgggagtaccaaatcatcactcgaagatattcaggcatggtacatctgtgatgaaacttattcagccgcccttgcagagctggtaaacgcacaggggaaaaggccgctggcggcattctggggagacgggacaacatcatcatcagatggacagaatttcagaacaggcagcgcaggccgctacgcaggtcaggttaacccgaaatacgggcaggagcccggacgtcagttttatacccatatttcggatcaatacagcccattttacacctgcataatcagtcgggtcagggattcaacacatgtgctcgatggcttgctgtaccacgaaagcgacctggaaatcagggagcattacaccgatacagcgggtttcaccgatcatgtctttgccctgatgcatctgctgggatttgcgttctgtccacgaattcgggatctccacgacaagaagctatttatcaaagggaaagcggaccaatatccggcgcttcagtcactgatatcaacaaccagcctgaatctgaaagaaattgaaattcactggcgtgaagtgctacgtctggcgacctcgataaagcagggaaccgtgacggcatcccttatgctgaaaaagcttgccagctaccctaagcaaaacggacttgccaaagcactgagagaaattggccgtattgaacgaacgctgtttatgctcgactggttccgcgatccggcacttcgtcggcgggtacaggcgggactgaataaaggagaagcccgtaacgcgctggcgcgtgcggtattcctacaccggctgggtgaaatcagggaccgaaaaccggaaaatcagagctaccgcgccagtggactgacgctgctgacggcagctatctcgctgtggaataccgtctatatggaaagagcggtcgaggccttgaagcgtaaggggctgaagatcaacgagcagctgctgtcgcatgtgtccccgctaggctgggaacacgtcaatctgacaggcgattatatctggaagagtaaccggataccggcttccggtaagtttcgtcggctgaggccagctaaagtagaaaggtcaaaaaataaccttaacgtacaataa

SEQ ID NO: 387776 - DNA, 429 bp, Salmonella enterica
atggcaaggaggcagattctttcgctgtcggaaagagaatcattactggtactaccggacgatgaattaacgttgacccgaatggcgtgtttcagtgaacatgatctggcacttatttgtgcccaccgtaaacccgccagccgttttggttttgccgtccttctttgctatctgaaaaatgtcggctttgccccggataaaaaaatcccgccctctgatgcgctgctgaagcatatcgccagcaggctaaaacttaccggagatctctggcctgcttacctttccggcagggataccacccggcgcgagcatttaaccgaattgtaccgctatcttggcgtaaaggcgttcaccggcaaaatacagcaggactgtattatacacctgctgccgatggcgacgcgcagtaaaagtctctccgctggataa

SEQ ID NO: 387777 - DNA, 627 bp, Salmonella enterica
atgttcatcagagcttatttgagagcatcgacggaagatcagttcgccgatcgggcaaaagagatgctggagcagttcgttcaggaacgagggcataaaatagccagctactaccgggagaatatcagcggtacaaaacttgaccgccctgaactgggacgcttactgatggacagtcaccgcaatgatattttgctggtcgagcaaatagaccgcctgacccggctgagcaacagcgactggatgacgctgaaaaagcagatagaacaacacgagctacggattgtcagtcttgatgtacccacatcctggcaggcgttgtcagataaagacccttcgcaggctgacccaatcacccgcgccgtgataaccgccatcaataatatgcttatcgatctgatggccgcgatgtcacataaagactggctgagccgccgccagcgccagaagcagggaattgaacgagcccattcgctgggtaaataccggggaaaacaggccgatcaggaacggcatcagaaagtcctttactaccggcaggtcaagaaactgagtatcagggaaacagcggatgcaacaggatacagcccctcccagatatgccgcatccaggcgctgtaccggtaa

SEQ ID NO: 387778 - DNA, 270 bp, Salmonella enterica
atgatggcaagagcactggcctgccttggcgacaaaacgagttacggtgagattatctctgccaccgcgtcctggttcgaaggaagtaaagcaatagcccggacaggcgacagggcatcatgcagcaaatgcaacgggtactttgaaatccttgcctccgcgcaggactgggcagaagaaggcaaagcgtatgcggccacagccgttgccccgatcactatgtgtacggttcagccacgcagtctaccagcacaggcaccggctctctga

SEQ ID NO: 387779 - DNA, 477 bp, Salmonella enterica
atgctccatctccatgctgcgctggaggcccgcttcgaaacgccgcccgcctggctgctggaggacgcgaaaggtctgttccatgccaccatccgcgacgcctgggcgacggatggcgcagacggctttgtctactcagtcgactgggacggtaaacctatcgtacgtgaacgcgtgcgctggccgattgtagaagcaatgggtacggcctacgccctctacaccctgacgggcgatagccagtatgaagagtggtatcagaaatggtgggactactgcattaagtacctgatggactatgaaaatggttcctggtggcaagagctggacgccgataacaaagtgaccaccaaagtgtgggacggcaagcaagatatttaccatctgctgcactgcctggtcattcctcgtctgccactcgcgccgggcctggctccagcggttgcggcgggtctcctggatatcaacgcgaaatag

SEQ ID NO: 387780 - DNA, 825 bp, Salmonella enterica
atgcaaaatattaccgattcctggtttgtccagggcatgattaaagccacgtctgatgcatggctgaaagggtgggacgaacgtaatggcggcaacctgacgctacgtctggatgaagccgatatcacgccttttgcagctaatttccacgaaaaaccacgctatatcgcgctaagtcaaccaatgccgctgctggcgaatacaccgtttgtcgttaccggctccggcaaattttttcgcaacgttcagctcgatccggcagccaatttaggcgtggtcaaaattgatagcgacggcgcaggctaccacattctgtggggcttaacccacgacgccgtacccacctccgaactcccggcgcattttctttcccactgcgaacgcatcaaagccacccacggcaaagaccgcgtgatcatgcactgccacgccaccaacctgattgccctaacctacgtcctggaaaacaacactgcgttgatcacccgcaaactgtgggaaggcagcaccgaatgcctggtggtattcccggacggcgtcggcattctgccgtggatggtgccaggcaccgatgaaatcggccaggccaccgcgcaagaaatgcagcaacattcgctggtactgtggccgttccatggcgtgtttggaagcggacctacgctggatgaaaccttcggtttaatagataccgcagaaaaatcggctgaagtgttagtcaaaatctattcgatgggcggtatgaagcagaccatcacgcgtgaagagttgatcgcactgggtaaacgctttggcgtaaccccgttagcaagcgcactggcattgtaa

SEQ ID NO: 387781 - DNA, 654 bp, Salmonella enterica
atgtcaacaaccattagcagtgaattaaatcagggctatcgtagtgcattactcgcgtattatattgggcaatatgcacctaatagcggtgacactactttaagtaatatgattaaaacaccagacgatgtttatgaatatctgttaattgaccctctggtcactaatgatgtgcagacctctcgcgtggcacaagcgatgtccagtattcagcaatacatcaatagcattgcgttgaatatggagccaggctacaacacgcaatccctggacgcaacacaacttaaacgctggaataatggcgccgatcaatatgccgtctgggggggctatgttgaactcgacagctacccggaaaattatattgaccccaccctgcgccaggatcaaacttcctgttttaacgatctgattactgaattaaatcagaaaaccgtcagtaatgataccgctcaacaggcggtaatggggtatttaaatcaattcgagcaggtcgctaacctgacgattgtcagcggttatgccaccgacaaagatcagaccaaaggaatctattatctgttgggtaaatcgacttcttcgccggtgcaatactactggcgctcgtttgatatgtctctcaacgttgataacgttctggcgtcaaacgcctag

SEQ ID NO: 387782 - DNA, 858 bp, Salmonella enterica
atgagcactatcctgaaatgggcgggaaataaaaccgcaataatgcctgaactgattaaacaccttcctgcgggcccgcgactggttgaacctttcgcgggttcctgtgctgtgatgatggcgacagactatcctcattatcttgtcgcggatattaatccagacctgataagtctttacaatgccattaaaagcggacctgaattattaatctcaattggcaaggatttatttgctaaaaataaatcggcagaagattactacgatattcgaaaagaatttaaccatggacgtgattggcctgtggattgccgcgctgccatgtttatttatcttaatcgccattgttatcgcggactgtgccgctataacttgagcggtcactttaatgttccttacggtaattataaaaatccgtacttccccgaaaacgaaatacgcgcttttgcagaaaaggcacaacgtgcaacgtttatctgtgccagctatgacgaaacactggcactgctgaagactggtgatgtggtttattgcgatccgccatatgacggaacgtttaccggttatcacaccgccggatttactgaggatgatcagtatcatctggcgtctattcttgagcgtcgttcatcagaaggtcatccggtcattgtgtccaacagtgatacatctttgacacgttctctttatcgcaatttctcccgctatcggctgacggcaaagcgcagcatgggtgtggctgccggtgatggtaagtccgcagtggaaattattgctacttcgaaaccccgttattggattggttttgaccctgcaggcggtcatgactgctgcgttaaacatgaggtgcgggtgtga

SEQ ID NO: 387783 - DNA, 828 bp, Salmonella enterica
atgtcagacccgatgacttacgaggatttgttcaggtccatttctttgcaggggttggtatttggtcatatgccttgcgtcgtgtgggctgggaagacagcagggaggtctggacaggttcctgcccatgccagcctttcagcgcggcaggcaaaggaaaagggtttgctgacgagcggcacttatggcccgccatgcattggttggtcgggcagcgtcgccctgtcgttgtctttggcgagcaatctgcaagtgctgacgcaaatgactggatcgaccttgtacagactgacgtggaagccctgggttatgccttcggggcgagtgcgtttccggctgcgagcgtcggtgcccagaacatccgggacagaacttattgggtggcccacacccacagcgaatgcctggaagcatcccagcaacgcgggccgtcagggaggattgaacttgcagacagctgcgcagctttcgggctgggcaactccgagcgccagcgacagcaggcggggagggcgggggattaccgagggcatgtccggcagcagccttgcgcaacaggtaaaaatggctggctggcccacgccaacagccagcgaccacaaggggggatatcctggggggaggattcgcaacgggaaaatatcgacagatcgtctggatgtggtggcacagattgcaggcccggtccggttaacggcttctggaaagatgctgactggctcaaatgcacagatggaaaatggaggccagttaaatccggccttgagcctttggttaatggggttgcctccagagtgggacgaattcgaacctacggaaacgccttaa

SEQ ID NO: 387784 - DNA, 219 bp, Salmonella enterica
atgtcaagtatcgccgcattgaggctgggtaatccagttgaacgtttggcacgggttctaaaagagaaccaggacaagctcaatctgagtaaagatggttttgtgtccgtaaatttgtccaatgaagaagctatgaaagccatcagagatcagatggataagcttgaaggcatcaaaacgagcactgttaaaacaaaacattattatagaactcgataa

SEQ ID NO: 387785 - DNA, 843 bp, Salmonella enterica
atggcaacattacttttagcagtgattttggttagcggttttttatatgtaaacctatcactttcaacaagatatagatataagcgttccaatggctgggacgcttatttttttgtggcagcatggggaatcgtgtttttccttgctggcggcttccttaccttcgctctcaacatcagcggtgggtttcgctggctctccaatgtgctgaacctgactcccgacagctttaacggaatgttatcctccacaaccgataaaacccaacgtattaatgaaattaagcagattgcatgggttgtgatttcaatagtactggcggctctgtttggttggttaaataaactgcgtacttcaaaaggagatcgccgttgggatgcactggcaaaggctgtgggcaacaatgcttttgagtcactactcatggaggcctcggcgcgccagttccctattatcgcgacactttcatcacgcaaaatctatgtaggtctggtaacttgccctgcgctggaaaatgggttgtcggaacatcttgaaatacttcccctgcttagcggctaccgtaataaagatgatctcacgataagtatcacgactaactaccatcagcactatcttgaaagcggcgtcattggtggaatgtcgcgcttgaatattcaggattttcgtgtgctgatcccaaaagatgaagttgaaactatctcattctttgatactgaagcgtacaataaatttaaagaagatgaagcgcgagacagaaaagactgccgtaagctgggtggcaaaaagccatcaacccgcaggcgaaggactgttgatgatgcggaacagagtagtgcatga

SEQ ID NO: 387786 - DNA, 582 bp, Salmonella enterica
atgactggggaagtaaaagttttttgctgcggtacttatcatccatatcgatacagaggagagcgtaacccaaaagcaggtgatcggctatcacgtgcgatgatggatttgaaggatcataataatcaaaaccacaaaaaagctattcaaacattttcaagtttaattattgatgaattagaacattatattattggaaagaaagagaataaaaaggacttcacttctgtaccgtttgaagtatgtgttgtcccatcgcatgaagagggtaaagtgtcttctgcgttacaaactatagcccagaagatatgtggacattatgaaaatggtaaggttagtcagtcgctacagagaaaaaccactgttccgagcgcacacaaagataacggagatcgctcagtggctaatcatatggcaacgatctcggtagtctcagatgtaaagaataaagtgattttgctgattgatgatgtgacaacaactggcggaagtatgatagcgtgcgtaaatctgttaaaatcaagaggcgcgagaacagttttgccattagcattgttggaaacagcgaattatgaggagtaa

SEQ ID NO: 387787 - DNA, 963 bp, Salmonella enterica
gtgcgcccttcagatctgaagaaatatttaggccttactattcaaacagagaggctaacatcagagcaagggttgttaaaactcattaatagtttacgctttgactctttaagagatattcatgatttggttgagtcagtcaatctaacatcaattttaaaaaataaattaacagttgaaagtttaataaatgctgaaaggtattatgatattcaccgacaatataaaatagaaattatcccatttggtgatgaacgttacccactttctttagcaatgacaccaaacccacctgctatgctttatattagaggtgatgtcaatattcttcatgaaatgccaggcgtagctatcgtcggatctcggcaggtatcgcgtgctggagaggagattacaaagagagtcacttctagaatatgtgagagtgggttagtgatagttagtggtcttgctatcgggactgatacaaatgctcatcaggcatctcttgatgcacatgctaaaacgatcgctgttttagctcatggactcgaattagccaaacctaaacaaaatgccaaactggctagagacattttagagaatggtggggcatggatgtctgaatatccagtaggtcgaccagcatttaaacaatcttttgttcaacgaaatagaatccaagttggattatcggcaacgtccattcttattgaggcagcgaaggatagcggcactatgactcaagcagattttgcgataaaagcaggtagacctatttttgctgttgtacctcataaaataaacaatcccttaggattaaattgcgaaggaaatattcaactggttaataataatcttgccagtcctttaaggactagtgaagattacgatgacttaatggcagttattgcagactcaattaatcgcattgctgaatattcaaaaatatatttaaataatataaatacttctttactttaa

SEQ ID NO: 387788 - DNA, 1026 bp, Salmonella enterica
atgggaaagagtaagaagaaccgcgctgcgtcgacgaaacagatccagcataaaagccagacttcagccgaagcattcagcttcggtgatcccgttcctgttctggaccgccgcgaactgctggactatgtggaatgcgtgcagatggaccgctggtatgagccgccagtaagctttgacgggctggcgcgaacctaccgtgccgcagtgcatcacagctctcccattgcggtaaaacgcaacattctgaccagcacctttatcccgcatccacttcttagccagcaggcgttcagccggtttgtgcaggactatctggtattcggtaatgcctatctggagaagcgcaccaaccgactcggcggcattctgtcgctggagccatcactggcgaaatacacccgccgcggcgtggatctggatacctactggtttgtgcaatacggcatgaccacgcagccctacgagtttaccaaaggcagcatctttcacctgatggagccggatttaaaccaggagatttacggcctgccggaatatctgtcagccatcccttccgccctgctgaatgagtccgcaacactgttccgccggaagtactacattaacggcagccacgcaggcttcatcatgtatatgactgacgccgcgcagaaccaggaggacgtgaacaacatccgccaggccatgaaaagcgccaaaggtccgggtaacttccgcaacctgtttatgtactcacccaacggcaaaaaggatggaattcagatcatcccactgtcagaggtggcggcaaaggatgagtttctgaatatcaagaacgtaagccgtgatgacatgatggcggcgcaccgcgtgccgcctcagatgatggggattatgccgagcaatgttggggggtttggggatgtggagaaggctagtcgcgtttttgtccgcaacgagctgatgccgctgcagaagcggctacaggagctaaatgaatggttcggacaacagataattagttttgatagttatgagctataa

SEQ ID NO: 387789 - DNA, 1446 bp, Salmonella enterica
gtgaatacgtatgaatcaattaaagttacttttttttatgaccacaacccaattactattaataacgataatataaaaacagaaaacagtatcgaaatgacttgcaatgttactgtcaacaataaagaaagctgggataggattcagataaagacctatagtaaaaaaaccatcaagctttatggaaaaaataatttagacattgaattttgcactcattatgtaaatggtgatattcgctcagtgataaaactaatcgattgtagaatagaaaatatcgccgaccgtcactcaggaaaaactcaatactatacatttaacatcattcccaatgaagtcattataaataataaagcacataatacgccggatacggaaataacattctacaacagtgaccatcaactactttcccctaacattcagtacaatttatcttcggatggtaacatcactcttacaaagtcagagcctattattgttaaacttaacaataacgaagatataaaattagatatcgaatcaaaactagaacgcaatgaaaaatttgaaatcagcacaaaacaaatcctaaaaataaagtccaataattctaatttaaccattgatgatgtaagaaataactacattgacaaaattgacgcatttaatgatatcttatcatttatcaatagtaacaaagtagtttgtcgttactggaacctaaaatctaatgatggtgtatatacagtttttcgctgtaggataaaaaatcctattaaggataccaaaaaagaacacttaatgatgccattacaagccaaagaaaatattgaaaatatgtttcacacatatttgtcatcccattacagacagaacatccgattagctattaatgttctcaatgcatcaaaccaatatcttgagtctcgatatctttcacttttccaatcttttgaatctattatcttaactcataaagaaaaaaacaatacgaccttcattctatgtgaaagcgagtttaaatcattaagacaaacaattgaaagagtcatcaccaaggacgttatcaaagattcaacaactagaggaaaaataaaaagcaaactaggagaactgaatagaatatcattaaaagatgccacacaagaatttcttaaagaatatttaatccatactcatgacttatggccattgtttaatgaatctggtaagctaggactttctgaaatcagaaatataattatacatggtgtaattataccaagtaacaacttgataaacattgctgttgcttgtgaacatttaacaatatatctaatcagattaattctatgccttcttggatgcgatcaccgtgaaacaatatattctgaagagtatttgaactttaattcaaaagtaaatgattttgccttttgggaacatcatcgaaaatctttaacagaggcacttaaaactcattaa

SEQ ID NO: 387790 - DNA, 357 bp, Salmonella enterica
gtggcaatcaataaggatgcgtcgaaaataaatcctgaagggcgcagcgttgttgaattaccggatattactgctaatcgcagggtggatgtatcaggacgctggatttttaatggtgagcaggtgagtaaacgcatttattcgccggaggagctacgccagcaggcagaagcgaaaaaactgaagttactcgaagaagccgaagcctttattacgccactggcacgtgcagtaaagctgggtatcgcaaccgatgcggagcagcagcgactggtggcatgggaacaatacagcgttctggttaatcgggtggacacatcaaaacctgactggccggataagccagccagtcagtag

SEQ ID NO: 387791 - DNA, 324 bp, Salmonella enterica
atgctgctttcaatggatgaaatcaaggcacagctcaggctggacgaagatttcaccgatgaagatagtctgctggcgctactgggtcaggcagtgcagagccggacggaaaatttcctcaaccgcaggctttatgcaacggctgccgatataccagaagacgatcctgatggtctggtgataccggatgaagtcaggctggcgctattgctgctggtcacccacttctacgagaaccgctcaacggtcaccgaagtggagaaagtcgaactgccaatgagctttaactggctggttgggccttacaggtatattccgctatga

SEQ ID NO: 387792 - DNA, 519 bp, Salmonella enterica
atgacagcggtctttgattttgttgaggcccggtggaaaacaatcattgcattgctgctgttggcaggcgcgtttatcgccggcaacgtctggagtgacaggggctggcaaaagaagtgggctgaccgcaatagcgtggaatcttcacaggaagcgaacgcgcagactgccgcccgctggattgaacaagggcgcataattgcccgtgatgaggctgtaaaagatgcacaagcacaagctgctaaatctgctgccactgctgctggcctgtctgccactgttagccagctgcgtaccgaagcaacaaagcttgccacccgcctggacgccgcaaagcacaccgcagatcttgccgctgccgtcagaagcaaaacaaccgacgccaccgccggaatgcttgccgacatgctcggagatattgcagcagaagctaaacgatatgctgcaatcgctgacgaacgctaccaggcaggaatgacgtgtgagcgtatttacaactcggtgagagtcaaccaataa

SEQ ID NO: 387793 - DNA, 624 bp, Salmonella enterica
atgccgggaacgatttcattttcacctcgtagcatttattttcatataacaacggacaaatataatacttctcctgcaaaagacaaccctcctgttgaggatgggggaatttccaatatattttcagttaatattctcaccaaagaggaaccctatttttccgttaaaagagacaaatgtctgaatttaaatggccaggtaaacgatacaatttcttcgatcccgatatattgtcgacatattgctttattttggatggcgtgttttaatgaaattggggggcggattgattatcagcaattcacttccagggatgctatcggtagtcatatttctgttgaagaatcagagagagtgtatcagtctccaggggcaattcactttgttgaggatgaaaactgggggagtgctatttttgatatctttaatgaaatgaaaaatcatggtgataaatttaaagcactggaagtaaatacagcaaaccacagcttagtattaggtttaaaaataaaaaataaaccgaatggagatatgtgtgtaatttatctttatgacccgaatcatacagccactcatcagcgcgttgaatacagcatcatcaatcaaaataaaataaaaaattga

SEQ ID NO: 387794 - DNA, 132 bp, Salmonella enterica
gtgatatcattccctgcgggctcccgcatctggctggtcgccagcgtcaccgacatgcgcaacggctttaacggcctggcgtcgcgcgtacagagtgtgctcaatgacgacccgttcagcgggcatctgtga

SEQ ID NO: 387795 - DNA, 237 bp, Salmonella enterica
gtgcgttccagtgagttacgttttgcccgctggagtgagatcgactggcagcagaaattatgggtgatcccggaagaacgggagcagattgagcacgtcaaattttctcatcgcggtacaaaaatgaaaacacagcacatcgttccgctgtccgatcaggctattactgtcttaaaacagattgaggcgctttccggtcatctgtccttcattttccccggcgaatacgcaggataa

SEQ ID NO: 387796 - DNA, 588 bp, Salmonella enterica
atggcattaacagataccgctatccgcaagactaaacccactgaaaaacccttcaaactggcagatagctcaggactgtacctgctgatcaaacccaacggctcgaaactctggtacatgaagtaccgcattgacagaaaagagaaaaagctggactttggtccttaccctgatgtgtctctattcaaagcgcgacagttacgtgatgccgcgcgtgcgaaaatacgtgaaggggtcgatccctccgctgacaagaaaatcgcacaacaaaaaaagaaaaacggacatatctttcgccagatagccatgaactggcatggtgagcataagcgctggtctgcacattatgcgacaaccatccagcgcaggctggaaatgtatgttttcccggatatcggggacagccttatcgatcaaatcaccacggaaacgctgttattcactctgcgcaaagtggaaaacaaaggctttctggaaatcactacacggctgaaaaactacgtcacggagatcatgcgctatgcggttaagaaacagttaatcaaacccggcgctggatctggatggcgaatttaccccgctggataa

SEQ ID NO: 387797 - DNA, 1146 bp, Salmonella enterica
atgaagtaccgcatcgacggcaaagagaaaaagctggccttcggcccctacccggacatttctctgtttaaggcgcgacagttgcgtgacgccgcacgagcgagagtacgtgaaggagtcgatccctccgctgacaagaaaatcgcacagcagaaaaagaaaaacggccatacgttccgccagatcgccatgaactggcatggtgagcacaaacgctggtctgcgcattatgcaaacaccatccagcgcaggctggaaatgtatgttttcccggatatcggggactgccttatcgatcagatcaccacggagacgctgttattcaccctgcgtaaagtggagaacaaaggctttctggaaatcactgcgcgactgaaaaattatgtcaccgaaatcatgcgctatgcggtgaagaaacagttaatcaaatcaaacccggcgctggatctggacggtgagtttaccccgccggaaaccagccattacccggccctgccgctggataagttgcctgaacttttatcccgcacagacagttactgcggcagactgctgacccgatacgcgcttaaactgtcgctgctgttcttcgtgcgttccagtgagttacgctttgcccgctggagtgagatcgactggcagcagaaattatgggtgatcccggaagaacgggagcagattgagaacgtcaaattttcccatcgcggtacaaaaatgaaaacacagcacatcgttccgctgtccgatcaggctattgctatcttaaaacagattgaggcgctttccggtcatctgtccttcattttccctggcgaatacgatcaggataaatgcatgagcgacaataccgttaacaaggcgctgcgcgtgatgggctacgatactaaaaaagagatctgcggccacggcttccgggcgatggcgtgcagcgccctgagtgagtcgggattgtggagcaaagaagccattgaaaagcagatgagccatcaggaaagaaacagcgtgcgggcggcctatattcataaggctgaatatctggaagaacggatcgcgatgatgcagtggtgggcagattatcttgatgcaaatactggcggatatatttcaccctatcagtttgccagtcggctgaaaaaagtatcgtaa

SEQ ID NO: 387798 - DNA, 333 bp, Salmonella enterica
atggaaaaaccaaatatttatgatcagaaatacatttcaggtataaccagagaacagtctgtatttaaagttaatggatacattaataaaaaggcagaactcactcattatatgcaacgtatgtattcagactctcacgttaattttaaaaccatctccagggatgaagccaacacctctgaaggaagttggttaactgttattacagggaaacgtccaatgggagagttttcagtagatagtctttattcaccagtgttgcattcattgcttgaactaccaaatattggatgtaaaattctccccaaagaggacaatagtttttatatataa

SEQ ID NO: 387799 - DNA, 222 bp, Salmonella enterica
atgacagacaaaccaatgactaatcgcgaacttgttgatgctgctatagagcttgctggtcgattttacacaatgcagggctactcacatcgggccgggttcagatattgggaatcaccgcatccacaggaacaactggtatttcaaatggcctgtcacgcttttgaatttattcgtggttctgacgtaatggatgccatcgcagagctggaggatgcatga

SEQ ID NO: 387800 - DNA, 312 bp, Salmonella enterica
atgaccactattaccaaagaacgcctgcttaaaatccagcagtggcgcgaaacatatggcgctggtagcaacgttatactgccggcagaagaagcggaagagctggcgcgtattgcgctggcatcgcgggacgctgataaaccagaattaaaaatcgctgagcttattaataaattctacgagcgctacccgcttgcatcattcaataaagatacagatagagccgaggcgttaggttatttcctggctggcgctgaattgcagtgttttggtgagtttattaaatacgaggaattgttcggagatgaataa

SEQ ID NO: 387801 - DNA, 582 bp, Salmonella enterica
atgaataacaaactaacagacgaacgcgtttcaaatgcaacactgattcggctcattcagtgggctgatcagcacaatagccattatgttgcagcagccctgtgtgagctacaggaacgccgccaggctgatagcgctgagccagcatgttacgcgctaacgaatatggctggcgaggtctataacactcactcgtcagcgcaaaacgcaggggcgtaccgcgatttaattcaccagagcgacgactctctaacactgagagttacaccgctatacgccgccccgccagcgtcggtaacaggcatttacgatgatgttctcaatattattggcctgctggaaaacaacgaatgggccgagcattgtacgagcacagttttaggctcactcctggaatcagaaataacgcgtttggttagtaaagagcagccggcgccggtagtgccgcccgccattgagccagattacaaggtcattaaaagtattctgcccacggccaaccctgatgaatatgcgtgctgcattgctgctgacatgtggaacgcctgccgctccgccatgctcaatggaggtaaatcgtga

SEQ ID NO: 387802 - DNA, 363 bp, Salmonella enterica
gtgaaagagaatcaaatccgagaactggtaaacgagctgcgtgatattgctgttgagtatcacggcacacaacagttacgtgaacgaattgcacgcacagttcgcgcagcgataattcaggctggcaactctccggcaattccggatgattgggtaagctgtagcgagcggatgccggaagaggagcaagaagtaattgtccagaacaagtttggataccgttatgtttcatatttcgatgagcattctggactgttttttaacatgcctggcggtaatcagatgaactgcattgagcatatcttggttacgcactggatgccactgccagcagcaccgcaacaggggacaactaatttatga

SEQ ID NO: 387803 - DNA, 570 bp, Salmonella enterica
atgaataacttgatgatcgaccttgaaactatgggtaaaaaacctaacgcacctgttgtctccatcggtactgtgttcttcgatccgcaaagtggtgaaattggacctgagttctataccgccgttagccttgaaagcgcaatggagcaaggtaccatccctgatggcgataccattctgtggtggatgagacaaagcccagaagcgcgggcggctatttgcgttgatgccatgcctattccggcggcattatctgaactgactcatttcatcgggcgccacgcagataacataaagtacacgaaggtttggggtaacggggctacattcgacaacgtaaatttacgcggtacttatgaacgtgccggaaaaatctgcccgtggctattttggaatgatcacgatgtgagaacactggttactctaggtcgttcgattggtttcgatcctaaaaaagatatgccatttataggtgaacagcataacacactagccgatgcccgccaccaggctaaatatgtttcggctatctggcaaaggctgactccagccaccagcagcaatatctga

SEQ ID NO: 387804 - DNA, 210 bp, Salmonella enterica
atggccaagttgatgaaggcgagcctgtggggaaagagagaatttgaacccggctcaattcctgacaacagaactattaagcgctggattgagaacggccaccttctggggcgtatcgtggatggaacgatcctcgtatattcctcggagaagtggggcgtggactcactggtaagcgaaaaggttcgtcagttaattcaagaggattaa

SEQ ID NO: 387805 - DNA, 1185 bp, Salmonella enterica
atggccgcaagacctcgtaaaagggagaacagaaatctccctgattatctgctttttgataaagcaactggaaaatacagattcaccctgattacaggaaaaaggaaaagcctcggctcggatcgtgtaatggctatagctattgccaaagaatataatctacgaatgcgtccagaaagaatcccatccattgagaatctggtcagagagtccggtggaataaatggcgaggccaaaccattttctcaatatgcgcaatctattcttgagagagctattaaggatgaaaatcccagccctgacactttggctatgtggttaaatgacatcgctcgggtaaaagagtttttcgttgacatttactcatgtgatatagaattagaacatgtcaatgcatacataaaaaaatatcacaatgaagcatctgcaaacgttcagaacagaaaggttagctttcttaaaaaactattcagttatgcagtggatgaatcattaatgatggataatccggcagaacgtaaaaaaatgcgtagagttgataaaaagatcagacgtcgactttctattgatgactatttaaaaattcatagagccgctcctctttggatgaaaacagcaatggatctcgctcttcagacgacacatgcacgcctggaagtttcccggattcgctattcaattaaacatcctgctgagggtgtttgtggttgtgtatggttcgacgaaccaaaaggagatatttacggtaccctctatattcaccgtcaaaaagtgcagcataaagaggcgtcacacgtcgcaattcctgttggtccagtactgaaagaaattattgaacgcagcagggataatgtagcgagcccatatgttgtgcatcgtttaccgttaaaacgcagtaaccccaccagcaaagaagtaaaacacccaacccaggttgctcccgattatctgagtagatcattttcagcattgagggatcaggttggtgtgggtgcggccttaccagagaaccaaaggccaacgtttcatgaaataagggcgctttctgccttcatgtttaataaacaaggaatagatccacaaggacgaatggcgcatagtgatgcgaagtccacgaagatatacacagaaaatcacatcgattgggtttacgttccacacggtgagataaaaacagcatcttag

SEQ ID NO: 387806 - DNA, 168 bp, Salmonella enterica
atgcacaagcataagccgctacatctgctgctggtctgtccgccattgttaagcagcggcgcaccgaagcaacaaaacttgccactcgcctggacgccgcagctcttgccgcttccgtcagaagcaaaacagccggagctgatgccgcaatgcctggaagtattgtag

SEQ ID NO: 387807 - DNA, 219 bp, Salmonella enterica
atgcagaaatcggattcaactaatgaatatgataatttctttgttcttcgaggggctttgtatgctaacaaaaaattcacatatagtgtaatccatactggaaaaacttaccctgcggttgacgttacagagtcatcaatttatgtaaatgctaaaatgttaggggaaagtataaccaaagaggagttggaacagtatggtatttggaataaaaagtaa

SEQ ID NO: 387808 - DNA, 363 bp, Salmonella enterica
atggtatttggaataaaaagtaaaataattttaaaaatatttattttcatttgttcggtcattataatgataggatcgtattctttagtctcacttatatacaaaaacttatttactatatcttctcacaaaagtgctggaatggtttttgtatcatttttttttatatttatagctgcgccagtttttttattctctttttttacttcagtaaaaataaccatgactgcattcgtattgggtttgatgtacttattttatgagtggttcttagtacatcccctccgtgttgctcttatggggtgctgtttttcaattggatatatatttgcgctaaaagtgaataaatatttcactcgttag

SEQ ID NO: 387809 - DNA, 783 bp, Salmonella enterica
atgaaagcagctcattttaaacggaagcatttacttgaaaagtatccattaactaaagttgatattgtaacggttctctcaccagatgattttaactcggtgtggaaggatattcatattaagaccactgaaaaaactaaaggtgagattcctgtatatgaactttatgaggttcactttttaggtcatggtgcacctgaacaactgtatttaaaaggggttagttatacagtagatatggtaaaaaaattgaaggtattaccgtggcataaggagtatggcatactggtattgcatgcttgccgaacgggaaggatgcaggagtatgaaaagggcgagtacgatgaaaatgcaaagtgtattgctgctgagttttcaaagattcagaagacaagagtgatagggcaaatggtacatgcaacgttctgtgttgaacattcaaatacaattcagacaggtattaaattagtgcgagatcaggaaggacatactgtttggttaccgacgtatagaacatttaaagataaggttggtttcaagtaccgtgattgcagttttgctaattttgacgatatcgatatcgtcagcgaagataacgttgttttatggggatataaagcaggaagtaatgtagataaattatacagcacggataaggaatatgggaggctttctgatttgcaagtatggccttgtcggttgtttgttaatggtgtatcgcaggatgaacagcgtattgttgaagcggataaatttaacgccaacgatttagagtacatgtga

SEQ ID NO: 387810 - DNA, 237 bp, Salmonella enterica
atgatggataataagcgtacgcttaaaataatttcctatacagggctaatctttatcatttgttggttttatctatctgactatttaagatgtaaagactttagtattaaaccatctcttctcccacaaaatgaattgtggaccatccagcaagcgcaaagtatagaggataaaataacaccttatggttatcatcagatagaagacggtgtggcattattagcattaataaagtag

SEQ ID NO: 387811 - DNA, 285 bp, Salmonella enterica
atggtattggagcaaaaaaacaacgaagaagcctatgtttgggggcggatggcggtttttgcatttgatgaatatcagaaacgaaaagatagtgtttttttaagagataaaacctatataatatttcgggagcaagttattaatcatgcaacagaagaaattcagaatgagataacagaaccgcatgacttaaataatgtagtgaataaatattttcatgagataataactttggattattatcaatggaagaatgatattgaaccagtgccaccaaagccataa

SEQ ID NO: 387812 - DNA, 285 bp, Salmonella enterica
atgcccacagcagcccggctcagtgataaaggcacgcagcacgacggttattacgagaccatgattactgcgggttcacccacggtatttattgacggcctgcccgccgcccggatgggtgacccgctgacgccgcattcaaaaccggagcatccgccccatccgcgcaagatagcgggcggctcctctacggtatttatcgacgggctgccagcggccagaaccggcgatgcggtggactgcggcggcgtggtcatcggtggcggcacggtgaatataggctga

SEQ ID NO: 387813 - DNA, 867 bp, Salmonella enterica
atgttgtttgaagataaaatatataatatggataactataaaagtcaaatacaaaaatacgcattatgctgtgatgacttcaacgatggtgtgtatagaagcccaaaagaaaaggcgctattaaaaaaatacataggatttaataacagatcgtttgtgaatggctttgttttcgacatagaccatgataatggcgcgatcgcatgggatcttgtaggtttaccgaagcccaacacgataatacagaatacaaaaaatggtcatgcgcatttgctctatgccctaaaaagtccagttctgaaaacagactcggcaagaataaaacctttaaaactggcatccattgttcaatgtggctttacagagaggttaaatgctgacagggcatatgcagatattttaatgaaaaatccattaaatacgcacaaatggcgcacgacatggacagatactaaagcatacgatttagattatttagcagagtttgttcccgatacaataaaaacaaaaagtaaattgaagggtgaaatatacggattaggtcgtaatgttaatttatttgaggatctcagaaagatagcgtataaagatattttgaaatacaagcccaataaaacatatgatgatttttaccacgcaatgttttcaatggcaatcatgctgaataaccattgtaatccaacggaaccactatccaacaatgaaataaagcaagtttgccagagtatttgcaaatggacatggagaaatttctcgcaagaacaattttccgctattcaggcaaaacgtggaacaaaaaacacaggaaagaaaaaaaacacaaaagaaaaaatcagattggaaaaagcactggagatattactatga

SEQ ID NO: 387814 - DNA, 1392 bp, Salmonella enterica
gtgcgctatctgccgggccttgagctgcggcggcactggcaggaaaccatcaccggcgataccgtcacctcgcaggaggctactgaagagctgcatgtgataaccacccaggcgggacgcgccggtatccgggtgctgcactggaaaacaggcaaacctgacagcattgataatgaccaggcacgctggcagataagcgataatatttatgcgctggaactggatgcgcagggacaaactatcagtcgcgaagaatattatcccttcggcggcacagcggtgtgggcggcgcgtagtgaactggaaaccagttataaagtgatccgctattccggcaaagagcgtgacggcacgggcttatattactacggctatcgttattacgctccctggctgtgccgctggacagcagccgatccgggccaggaaatcgacgggctgaatttgtaccgcatggtgagaaataatccgctcacgctgacagatgagtcaggcctggcgccaggaggtaactctgcacaaccttccgcgtctgaagaacgttttaaatcacttgtccctacccttataaatattgtcagagagcaaattagtgacgcacgccaggcactggaaggcaatgccagagtggtaccccaaaatagcgggtgggcgtacctacagaatgtatgggagcgatggaatccattgaataacaatccatccagcagcacaaacaagcctaatgagattaacaatgaaaccagatctcttattaaagactatatgggaaatgattcaaaggaaacaataaaaatattaaaagatgccttagagaaaatggatcaggctgcagcggcattaaatgaaaactcattccgtaacattaatgaagatccttatacacccaaaaatgctgcagcatgcgtcggatctaacgaacacattttatatgataccacaaaaaatatcagtatatatatcaattacgaggagacagggaaaagacatttatatgacatcgccacagtaatcattcatgaaatgacccatctcgttttaaaaaccaaagattattgtaattcacaaacagtaccgtttcctggtcaatttgatggaaagagtacgaaaaaattgcggcaatatgccaaccagccgaataacacacctttaacgggggcggataatatagcaaaccttattagtttactttattactcacaagccggcgatacacaaacaaaatctttatatacacgctataaacagagcttgtcgaaatcaggctggcaggagtcattactggattttagcggcgcaatgccagaggtgagctggccacgggtgaattctgctgaaatccagcgacgagtattacccgtctcccgaataaaaccggcatcagcccactaa

SEQ ID NO: 387815 - DNA, 288 bp, Salmonella enterica
atgcgtaaattgatgttagcggcaggtcttgccgtcctgttaacggggtgtggtgatgatggtatctacggcaactatgttagtccgcagtatggcgttaaacttgatattaataaagacgtgattaagttcaaaaacggagtgtttaatgttaaagactgggacgaaagccagaaacctatatatgttgcaaaaacacaaaacaaagatcttggctcgtggtcgttcaggattgagaaggtagatggtggtgttgtatatcaaggcgtaaaatttacgaaggattaa

SEQ ID NO: 387816 - DNA, 492 bp, Salmonella enterica
atgccaatccctccgtatatgtggctcaaagatgacggcggtgcagatattaaaggatctgttgatgttcaagaccgcgacggaagcatagaaattatagggttaagccacggtattaacttacctgtagataatgctaatggcaagatcactggtacgcgccagcattcatctatgatgattgaaaaagaagtagatagctccactccttatctttataaagctgctgctacaggtcagacgctaaaaagtgcggaaatcaggttttatcacattagcgatgcaggacaagaggtttgttattatacggtcttaatggaaaatgtgaaaattacgggcgttaactgtggcgttcctaatgttaaattagctggcaatgataaaatgaatcacgttgaaagcgtcagtttacagtatgaaaaaataacttggcgcattgtggatggcaacatccaatatactgatgcttggaatgaacgagcaacagcctaa

SEQ ID NO: 387817 - DNA, 264 bp, Salmonella enterica
atggctcaaacacttgcccgtagggccgcaaaaacaatattttttattattattatgtttgccgtagctcggattcttggtaatcctgagatctatattaatcacaccctcgcaagtagattagcactgtttattagtggcgatgtaaatgcagagtcgatttatgatgcttatttctatattgatttttcctctgtattaataatcgctacagggatatacattgtagtaatgaaactgatcaataaaataaggaagaaataa

SEQ ID NO: 387818 - DNA, 279 bp, Salmonella enterica
atgcaccgttcaatctttatggtgttggggtgtttatggctttttctggtaatggtatttaccggaacaagggagcctgtggtgccgttaaaggtgatggtccattaccaccgggtaagtactggattgttgagcgtggttctggaggattcttctctaaaaggaaggcagaaattcaggacacatggaacaaaattcgccatggagcagcctttgggcgtgatgaatggttcgctttatacaaggatgattggggtattgatgatggcacttggatag

SEQ ID NO: 387819 - DNA, 462 bp, Salmonella enterica
gtgctggagagcagcagccggataagcctgaaggcgggcggttcatttatcagcatccatgcgggcggggtggatatcatggggccgaagataaacctgaacagcgggggaagtgcggggacgccggtgggggtgatgcggccgggtgtgctggaggtactggcggatgaggatgcaggaggcggagataatggagatcccggtggtgacgctggggataatgatgaggatgaacagaataaatatggtctccagtttcactttacggatgatgatggcattccatatgcaaacactcggtatgttgcatattctgaggatggtacacaatggagaggagccacggatgagaaggggtacacggaaatttttgatacggatactgagcaagaaattaaagtgcagttgttgatttcgggtgattcctatacttcattgggaggacattatggcagggagtaa

SEQ ID NO: 387820 - DNA, 792 bp, Salmonella enterica
atggcagggagtaaaatcaccagcgggaatactaaacctaagtacgaggcatgtgtaaaaccacaagaaattacagataaatttaaaataatgatgcgtaaggcacttaaggcacagaaaatggttctgctaaaaagggccgatgatcttttagtatgggaggacttagaacaagatgattttcataaggtttttaatttcaaaggcaatgaggttataaaaatcaggaaaaacggtgaggatacagggaaacgaatgcaggccagaatggttatgatagatggagttaggagaataatgaaaattgcgaatggactaacaatggatagttttaagaattatactgggtgtggtaaatttgctgcttttgttgaacctcaattagatcctccttacattgttaatataggaaaaaattttgaatcacgagacgagaaagagaatgcaataacaggggcggattctcatgtgtctacattgtgccatgaaatgtcacatattttttggtactggggcaaccacgatgacggtggaatgtggacccaggattatacagcgattgataaattttcggagggtgatggtgatgaagttagctatgcgaaacatttttcagtagccaatgaattggtaaagcttcataaagatcaactttttgaaaatgcctataatattgaaagatattttcaggtaaaactaagtgatgtcgatattgattcagcagatgaaaataaactatcagatgaagtaaataataaaatatcggaattgggaaaaaaaacagaaatctga

SEQ ID NO: 387821 - DNA, 822 bp, Salmonella enterica
atgagaattaggaagtatatttattattgtgctatattaatggcgtttttaggcttttacttaaataaagttattgcaaacgaaagtatttttattaaaagatatgggtttggttttgagcgaagaagcagtgatggcaagccaatagtttatctaagtaatccttctgttgcagaaggaggtggtgaatataatgattcatctgacgatgttgatgttcggttggctgtgaagcaatctgccgatagtgtactagcttttgtaacttttactaataatagtaatcaattgtattttcttccaaaaatatattaccccatgcgctttgaaaaaataaacggtgagatgtttgatgcattgtgtgataagaaaatatcaatcactacaggtagtgttagtttagattatttaagtggttcttgcccttttgattttgatattagtgagtatgttaaaattaatccaacagaaaaagtttcactacaaataaaactaaatgatatgtacgcgttcttacctggcgagcgagattatttcataaaagtggttaaatataagttagtgaaaagtaaatggtttgtgtttaaatcaattgataagatctttttttctatccttatgaggcaaaatcattgtgataagtacaatcaagaggctatctttaataatgggatagtttgtgatgattatgaatttgatgagcgtatggatttttttattgggcatttcttgaaaaaaaacgataacgaaaattctatttatgtcagttctaatgaggtttctgtgaaagttaatgggagtaaggtaagatctccgtattaa

SEQ ID NO: 387822 - DNA, 720 bp, Salmonella enterica
gtggatatcgccagcgaccagccggatctggcggcgacaaattttctggaaaagaacgcggtactgacgatctggcagggcatggaggcgcaacgttacgtcagcggtattatcaacgaagtgatgcagggggaaaataatcactggcagatgcgttatcatctgacgatagtacctcccctgtggcgttgtggcctgcgtcagaacttccgcatctttcagcagcaggatattcagaccctctcttctaccctgcttaatgaaaatggcgtcacggagtggacgccggtattttatgagagccacccggcgcgggagttctgcgtgcagtacggggaaagtgacctggcattcctgacccgcctgtggtcagaagaaggcatcttctactttgactggcacgcgccacaaggagccgcgcagaaactggtgctgtgtgatgatgtggccggggtatcgacactgggtgagatgccgtttaacccgaacacggatacggaagtctccacgatgtgtatcagtagttttcgttaccgggcgcgaaccgggccttcgtcggtggaaacccaggactacaccttcaaaacgccgggctggccgggttattacaaccgtgccgcagagaacctgaacggtcagcgtacacagtatgaaatctttgattatccgggcggttcaaggacgggacgcatggggaggcatttgcgcgttaccagatag

SEQ ID NO: 387823 - DNA, 444 bp, Salmonella enterica
atggtccccggtggtggtgtgttcctgcctccctcccaccgtcaccctgcggtcatttttcacatacagcccgtcatcgtggctgatacccgccatccggtcgttcgtcaccttcagcgtctggttgttacgtaccgtgatgctacggttatttgccaccgtaatcgtctggtcgtgcccgccttcctttttcgtccccacgctgaccgtctggcctttcaccaccgtgattttctggttatgcccgatgctctccgtgtggtcgtgtctgacttttgtgctccggtcgttcagcacctccgtgtccatgtccttctgcgcatggatatacacctgctcctggtccgtcgcatcctcgaaccgcagttcgttaaacccgcttcctttataggttttcgagcggatggtcatctgcgtttttgtccccggcagactccccggtga

SEQ ID NO: 387824 - DNA, 225 bp, Salmonella enterica
atgttgctcctgtttgacatgttcagcaagatgtttgagttcctcttttgttttcgcgagttctttttccagttcttctttatcgatattttgagtatgttgattattgatgacatcctggctcaaatgcgtaaggttgacatcctgcagatcaactttatcaagaagtattttccccgaaactgcagtatccgaaaacgtaacgataatacccgatccatttaa

SEQ ID NO: 387825 - DNA, 561 bp, Salmonella enterica
  misc_feature (501)..(510): n is a, c, g, or t
atgaaagatttacagctttcctttttaaaatctggtattcctgatcaggatttagttcaggatgcatcctttttttctgccttatataaatttgctcgccaacatagaattaaacatgtcattacaggttctaattattcgacagaatgttgtcgtgaaccagaggaatggggcgggtatttaggcatcgataccttattatttaatgatattcataaaaaatttggtacgcgacagttaaaatcatttccattagttgatatattagtatacaaactcttctaccagaaaattcttggtatgaaagtgcatcacccacttaacttagttccttttaataaaaagaatgcagaaaatgaactgaaagagaaatttggttggcaacccttccagcataaacatcatgaatctcgttttactcgtttctatgaagattattggttgccacgtagatttggtttcgagaaacgaagagcgcatttttcaagtttaattatgacnnnnnnnnnngaccggtcaaatgaccagggaagaagcattagagagaatttcaaaacctga

SEQ ID NO: 387826 - DNA, 234 bp, Salmonella enterica
atgaccagggaagaagcattagagagaatttcaaaacctgaaatggatgaacattttcttaaacaggaatttgagtatgtagcgcataaactcggtattactgtagatgaattgcaacaactttttgatatgcctaaaaaaacctacagagattacaaaaataaacgttggctaataggtcttggtgcaaacgtgctgcgtactcttggattagaaaaaaggtattttagatga

SEQ ID NO: 387827 - DNA, 423 bp, Salmonella enterica
atgttcaattcatcaatgtatctcccttataccctctttgaacccgtcacacgcttcaacgatgactctgccggtgacatgcaatgtggcgacatgggagaagaagagcttctggcgctcggcctggatgacatatcagaaaaagtcgatccttatcgccttattcattacccttttcctcatcccggagggatagatggatattttggctcatccacctccggaataaaaatatcgcacagtgagtgtgttgatattttatttacggaaatgaaagaacttgcagggatgttttcattttatggtgaatatagattcttgattgaagagcttatcgggcatttcagatatggaaatggtagccttttttacagccagccattgaattccgcctttcataaaagaataaatataaaaacataa

SEQ ID NO: 387828 - DNA, 477 bp, Salmonella enterica
atgaagaataaatgcggaaaaatagcgctgtgtttatttttgttggctggcgcttataatttatggaccctgcgtccggttaaagttctgtatgcctattcagattttggctcgacagtttttctggttgtggatcatctgccgtggactgacagagataaaatcaggtggtacctgacgcaccgggaagaatttaagaggaaataccctttactggatcaggactggtttcgttattatgttatagatattggcaacggctttactaatgctaaagattatcacgatgggccatatgaagatttatattgctttccaaccattaaggatgatgctgattgtatcgtgaaagattacttattaatcgttgatgagtatcctgataggaatactcgttttggtgtaaccgttattgatggcgagcttgagtaccagttaacgcccgagaaacaaatagagagagttttctatccataa

SEQ ID NO: 387829 - DNA, 7692 bp, Salmonella enterica
atgaacaaaatatacaaactcaaattcgacaagcgacggaatgagctggtggtggtcagtgaaattaccgtgggaatggggaaagaaaaaagcacaggtcaccttgctgacctgacagcgctttctccgttcagaaaacttctgggcaccctgacaccgcaggcatttctgaccgggctggttatcagcctgttcccggggatgtcactggcggcaggtctgccgacaggtggtcaggttgtgggggggcaggggagtatcagcacctccggtaatcagatgaccattcatcagcagacacagaacatggccacgaactggcaaagttttaatatcggtaaaaataacaccgtgcagttcgtgcagcctgacagcagttcggtggccctgaaccgggtgacgggggccagcggctcacagattatggggaccctgaaggccaacggtcaggtgttcattcttaaccccaacggcgtgttgttcggaaaagatgcccgtgtgaatgttgcgggcctggtggcctccacgaagaacattaacaccgcggactttatgaaggggcaatacacgctcagcggtgagggtaatcctggtgcacaggtgattaaccagggcagtctgaccaccacgaagggggggtatattgtgctggccggcgagcgggtcagcaacagtggctctgtcagtgcgccgtcagggaaggtgatgctggcggccggcaaaacggtcaccctgcagctggataacggtggtctgacgtcggtgtcggtggatggcagtgtggtgaatgctctggtggagaaccgcgggctgatatctgccacggacggtcgggtgtatctgacggcaaaaggtcagaacatgttgctgaatacggtggtgaacaacagcggcactgttgaggcaaaagggctggcgagccggggcggcgagatagttctcgacggtggcgacagcggagtggtgagccagtccggtcagttgctggctgacagccagaccggtcagggcggaaaaatcactctggaaggtcagaatattcacctggcagcgaacagtctgacctcgacgaccggtaagaccggcggtggtgaggtgtttgtgggcggtggctggcagggtaaggacagccgcatcaaaaatgcgtcaaaagtggtgatggataaagctgccacggttgatgtctccgcaacggacaccggtgacggtggtactgccgtgctgtggtctgatgactacacgaacttccgggggaccattctggcccggggtggcgcacagtcaggtaatggcggacaggtggaaacctcctcgcacaacaaccttcaggccttcggtgcggtggatgcgtcagcacagtccggtcatggtggtgactggcttctggatccgacagatgtgaccatcgtcagcgctggcgatgatatcactgataatacgaatatcactgagaccggtaaaggaacggcgcagtcgctggatacggacactgaccacattttctctccttctgccagtggcgctcaaatcctcaataccagtattgaaaaccagctgaataacgggacgaatgttaccgtcagaaccagcggcacggacacggaaggtgagtcaggtaatatcacggttaatgcgaatattacaaagtcagtcggggatggcacggcatctctgaccctgttggcggataataacatctcgacggctaaccacaccagtataggggctgagtctggaaagctgaacctcaatttactggcgggcaacatgacaaataatgcctccatcagtttaggccgtgacatcaatatctcgctcaacgggggtgactttctggcagatgccggtaatgcggataatgacatctcattaacgtacaaaaataatggcaaaattgatgcggggaatgtgaccctgaatgtgtcccgggggcttagcggatatgcctatagtgttattgcagccaataacctgatgataaacggtccggtgagcggcaggacgggctggggcgcgacgctgaatttttctgcaggtggcttgttggagatgaactctacgggaggcatatcgttgtctgcctccgagacctctaatggtggtggaaaagtggtgattagaggtgataaaggtgtcaggctggatgcctccactggagatattttgctgaaagccgcttctgtagaaaccaatagcgtcaccctgagcagctctgcgggtgccgtcagcgtgacggcgcagggcggcgatttcctgctgggtgcgggtaacatttcagctgcaaatgacatcaccctgaatgccagcggtaaggccaacctgaccaacggtacactgagtagctctgcgggcaatatttcagtcagcgctgtatccacaacatcagcagatggtatttctctgaccggaggaaatgtttcagcactcaacggtactgtcacattacagggttcatctgccacaggtaccggcgttcgtgtcagtaatgcaaccgtcggtgcgcagaaagccgttatcagtggtagcagctcgacaggtcatggcttcagtctgaccgacaccaccctgcagggtgatctgtctgacctgatgaacgtcaccctgagctcaaaaggctccggtgcgggggcaaccaacattcttgacagcagtgtggttaatacctctaaccgcgataccctgctgaacatgacgattgagaacctcacctcagtcgatatgaatggtacggcaatttacaataacgccaccgcatggaacaaatcttacgagacggcggagaatccgaacgctggctggatatttgaaaacaccagtgttaatgccaccagtgcagacctcaaaggggtggggttcattaatgctgctattaatataagcaatggctccctgaacattaccaataatggtgcagcggttctgagaaacagtaccgttaatgtatctgccggtaatatcagcattgtgtccggtgaaggccaggtaaacctgaccagcaccaccctgaacagctctgcgggtgccgttaatgtgacggcgaagggcggtaatttaactctgggcacgggtaacatttcagctgtaaataacatcaccctgaacgccgcagcaggtgtgctcagtatcggggctgcaaatctgacgagtgttaatggcagcatcgacatgcacggtgtggctgccggaagtggtacaggtattgccattaccggctcgtcgtcggataaggcaaacatcagtgccgtgaacggaacggtcagccttaacgggacgtctgtttcaggcagtggcctgaagctggataatgttgaactgaatgcctctaatgccgttttcacgggcagtagcagcaattctggcactggcttcagtctgacgaatgtcaccctgggcggtaacctgactgacctgaagaacgtcaccctgagctcagcgggttccggggcatccgtcaccaacattctggacaatacggtcgttaacgccactaaccgcgatacgttgctgaacatgtcggttgagaacatgactcagattgacatgaacggggatgcggcctttaacggtactgctgcgtgggagaaggactacggtaaagccaataatccgtatagcggctggatattcaataatacgaccatcaatgcgacttctgtgaacttatccggtgtcgggtttgtgaactccgtcctgaacatcagcactggcggactggatattcacaacaacggttcagtaatactgacgaataatactgtcaacgttactgacggtaatgtgaatttaacctcccgtgacgggagcatcacactctccggtggcaatatcactgcttcttccggcaatatcagtattaatggcaatgcgtcggtgtctgtcagtaaaacgaagctgaatggtaaagatattgatatccgtacaccgaacggaacggtcagcataacgggtacggacgctgcaaaccgtgctgtgcttaatgcgacgggtaatatcaccattgacggaaaccagagtactgccggttcagggtatgcggtaatactgaatcaggctaacctgtccagtgctgacggacacgtgactgtcacgggatataacagcggctccggggcgacggggggggtcagcctgactaatgctaatatcacctcaacgaatggttccggtattacggttaatggtacgacaacctcgacgtccggatctgcgctttcaggcattatgaacaatggaggcgtgaatattaccgcgaatgccgaaagtagtaatatttccatgaatgggaacagaaattccaccttatatacttatgattataacgagcatcattatggcggcatgaactggaacggcaataatacggtttccgctgctgatatatatgtgcatggtcatgacaccgttggcggcggcattatgttcggtgactatacggtttatgcttccagaggaggagcccagactaatatcacttttaacggaaatgcaactattaaaggggatggaggagcatatggtattttcatggctaacaggaactcttatgttagcagtccatccagtctgacatttactaatgggaatagtgatctgatcgcaaatggggtcaatggaatttactcccagggggttggggctgcctacggcggaggacaggtgcgctctgcattcagatatatacttaataacgccacgctgaatgtgtcgtccaccagtacgaatgggggatttggtaaatccaatcttaatctgacctttcagggacaggggaatgtcagtatcacaggtaacagctccggctctaatgcgggtattgataccagtatcctgaacaccaacagtcttaatggttcactgagcctgaccggaacttcggccagtggtattggtgtactggttgcgccggacaaaagttacaataatgtgactattacgggaacctcaggtacgggaaatggtgttgttatccagaataatgtgactatttctggaggtcaggttaacggaacatcaggctcagccagtggtggtggagcaggtgttgtggttaatggtcagacccacggatttactaatgttgcgattgtcggtcagtctgctggttccggtcacggtgttgctgtcaacagtatctccggggaaaacgtgacaatctgtggtacatcaacgggttccggcaatggtgtgcaactgaacaacagtgtgatcagcggtgtggatattacgggttctgctgataacggcaacgggatcggtgtcgctggtaacgatgtgacattgtcgggtacgaccctgagtggttcttctgataacggaagtggtgtggtactgaacagcgctgtctctactgataacaatacggtggttacaggaaactccgccagtggtagcggggtggttgtcagcgccggtgtttctggtgctgtcgttaatggtacttcagaggccggttccggtgtggttcttgacggtggtgacgtcagtaatgccattctgcagggggtatccactacggggagtggtgttgagatcgccggcaatgtcagccttgatgacgtatcagctgaagctgtttcgggaacctccacagagggtaacgggctgcttctgagcgacggggccagcgtgggtattaccggattccttacatcggatcctgtcactgccccggttgagttaggtggctcttcagttaacggaagcggtgtggccacctccggtaacgtcagcatcagtggggtggttctgaacggttcagcaaccacggatgagggcgtcggggtcacgcttggtggcaacctgacgattgccgataatatttcgggggttaacgcttccgcgacaggtaacggaacggctctggttctcgataatgccactatcaacgcgagtggctacggcgataatttcagtatcgacgcaaccgtaacaggggatggcactgcaatcagtacgaccggagagaatacccttacctcagttgtcctgaatggtacgggaatcggaaatggctctgctgtcgttattaacggaacgttgtcaacagacaaagagattatcgccacttcacagggagcaaacggtacggggctggagctgagtggcggcacactgaccggaaccgcatcagacggctcaccggtaaatatcactgtcaaggccggcgacacaggtaccgtcgtccatgtgtctgacggtgacagtgaactgagcaatgttaacctgaatgcgggcgtgaataatggtacgactctggatgtgtcgggcaacctgaccagcaatgttgatatcactgtatccacaggtaatggtaccgcgctgaacttcagcggcggcagtattcagggtacagatgaggccatcgtcaacgtgaatgcctccgcgacgggtgatagtggcagtgctgttaaggttgaagagggtcagaccggcgggctgaataacgtgaacctcagtgcttcggcgacagcgggggatgcggtgagtgttgccggcacactgaacacggaagacgcagacatcactacccaggtgagcggaaacggtacggcactgaatgtgaatggcggcacaatccagtctgccggtaacacgacggtgaacgccacagcagccaccggacagtctgtcgtgatgaataatggtacgttgaacggtgacagtgagggcgacctgaccgtcagtgccaccacagaaaccggcgatcctgcggtgaacatcagtggtaacagtgaagtgaccaacagtcagatcagcggtcagaataacggcagtggcagtgccgtcgtgatatcgggggctctgacatcggacggcggtggtgaaatcacagggcagacggttaatggttcagctgttgaagtcatggaaaatacctcggccaccggtattacgctgacaggtaactccacgggcagtggtaccggcgtgacggtcagcggtgagaacaccacgctgactgacaccacggtgaacggcaacacggccgacggcaccggtgtgaaggtgacgggcagcctgaccagtgaaggcagcacgacggtgaacggtaactcaaccggcaccggcagcggcgtggatgtgtcgggtgacgtgacgggcggcagcatcaacggcagcgccacgggcagtggtgccgggatctggtttaacgacacggccgttttgtcgggtacgacagtgtcgggctcctcacaaagtggtgccggtatcagtagcgagggaaatgtgcaactgaataatgttcagctgcaggcgtcatcggtatctggtccggatctcagtatttcaggctccctgtcgtacgatcgcggaacgaaaattgaggcgtcaaccatttccggacgtgaaaacatacagagtgaaaccgcattaccgttaccggcacttcgtcagggcgcggtaaatgcagatatttcgcggatgaaccagcctgagctggacggattccatgatgcggggacacctgcgattccggtaaaagaatatcgggcgttaccgcgtgatgtgaatatcagcgtatgttccggaagtgactgtgagtcattttctctcagcagttctcttttcggaaatacaaagaataagcatgtattaagaatggatgcgtatttatctgatggaggtagcgttaaatgtgagggggaacactgtatttatattcctgcacaatcgtcagaagagaaaaagtag

SEQ ID NO: 387830 - DNA, 267 bp, Salmonella enterica
atgtttgccgatgaaagtaccgtgatggaattacttatttatgcaggccaggcccgctctgatgctatggaagctatcgccgcttctcgtcgtaaagaatgggataccgctaattcattaatgcttagttcagaagcggcgtgccgtgaagcacataaaatccagacggcattaatcggtttggatgaagggactggaaaagtaacggtaaatcttatatctgtctcttatacacatctgacgctgccgacgatatgcagtgtgtag

SEQ ID NO: 387831 - DNA, 357 bp, Salmonella enterica
atgcaggttcatatcgacaatggtcgcatcggtcaggcgggtggtgaaatagtgttcctgtttgccttcaacagacgtacgccaccagtgcatttccactttcggcagcatttcaccggacgccagcgcgttgtacatcagcgggacggccttgttcagcgccacggtgaagatgaacggcttgtgggcgcgctggccgcttggctgaccggactgcgggtcggtcgggacggtcacgttatgcagaaattcctgcaccagcatctcgtcttcatggccctgcacgtagatgttgccgacagaatcagcggtgaacgcaccggctgtgatatttccctgggtctgacctgtaattga

SEQ ID NO: 387832 - DNA, 798 bp, Salmonella enterica; identical to SEQ ID NO: 387685

SEQ ID NO: 387833 - DNA, 519 bp, Salmonella enterica
atgaaagcaaaacgcattaaatccacagcggcggtttatgttccgcagaataaagacgacgtgattggcgatattaaaaagattggtgacctgcaacgtgagctggagcgcgagcagaccgtgatgaatgacgccattggtgccattactgaaaagcacgcgcccggtattgaagcgctgaaaaaggacatcgacaccctgagtaaaggcgttcagggctggtgtgaagcacaccgtgacgaactgacgcagaacggcaagaccaaaacggccagccttatcaccggtaaggttgagtggcgtaaccgtccgccttctgtgggtattcgtggtgtggaaacagtgcttgaaaccctgcgtcggctggggcttgagcggttcatccgtaccaaagaggaaatcaacaaggatgccatcctgagcgaaccgaaggctgtcgagggtgtggcgggtatcaccgttcgcagtggtgttgaggactttgccattacaccgtttgagcagaatacgggggtctag

SEQ ID NO: 387834 - DNA, 525 bp, Salmonella enterica
atgtttaccctcactcacatccgccagccaggtgtaatcccagacgcctgccgtcgcgctctgcgtggcattaaaccacgtcttgccgccatcaatgctcagacgcaccatgttgacatccgccggcaccgctatctgaaactgcggacgcacgttattggtcagattgtcattggggataccgctgtcgttaatcagctcaatgttgtcgatggtgatgtgggtatcgatggtaactgtcagcggcgcagagtggcgaatattgcccgcttcatctttcaccgttaccgtcagcgtatagtcgccatcggtccacgcgctactggggacaaaacgccactgcccgccagtctgggtcagcgtcacctcctcgcgatgaccgtcgcgcatcacctgcacgataacctcaaccacatcaggatcaatgccgccgatagtaaagccaggcgttttaacgttagtcatattatcgttagcgataccgctatcgttcacgctgtccagcgcgatggtcggcaccgatag

SEQ ID NO: 387835 - DNA, 441 bp, Salmonella enterica
atgagcgccgttatcaatactcaattgcaccgagttcacatccgtcggtacagtgatatgaaactgtggacgcgcctcgttggtcaaattatcgccgggaataccggtgtcattgatgagttcgatgcgattaatggtcgtttgcgtatcgatagtgaccgtcagcggcgcggaatgatttatattccccgccttatcttctaccgtcaccgtcaacgtataatcaccatcgatccaggcggcgcctggcgtaaagcgccactgtccgccagtctgggacagttctatctgctgatgcttaccattgtgcgtcaccgtcaccatgactttggtcacatcagcgtcgatgttaccgagggtaaagcccggtgttttcacgttggtgatattatcgaccgtagcgctatcatccgcgctgtccagcatgatcgtcggttctga

SEQ ID NO: 387836 - DNA, 867 bp, Salmonella enterica; identical to SEQ ID NO: 387131

SEQ ID NO: 387837 - DNA, 321 bp, Salmonella enterica
gtgggcaacctgaaaggcgtcgggcgtatctatcagcagacgttcgttgatacgtactcgaaagtggctcattgcaagctctacgtcactaaaacaccgattacggcggctgatttactgaatgatcgtgtactgccgttttatgagtctcatggcctgccgatgctgaggatactgacagacagaggtacagaatactgcggcaaagtggagcagcatgattaccagctttatctggcgataaatgacattgagcatacgaaaacgaaggcaatgtcaccgcaaacggcatctgcgagcggttccataaaacgatactaa

SEQ ID NO: 387838 - DNA, 123 bp, Salmonella enterica
atgcatcctttttttctgccttatataaatttgctcgccaacatagaattaaacatgtcattacaggttctaattattcgacagaatgttgtcgtgaaccagaggaatggggcgggtatttag

SEQ ID NO: 387839 - DNA, 432 bp, Salmonella enterica
atgccaactattaaatcgcgtatgattagaggtgttaagccgaacgaggaaacgctaaaagaactccaggagcaacttggactttctgaagatacagatatgatgtttatggctctggaagtcgattacgatagaaagaaatactactgctgcctttctggcggaaaaatcgaaaatggtgatgttcacttttcgcttgtcggtagggctgctttagaagtactcatgaatcatccatctccaaatgatacccttaccattcaagagattaaaattggtcctacgccattaaaaaataaggtgaagtccattcttaagaaagctgaagccaattcaaaaatttgttttgtcggagatatgcaaggagagcttgatggcgtccttagtgatgtgtttaacattcagaaagatgaatcatatgcgatccgctga

SEQ ID NO: 387840 - DNA, 519 bp, Salmonella enterica
gtgcgccggactggtggtatagctcagcgtgccctgggcgtgcgcgccgtggctgcgcaccgcctgcagggcggctttcatattgcgcgggtcgttcatggcatcgaagacgcggaacacgtccatgccgtttttcaccgcccgctcaacaaaacgctccaccacatcatcggcgtagtggcgataaccgagcaggttctggccgcgcagcaacatctgcagcggggttttgggcatggcttttttgagttcgcgcaggcgcagccacgggtcttcgccgaggaaacggatacaggcgtcaaaggtggcgccgccccagcactccagcgacccgtagcccacgtcatcgagctgagcggcaatcggcagcatatcgtcaaggcgcaggcgggtggcgaacagggactggtgggcgtcgcgcaggacgacatcggtaatggcaatagtcatggatccctccgtgaattaagggttaaggcggcgatggtggtggatagcggcggcaatcaccggctttaa

SEQ ID NO: 387841 - DNA, 447 bp, Salmonella enterica
gtgattgaaatgtataaatttgatccaaagaatgcattattctatcctgctgcgtcaatttccgattataaattgagcgaagatgaaatcgccacattcactgatattagcgaggaggatgcaaccgagtttttaggattcccgccgactggaaaaatcagagggtcggacggttatggcaatcctgcatgggttgaaatacctccaccatcacatgaggaacttattgaacaggccgaatcagagaggcaattattgattaaccatgccaacgaatacatgaacagtaaacaatggcctggtaaagcggctattggtcgtctgaatggtgaggaactggcgcaatataatttgtggctggattatctgaacgcactggaactggttgatacctccagtgcgccagatattgaatggcctacgcctccggcagttcaggccagatga

SEQ ID NO: 387842 - DNA, 642 bp, Salmonella enterica; identical to SEQ ID NO: 8199

SEQ ID NO: 387843 - DNA, 570 bp, Salmonella enterica
atgaataacttgatgatcgaccttgaaactatgggtaaaaaacctaacgcgcctgttgtctccatcggtactgtgttcttcgatccgcaaagtggtgaaattggacctgagttctataccgccgttagccttgaaagcgcaatggaacaaggtgccgttcctgatggcgataccattctatggtggttaagacaaagcccggaagcgcggtcggctatttgcgttgatgctatgcccattacgacggcattatctgaactgactcagttcatcggacgccacgcggataacatgaagtacatgaaggtttgggggaacggggctacattcgacaacgtcattttacgcggtgcttatgaacgtgccggcaaaatctgcccgtggccattctggaatgatcacgatgtgagaacactggttactctaggtcgttcgattggtttcgatcctaaaaaagatatgccatttataggtgaacagcataacgcactggccgacgcgcgccaccaggcaaaatacgtgtccgcgatatggcagaagctgattccgaccatcagtaacaatctgtaa

SEQ ID NO: 387844 - DNA, 237 bp, Salmonella enterica
atgagcaatattttacagttagcccctaacgagtgggtttgtgaaagcgttcttatcgcggttaccgggctcaaacccggaactatcctccgggccagaaaagagtgctggatggttgggcgggaatatatccacgtatcgcctgacggtaatcctaaaccttccagtgagtgcatgtataacagaaaggctgtagatgcctgggtcgcctcaatgaaaaacaagcagccagggtga

SEQ ID NO: 387845 - DNA, 1314 bp, Salmonella enterica
atggataaaatcacgtatccaacaggcgtcgaaaaccacggtggcagtctgcgcatctggtttaattttaaaggtaagcgtgtcagggaaaacctcggtgtccctgacaccgctaagaacaggaagatcgccggggagctgcggacatcggtgtgttttgccatccgcacaggaacctttgattatgcaatgcaatttcctgactcccctaacctcaaggcttttggtgtaagtaagaaagaaattacagtgaaagaacttgaagaaaaatggctggatctgaaacggatggaaatctgctcgaacgcattcaatcgctatgagtctgtcgcaaggaatgtagtgccgaggatcggaggtaatcgactggtgtcagcagtcaccaaagaggaattgctgtatctcaggaaagatttgctaaccggctaccagaatccaacgaaaggaaaagctcctgcaaaagggcgaagcgtcgttacggtgaattattacatgacgacaattgctggaatgtttcagtttgctgcagatcacggttacatagaagcaaaccccttcgaagggatcaagccttttaaaaaagccagggcagagccagatccgctaactcgtgacgaatttattcgcctgatagatgcatgccgacatcagcagacgaaaaacctgtggtcacttgcagtatacacaggggtacgtcacggggagctgacctccctggcctgggaggatatcgatcttgaagctggaacaataacaatcaggcgtaattatacaaaactgggagaattcactctaccgaaaactgaggcgagcacgaacagggtcatacatcttatccagcctgcgataaacgtcctgaagaatcaggcggaaatgaccaggctaggaaagcggcatcacattgatgttcagctgcgcgagtacggcagaacggagggtcacgaatgtacatttgtcttcaaccctcaactgatcagaagatgtcagcatgttgggttcatctacaaagtcgactcgataggcgatttatgggacgcagcgatgaagcgagcagggataaggcacagaaaagcatatcagtcgcgtcacacgtatgcgtgctggtcactgtcagctggcgctaaccccagcttcattgccagtcagatgggccatgcgagcgcccagatggtcttcaatgtatacggtgcgtggatggcagacagcagtcgtgagcagatcgtaatgctgaatcagcggcttgcggattttgccccacagatgcccaaaagcctacatagcagtaccagagcattattgaaatcagtaagttag

SEQ ID NO: 387846 - DNA, 192 bp, Salmonella enterica; identical to SEQ ID NO: 372562

SEQ ID NO: 387847 - DNA, 474 bp, Salmonella enterica
atgaaacaaatgtcactaattgagatggatggttttctgaaaggtaaatgcatcccacgagatttaaaggttaacgaaacaaacgctgaatatcttgtccgtaagttcggtgaacttgaatcaaaactagaaacggcgttgcgggagtgtcgttctgctggaatcacgattgataaccttgaggccaagtgcgcggcgatggcagcggagaatgcggtgatgaagaagttctgcaaagacgctgcattcgataccgattacgaagcagagctaagtatggagcgtggtggattcagtgatgagcttaacgaaatcaaaaccccagccaccgatgcttttctggctgaagtacgtgcgcagggtgtggagatggctatggagcatatgcagtcgagcggttcgttaacatttggagattgctacatatcacttaacgagttcgccgcagagcttcgcaaaggagtgcagtcatga

SEQ ID NO: 387848 - DNA, 1002 bp, Salmonella enterica
atgaccactattaccaataacaaattaccagaatggcgaacggcgctggataagtgcgtagaaaattatcaatccaccagggcgtggtatgaagaaaaccgagatagcccggcagcgctagatgatatggaaagagcagaagatcagcttgctaactttgtaaggaaatgcggtttcagtatcgtcctgtccttgctggatgaaatagacgagctacaggaactacgccgtaactatctggcgttacgtggtgagattgaggacgtgcagtcgcagttgtacgaggcagaaaaccaggctaacgagtacgccagcgagctacaggaacgccgcaaggctgataaccaagagccagccggataccacgtcatcaaagagtgcggacgggttggctgtagtgttgcaacgcttgaagaagcggagaaaacgcgagatttctggaataaaaagtggactatcaggccgtatttctactccgcagcgccggcgccggtagtgccggaggaaatgccagcaggtctggcgggtcaaattgtcagtctgctggtgcacaatattggcgataagttcctagcacagaaaatctggaacgcctgccacgctgccctgcttcagggtagccaacctgtaagtaattgtgatgagttgcaggtaatcggctggttgcgtagtgattacaacagtgacgacaaacgcgacccgaacgcccccctgtttatgttgggccgcaatgacccgtcagatgcctggggagttaagtacatccagctttctggcaactctccggtaagtccgggtggttggataagctgtagtgagcgaatgccagatgatggtcagcacgtaattattttatgtgatggcgcattcgttctttatgcgcaatatcgagacggtgagttttttgatgtcgtccgcaatggtgaggagttcttcgaaacgcatagccgcaatgtaaccgactggatgccgctgccggaaccgccgcaggaggaaaagtaa

SEQ ID NO: 387849 - DNA, 186 bp, Salmonella enterica
atgcaaccatttgggaaattctattcggttgatggttgtacctgttcgttgtgtcgctcacgaggctacagaaaaggaaacggatatgatgctgaattgagaacctgtaaacatcgagctcgtcagcagagtaagcgactgattgataaggagttaagacagttcgaaagcattcgcgattattga

SEQ ID NO: 387850 - DNA, 198 bp, Salmonella enterica
atgaagaagaatttcagattgcagatggaatgtaatgccaaaactatcgatgaactcaataaagaggttgggcaacttaaatgtgttgttggtttcctgatggctcaacttcctcctgagcgccgagaagcaattatcaataatttaaaagaatacgaactgaatgactcagctaatgaatttaatcagttcctttaa

SEQ ID NO: 387851 - DNA, 213 bp, Salmonella enterica
atgactttagaacaacgtgttgaagctcttgaaaaggccattggaaatattgttacgcaacagtgtactgctgatgggataagcgagatggtgagcaattctgcatctgaagcaactaaaaatgtttgtcgccttgaatgccagcccaagaagcatccggtaggctggcatatcagtgtagttggcgaagccttagttaaaggaactgattaa

SEQ ID NO: 387852 - DNA, 336 bp, Salmonella enterica
atggaaatcttacttatttcaattgttattggtctgatacctgcactgattgcaagtagcaaaggacgctcttttttggggtggtggatttatggggctctgctgttcattgttgccttagtccactctttagttattaaaaaagatgtacagtttgaagaaaaagagaagctggaatttgatggtatgaaaaaatgcccattctgtgctgaattaataaaaaaagaagccatcaaatgcaagcattgtggtagtgatttgttatcaagtgatcatcctacaaaaacagatgaagattaccttgaggaagcccgacgaaaagtctgggaaaaataa

SEQ ID NO: 387853 - DNA, 642 bp, Salmonella enterica
atgaagaagattgtcgcagcaatagcaatgctatgttccatggtgagcacttcaagttttgctagcgaggttagtgcagcccaaagtgcaataaaaaatcagatgaaagatcccgatagtacgaactttaagagtgtcagagagattacaaactctcaaggcgggagatttgtttgcggcgaggttaattcaaaaaactcctacggcggttatgtggggtttaagacttttgcctaccaggggggcagaacagtgattgatggttcgttctccactcctgatgattatgaatttctcgctttatcaggatgtgctgggcctgacgctgaaaaggtagcgcttgcaaacaagcaggcaaagataggatgccagatctcatgggaacaaattacagatgttgttctctttaataaatccgctgaggcatctgctgataacgctatcgctaagataaagttaaaaaatcccaacctagatccgagtgttgctgtaaatatgaaatctcaattcataacttcagtaaatgctatgaaggcagatagctcatttgtggaaagtgttaaaaacaatacaaatgcaactcgagcaatatttatgaaagagtgcataaataacacgtcaaaagcgatttctggaatgtaa

SEQ ID NO: 387854 - DNA, 396 bp, Salmonella enterica
atgcccgttaaaggtatcaagcgcgtccagatgaatacccaccgggtactcagtgacatagctggcatacgcacggagaaggttctctatctggtgatgaatgccggcgccaatcatgccgctgtaattacccccgttaagtcgtcgaccctcataaatagtcagtacaagaagctcgaaccaataccgtcaggaatgattggcagagtgggttacacggctaattatgcagccgcagttaatgctgcaaagggcaagttgaaaggtaagccaaggcctgacggtagcgggaattactgggaccctaacggtgagccggactttctccgtaaaggcttcgagcgagatgggctcaacgagattaaggccatcatcaggcaaggatacaaagtatga

SEQ ID NO: 387855 - DNA, 363 bp, Salmonella enterica
gtgtcagtcacggctaagtggtgttataccaacgtcgccactgtctatcctcgcgtctatgacgactggaacaacacctggacaaacggcaccccatatctgattgactgcacctggacggcgaacaatgaagttgctgttgatgccagtggtaaagagttcaccaccaacctgattttcttcactgagctgaagcgtaatggcgtcaccgcaaacatgccgcagcgagactggtacatcgccagaggtgacaccacggcgctatcagatcctcttaaagccggcgcgaacgttatcagggccgtaaccgactgggatatgtcaccatttggcgaagagccagattacaaaatcatgacgtga

SEQ ID NO: 387856 - DNA, 189 bp, Salmonella enterica
atggcatggatatcggtcaagcagaggcttcctgagcctttcgtaaaggtctgggttatcactggcagcggacggcgggtcactggctacgttaaaagtaacggtgaatggtatttgctgtgccgaaaggtggcagctgagaacccggaggttatccggtgggaggatgatagtgtcagtcacggctaa

SEQ ID NO: 387857 - DNA, 1266 bp, Salmonella enterica
atgcctattcaggtaaacatcaccacgaaggtgaacagccagtctatcaggcgcgaaacatacaacgggcgtgagcacctggtgctgccgagctacacgctgccggcgaacgtcgtaatgaatggcgggctgtacacgcaagagcaaatcgacgcccactataaagggctggaaggcaccctggcaccgcttgggcatcctcaggttaacggtcagtttgtttctgctttctcgcctgaggggattaacgcaggccatatcggcgcgtggaaccgcaacgttaagaagtccggtaatcgcatctacctcgaaaagtgggttgatgtggcccgcgccagcgagtctgaaggtggcagggaactgcttgaacgtgtcgctgccattgagcgcggtgaagacgttccgccgattcataccagtgttgccgcattcctcgaccagcttgagcccaacgatcagcagcgcgccacaggtgctgagtgggtggcagatatccacggtatggaccacgacgcgatcctgctgcacgaagttggagccgctactccggagcagggcgttggcctgatggttaacgctgatctggcgcagccgcttaaggcgaactcaggcgcgctggtgggagaatcctaccgggagcgcgagcagcgcctcgatcgcgcagccaaagcgaagtttgcggcgggcgcggatgaatatgcctgggtggctgatttcactgattctcaggcggtaatcgtcagaaatggcggtactgctgaggtatttggctacaagtcagatggcggcgcaatcaccttcgacgacaccggaacgtcagtcgcacgacaggaatcatgggtggctatcgtcgccaacaaattcaaatctcttttcacaccgcaggagcagcctgcaacaaaccacaaaacggagggcgacatgcctttaaccaaagaagaactggaacaactcggcagcatggttagcgaggccgttgccaccaataccgaaaaagcgatcaagcctctcgcagaaaaggtagatgcgttgcaggccaaccagcagcaattggctgaaactctgactgccaactcccgcgcagaagagaaagccaagcgtgaagcggtggcgaaagttcacggcgagatcgtggctaacgctctttcaggcgaagcactggatgcgatgtttaaaacaatcggtgaatccgcgccgctgggtaccaactctgcgcaacagcagaaagaaaccggtgcacctgccgcatctgaatacttcaaataa

SEQ ID NO: 387858 - DNA, 927 bp, Salmonella enterica
atggtgacgaagagggcaaagccaccgattctgccgcgtaactatcaggatccgaccggagccgatgcgctggaacgccgggcaatgaaagacttctccaggcggatgaataagattggcaaagcgtacaaatcagcactcgacaaaataccttcctccctcgcagtaaacgccagatacgaataccagctaaacccaacgctgctctccatcatcctgaacgatgccagttacctggtagaccaggtgctgcttgatggtaacgaatacgacctgtggttttacgagtacatcgacctggctgctgagaaagggacagggcaagccttctacaacctcagccagcaatcacctgtgtatgcagcgggacgcgagtcactggcggcaatcctcgcgagtgacccgtatcagcaacgtatggcgctggtacatgcgggtgtgtttgaggaaatgaaggggctgagcgctgacgttaagcgcgatatggcgcgcgtgctgactgatggagtggggcgaggtcttaatccgctggatattgccaggaaccttactgcacagactggcatcgagaagcgcagggctaaccgtatagcgcgaaccgaagtgactaccgcgctgcgtcgagccaagtgggatgaagaccaggaggcgaatgacctcttcggcctgaaaacgcttctggttcacatctcggcgctgtcaccgacaacgcgacacacccacgccgtgcgccatgctcacctctacacaaatgaagaggttcgtgaatggtatgcaaaggatgcgaacagtatcaactgcaaatgcagccaacagtcagttctggttgacgacgatggaaggcctcagttcccagacaccattaccaaaatcaaacaagaatataaatcgatgcaggcgcgcggttacgcttgggcggagaaataa

SEQ ID NO: 387859 - DNA, 1350 bp, Salmonella enterica
atgactgacaaattaacactagccgtcaatcacgcgctgaatgacgtcaggcttgctcgcgcccgtatggggttgatggtgccgacgatggggttggataataagcgccattccgcatggtgcgaatacggcttccctgagctggtcacctacgaaaacctctactccctgtaccggcgcggtggtattgcccacggtgctgtagagaagcttgttggcaagtgctggcagaccaacccggaaatcattgagggtgacgatgccgacgatagcgaagacgaaaccgcctgggagaaaaagtccaaacaggtattcaccaaccgattatggcgctcatttgctgaggcggatcgccgtcgtcttgtcgggcgatatgccggaatcctgctgcacatccgcgatggaaaagactggaatctgcctgccactaaaggtcgtgggctacagaaggtttccgtgtcatgggctgggtcgttgaaggttggcgagtgggacactggcattaactcgaagacatacggccagccgaagatgtggaagtacaccgaacggttgccgaatggttcaagccgccgtgtggatattcaccctgaccgagtattcatcctgggtgattactcagaagatgcaatcggattccttgaaccagcatataacgcctttgtcagtctggagaaggtggaaggtggttcaggtgagtcgttcctgaagaacgctgcacgccagcttaatgtcaacttcgaaaaggaaatcgacttcacaaatctggcgtcgctgtatggcgtgagtatcgatgaactacaggataagtttaacgaagttgccggggaaattaaccgtggtaacgacgtgctaatgaccacacagggggcgacagttacacccctcgttacatcagttgcggaccctacagcaacatacaacgtgaacctccagacagcagccgcaggggtagatattcctacgcgaattctggttggtaatcagcaggcagaacgttcaagtactgaagaccaaaaatatttcaacgccagatgtcagtctcgccgcgtagacctgtcattcgagatagaggacttctgcgacaagctcattgagctgcagattatcgactccgtcagccagaaagcggtgatatgggataacctgaacgaacagaccggtactgaaaagctcaccaacgccaagaccatgggcgagattaaccagaccatgctgggcagcggtgacaacccggcgtttagccgtgaggagattcgcacagctgctggctatgacaatgatgacgaagagccgttaggagaagaggatggtgacgaagagggcaaagccaccgattctgccgcgtaa

SEQ ID NO: 387860 - DNA, 288 bp, Salmonella enterica
atgaccaacctaatcgcatcaggctggcaatacatcttaggcatcgttggtattgtcgttgctgttctggctgcatggttatctggaaggagcaagggggcaacagatgccaaagctaaggctgatgttgagtcagctaaccagaccgttaagcaatcacaagccgccagtaataagcaagcctcaatcattaaggttgccaaagatgcagaccaaacgaatcagtctctttctgataacgctgctcgtgaccgcatgcggaaatcaaagtaccactccgacgattaa

SEQ ID NO: 387861 - DNA, 468 bp, Salmonella enterica
atgagtcaaataatccccctgcttaacttcgaagagggttatcgtgagaaaccctacattgataccgaaggatatccgacagtggcttgcggtatcagaattggccctaaaggcgcttcgttaagcaattacactttcaccgttcctcgagatgttggcgatgcatggcttgaatcattcgtcaaaaccaccatcagtaagatgaacaccaacccctccattgtagctgcaatgaaatcctgcaacccagcacgccgagacatcctgataagcatggcttaccagatgggggtaagtggtcttgctgggttcaagaatacgctggcaatggtcgcagaaggaaactatgcaggcgcagctaacggaatgctatcaagcctgtgggctaagcaaacacctaatcgcgctaaacgtcatgctgaggtgatgcgcactggtgagatggctgcatatgcggggctgctatga

SEQ ID NO: 387862 - DNA, 237 bp, Salmonella enterica
atgaaaaatatggcagataaagtaaccactgccgctgcttacaccacatccggggcaacctttctggcgggaagtatgtcattaaatgaatggctggctctcggcggtttcgttctggcagtatttacattcgccattaatctccattaccaacgaaaacgagatcgccgagaagaaaacgctctacggatgcagcatggagaccagcgcaatgagtcaaataatccccctgcttaa

SEQ ID NO: 387863 - DNA, 567 bp, Salmonella enterica
atggctaaaccagcgcgaagacgatgtaaccgtaaaagagaagatttaactgttaaaaggatatttgagttactaagtttcgataaatctaccggggtatttagatggaaagttcccactcagggaaggatagcattaaatagtgttgctggaacttttgattccaacggttattcaatgatcatgatagatgggcgtagatataaaactcacgtcttagttttttacataactcataatcgttggcctgctggtcaaattgaccacgttaatggaattaggaccgacaataggccagaaaatttaagagaatgcctgccaatagaaaattcaagaaatataaggatccgaaagaatagcaaatcaggttgcagaggagttacttggcacaaacgacagaaaaaatggaatgttaggctaggtttccatggcaagagtaaacacttcggatgctttgatgatctggagttagcggtactagttgctgaagaagcccgagataagtattacggtgatttttccggcaacgaaaggagcacttatgcgaatctatcgaaggaaatgtaa

SEQ ID NO: 387864 - DNA, 3180 bp, Salmonella enterica
atgtcttcaggaggcggcaaagcatcaacccccaaactactcgacgataatctcaaatcaaagcaattttaccgggtactggatctaatttcggaaggtccgattttcgggcccgttgaccaggaacacctatcgtctttcaagctcaacaagaccccggtaacagacgcgacaggaagcgtaagcgtaaatggcgtaagcgtagcctggcgcccggggtctgaaacgcaatcacccattaacggcttcgctgctattgaagcaacaacaatcgtgaacaccgaagtaacctatgacacgccgctggtacgcactattacggatcaggatgtaacccgggtgcggttcaacgttggtgtcaccgggctggtagagcgggacaccaaaggaaaccagaagaacacttcagtcactctggttctggagaccagatctggagcgggcgggtttgcaatagtaaagaccgtcaccattacaggaaaaatctcaggtgaatatcttgaagcacacctgattgacgcgccggaaactaaaccgttcgatatccgtgtgcgtcgaattacgccggacagcaccagtgatttgctgtcaaacggcaccatctggaacagctacagcgagatcaccgacgataacctgaactatccgttctccgctattgcgggtgcggttattgaccgtgaccagtacaccgatacccctagtcgcacataccatcttcgcggcctgatagtggacgttcctgacaactacaatccgattgccagaacttattcggggttgtggactggcggattcaaaaaagcgtggactaacaacccggcgtggctgttccgtgaactggcgaggaatacccgttttggcctggcgaaacgtgccggttatatcgatatagatgacggtgcgctgtacgtcctctcacagtattgcgatcagcttgttaacgatggctacggcgggcaggaaccaaggatgacgctgaatgcctatattaccgagcaggtgagtgcgcgtgacattctcgacaagatagcgagcatgtttcgcggtatagcactgtgggacgggatgcgactgtctgtcatgctggatgcgccacaggacccgattgcgacaatcacgaatgctaacgtggttgatggcgagttcaagcgtagctccgtgaagcgatcagagaaatacaatgccgttgttgtgtcatggactgatccggataatggttgggagcaggtaaaagaatacgtttccgacgatgagatgatcgctcgcggaaactacaacgaaacaacaattgaagcattcggttgcacgtctcgcggtcaggcatggcgcgctggaaaatggcttcttgaaacggcgaaacgggaaagcagcagactgtctttccagatggcgcgcgatgctatccacttcacgccgggtgatatcgttgaaatcatgaataacaactatgctggtgcgcgtcttggtggccgcattatgtcgcatgcaggtaacagaattaccgtggatgcggttgattcatccctgatatcagacggcgacaccatgtcaatcatgggtagcaacgggaagttcgttaaatacgagattggcagcatttccggcaacgtggtgacgctgaaaacgactccagcatgggttcgtgacggtactgtatttgccatatctaccagtaacgtttctaccagactattccgcatccttagcattgcagagaccgataacaactcggtctacagcatcactgcatcacaacatgacccgaacaaacaggccattgttgatgaaggtgccgtgtttgaagttcccaacgatacaccgaacgggtatcgagtgccgaacgtagagaacctgcgcatcatcaacaccaataccgagactgttcaggttactgctacatgggagacagcaactaccactaaaaagctggtgtttgagttatacgtatataccgacgacggcaaagtggtcgctcagtacgaaacagatcagttccgctacgagttctttggtctgaacgccggtggatacacgcttggcgttcgcggccgcaatgaaaacggaatgaaaggcgctgagacgcaaattagcatggtcatcggtgcgccacctgcaccatccagtgttatctggacgcctggcttgttctctgctgacctggtccccgtcatgcccattacggcaacgacagacacatcgtttgagttctggtactccgggcagaagcagattgtcaatcctaacgatattgaaggccagactcagttccttgggcgctctaaccagtggacgcttcatggtctacaggctgataagacgtattacgtttatgtccgtaccaaaaatgctttcggggtatcggagttcgttgaggcatcaggtcaggcgtcatcagacattcctggaatgatagagctcattgatgagcagatccgcgaatcagatgcgtttaaaaatgttcagcagggtgtcaacaccaatctggacggtatcatgtcgaacgcgctggcgaaccacggcactgttgagcaccagtatcagcagtacggtgaggtacgtgccgatatccttgttgtgaaaacaactgtcgctactgccgagcaggggctcgccgatctttccacttacgtacaggcacaaataggccccgaaggagagttaacctcagccgtaaatcagaaaatgaccgctgaggtaaatagtgatgggactgcaaaagcctcttacacactcaatatggggattgtcaggaacggtgtgaaatataacaccggattcggcatgtctatcgagccatcggggaatagctataaatctaccgttgtatttgccgcggatcagttcggcatttattccggtaataaccccggcaactggcaggctgcattcttcgtctataacggacaggtatttattcgtagcgcattaattcaggaagcatccatcgattttgcgaaaattaccgattcacttcagtctgcaaactttatccccggtggtggtggacgcggatggaatttaccaaaatctggtagcccagaattccatgggaaactctatgccgacagcggtgaatttgcatttaacggagtgaataacgttactcgcattgacggcaatgggatcacagtaaatctctcaggaggtggtcgtgttgttgttggacgatggacataa

SEQ ID NO: 387865 - DNA, 201 bp, Salmonella enterica
gtgagcaagtacgaaaaattagatcaaaacattctttcaatgctgagtgaaagaccaacacctgtttttgatatctggcttaaatggcggagcaatggaatgtatatcgaaaccatcgatcgccgtatgcaatacctgagaaagaaagggcttgttgcaaatgtgcgtgggaagggttgggtgaaaattaacctgtcataa

SEQ ID NO: 387866 - DNA, 327 bp, Salmonella enterica
gtggctgactggcaaattccaatcatcattcttgccggagcttcgctggttgctggctttatcctgctgaagaagcataaagaccgtgatcaaaaagtcgaagttctctatgggtatccagcgaacagcacaacatggctgaccatttaccactaccgaaaatcaggccgctgggtattcgaatgggatgatctgttcgctgaaaagcgaccaaagtcatggggagacatcagcgaatgcatgatgtttgaagaaagaaaatccggcgcaacccgagaagagtttaacgaagcgtgggcgcgattaagtgagagagggtatttgtga

SEQ ID NO: 387867 - DNA, 825 bp, Salmonella enterica
atgaacgcagaagaccttgtgattattgctgctcgtccaggtatgggtaaaaccgaactggcgctgaagatagccgaaggcgttgcaagtcgcgttattcctggttctggcgtccggcgcggtgtgttgattttctcgatggaaatgagcgccattcaggttgttgagagagggattgccggcgcaggaatgatgtcggtcagtgtgctgcgtaacccgtcacgtatggacgatgaaggatgggcgagagttgcaagcgggatgaagttgctggcagatctggatgtgtgggtagttgacgcatcgcgtttgtctgtcgaagaaatcaggtccatttccgaacgccacaagcaggaacatcctaatctgtcactgattatggctgactatctcgggctaattgagaaaccaaaggcggaacgtaatgaccttgccatagcacatatctccggtagcctgaaagcgatggcgaaagacctgaaaactccagttatctccctaagccagctctcccgcgatgttgagaagcggccaaacaagcgcccgacaaacgcagacttgcgtgattcaggaagcattgaacaggacgcagactcaatcatcatgctctatcgggaagcggtatatgacgagaacagtagcgccgcgccatttgctgaaatcatcgtgacgaaaaaccgttttggctcgcttggtacggtttaccagcggttctgcaatggacactttgttgcatgtgaccaggacgaagccagacagatttgcacggcatcaaatgcacctgctggacgcagaaagcgatatgcacaaggggctgacgtatga

SEQ ID NO: 387868 - DNA, 960 bp, Salmonella enterica
atgccggaaggaatactgatagattataacgatggccgtcctgcgatggcgattacagcggggctccgtgccccgtcattctgcacaagttttgctggttacggtacgggggcaaaccagtttcaggttaatactccattaacgtcaggctccacagtttttgttttaccgacacgtccggttgacgttcaggagttcgcagacaatcagacatggatagttttaccgatatatatgacatccgttacaagaaacggagacaacggtgtgactgttaacggtacaaacaggggaaactaccagcgaataccaaactgggcaggaactgtatttgaaattctccctgctgctacttacaacgaaggacttatcgtttccaactctactgatttcactgcaatttcgaatcaggcaagattaatgacatgtgcttatgttggcacggtgacagtcaacggctcgatggcgcttcccgtatcaggaataccattcgggaagtgggataacaataatgtgtctgtaggatttgacggagcaaatattattgtaagagacatcaattactcaggacgggatgatgtttccgcatctgtaacaatggaactggtaattttcaataataccgcgcctgtagccggtgatggcattaccatgactaattcggctgggcaggtgacattttcaacagtgaagcgcccatttgtatatgaccagcagctaacggtaacagacaataatcaatacataggtgataaatattgccagatagtatttacaggtgcgcagtcaagacgagtggatggatattttaatataaggaaaaagggcgtggtaatgtcaggtggaagcatccggtcagcgtataatcaggttgttggtaattacaatgacaacagatttgatatgacatttaatcaaaatatcaatatgccaattcttgtccttccggatatgtattga

SEQ ID NO: 387869 - DNA, 303 bp, Salmonella enterica
atgacggttatcacctacgggaagtcaacgtttgcaggcaatgctaaaactcgccgtcgtgagcggcgcaggaagctcgcaatggagcgcgacaccatctgcaatatcatcgattcaatttttggctgcgatgctcctgatgcttctcaggaagttaaagccaaaagaattgaccgcgttaccaaagccatttcgcttgccggaacgcgtcagaaggaagttgaaggaggatctgtacttcttccagacgtagcactttacgcggctggtcatcgtaagtgtgggcaaattaccgctagataa

SEQ ID NO: 387870 - DNA, 303 bp, Salmonella enterica
atgacggttatcgtgtacgggaagtcaacgtttgcaggcaatgctaaaactcgccgtcatgagcggcgcagaaagctagccatagagcgtgacaccatctgcaatatcatcgattcaatttttggctgcgatgctcctgatgcttctcatgaggtcaaagccaaaagaattgaccgcgttaccaaagccatttcgcttgccggaacgcgacataaggaagttgaaggaggatctgtacttcttccagacgtagcactttacgcggctggccatcgtaagtgtgggcaaattaccgctagataa

SEQ ID NO: 387871 - DNA, 240 bp, Salmonella enterica
atgattgatgcaggcatcaacgacggtgatctgctggtggtggatagctcacgaactgctgaacacggcgatattgttattgcagccgtggatggggagtttactgttaaacgcctgcagctgcgacctacagttcagctcaatccgatgaacagcgcttattcgccgatcatcgtcggcagcgaagacacgctggacgtattcggcgtcgttactttcatcgttaaagcagcgagctga

SEQ ID NO: 387872 - DNA, 240 bp, Salmonella enterica
atgattgaagcaggcatcagcgacggcgacctgctggtggtggatagctcacggaacgcagaccacggtgacattgtaattgcggcaattgaaggagagttcaccgtaaaacggttgcagttgcgcccgacagtgcagttaatccccatgaacggcgcctatcgacccatacctgtcggcagtgaagacacgctcgacatattcggggtggtgacctttatcattaaagcggtcagttga

SEQ ID NO: 387873 - DNA, 486 bp, Salmonella enterica
atgggtactgataatgcgctgggcggcaattcgatcgttcttggtgataatgacactggttttaaacagaacggcgatggcgtgcttgatatttacgcgaactccgcacatgtactccgctttatcagtagcttcgtggagagcatggttccactgaaagtaaacggaaacgctgtagccacaggcgaagtgcaggcaggaaatggctcatcgcgcatgactaataatggggatattttcggttcggtctggaacggctggctaagtacacatctgaataataatctcgtcgccgacattcagttaggggcgggcacttcagtttccacgtgggataaggctggttcatggcctaacactcccggatatgtagttacctccgtctggaaagatgcaaacggcgttaacattgatggtattgcttatgcgcctttgcaaaaaagattaggtactcagtggtataccgtgcaaggggggacggcataa

SEQ ID NO: 387874 - DNA, 1767 bp, Salmonella enterica
atggcattcgttatagaccttcgagttgaggataacgctgtagctgcagcggcgacggcacaagttatagcccaaagacttggcagtgttttgagagaaaggtttgaagactgtattcataagcgagagtgccaacctggccaacaagattacaacattaaaatggcaagtagggctttggcggcgtttacgatgtaccagctcggtggtgttgatgaaaagcacgcaggcgaatcggtgtgcgacagttctgatgatggtggcattgatggcatagtcataaatcatagtgaaaaaatcgttgtagttgttcagtcaaaatttaaccaagccggaaatggcacttggaccagacctgattttgtgtgcttcaaggatgcttgtgaaaaacttcagaatgaacgatatgaactttttgaccagattcttcaagataagagctcagatataagcacagcccttaattcatttgattataaatttatcttcgccatgactcacacaggaaaaaaaggtgcttcagaagatattttacatgatatgcaagagtggcaacgtgagttaaatgaagcgtcctttaccccggctgaagcaccgaaagaagaatggggttttcaagttcatttgatttcatcagaggatttagtccattggttgcagactggctcaagaggccaaattgatttggatggcgtagaagtggaacgctatgggtttatcaatgaaccttatagagcattttatggaactttagctggagaccaggttgggaattggtggaaacaatatggaacccgtctttttactaaaaatataagaaatatgcttggtaaaacagatgttaacgaagaaattaaaaaaactgcaactgataatccagaaatgttttggttttacaataacggtattacgttactagtgaacgagttaattcctcatagaagaaacgccgcctcaagcactgagagaggggttttcgattttaaagatgttagtgtgatcaacggtgcgcaaactgtgagtagtttaggcagcgttatggatgtgctaggagatagaatttatcaagttaaagtccctgttcgtttcattgaaattaataatgatgaaaatgatctaaatgctaatgcaataaccagagctaataatttccagaatagagtgttagggagagattttgcttcacaacaacccgatcagcatagactggcgagagagcttgtccttgaagggtatcaataccaattattgcgaaccgatgaggattattcacagtctaacgtcaaggtaattgatctcgatgaggctttgaatgctttagcttgcctaagtaaaaataatactatagttgcaactttaaaatcgaatcgtggtagattttttgagaactttgaagggtcattatatagaacaatcttcaatccgcgattaagtggtatcaaattaataaatgctgtcaaccattttcgtgtgatagaacgtgctattagcgcaactttagctgctacagataaatcaacacatagtcgccgtcatttaataataactcatggtaatagatattatgcttcagtgctgttgaatatggtgcctaatttacataatagtaccaatcagctgtcccctgattcagcacaactcactactgatttagcagagttaataactaggacggaaaattatatcgaagataattatccaaatgcttatcctgcaagattttttgctaatccagcaaaaattcaggagctatacgataataattaa

SEQ ID NO: 387875 - DNA, 831 bp, Salmonella enterica
gtgacgaagttgcagcccggcgtgcatcattttcatggcacacctgtctggggaagtgctggtgacgttcatcgcatagcggtgaacggtgctggcgctttcgtctcatatgtaaggccagaccaaattgctgcatcaatcaaatatgccagtgcggtagggattgataatggagcattctctgcctggatgcggggactggttattgactggcgtaatttttataaatggctaattaactattatcaccatcccaaagtagcattctttgttatccctgacgtagtggaagggggcgaaagcgataatgacgctctgatccgccttgttcccagaatgtttcatgataaagcggtgcctgtctggcacctacatgagtcattggatcgacttgttgagctttgccgggaatggcccagagtctgtttcggttcatccggtgagtttgctgtaattcgaacagcgcgctggcatcgtcgtatgcaggatgcttttgaaactatctattgtaaatataacttccagaccagcattcatggcctgcgcatgttagacgggcgtgtgctgggtaattatccacttgccactgccgacagtacaaaccttgcctgtaacgttccgaaattcaattccaaatatccagaactaacccgggcgatccgtgaagcggaatattctcgtgggctttccgcaaaggaacttaaggcaaccattttaaaaaacaggtgcgccattcttaaaggagctattgaggccgtagagcctccatctatttctgaatgggtgtctaaaggattgcagcctttccagctcgaactggagatcgcatga

SEQ ID NO: 387876 - DNA, 1224 bp, Salmonella enterica
atgcgcaacattatcgaattagaacaaatatcagaagaacttaaaaaacatgatctattgcaacctcccttcatcgccgatggaaaactaatttctgactttgctaagagagtggagtgctatttagaattaattgactttattcgaaataaataccctgataacgagataatcaaacaagtaaagattcgcacaaaatcaataatatatctatcagataaaataatagaaactcttaagttatttttaacagggaatgttaaagaagcttataaaaagttcgatcaagcaattaccaattcatcaatgcatactcatcttaacaagatgactgttcctctaactaaattatgcaattcgcgcacccctttatttcgcgtgagaaaaagtgagtgtatcctaaagcaaagagaagaactatttcatataccatttaaaaataggcatttagttagtgcacaaagattttcagtatccggtcttccatgtttataccttggaacatcaatatttgtatgttggcaagaaatgggaaaacctgactttgataaactgtatatatcctccttcatatccgataaagaaaactcaaatataaggattctagaccttgggtacaatttaacatctgcacttcgtactaaacctggagatctctggtattcattcgaacaaggattaggtgatgattacgatctaaataatgatgatttcatggatcaaattaatgataaaatttcgaaattaattgcatggcctttagtcctcgcatgtaactatacaaaagataatgagcatgcaagttttaataaagaatacataataccaaacttattaatgcaatggattagcagcgatagaaacaaaaatatatcagggatatcatatcgctcaacaaaaatattaaaccaaaaagatagcgatatcggaattaatgtaatcatccctcctaaaatagaaaacatagctgaaactaatgatactcactgtcctgttttaaaaaaaattcttaaggttacaaaccctgtttcttggactgtattcagtactctagaagcgacacctaacctatacaaaagtaattttaattttcaaaccaataatcccgcaaagggatggattgaagactttgatgagtcccttgttgaatattatgaaaataccacttttagaaaagttgaactccttattcatcaaatgatgaagtacgagtatctaagataa

SEQ ID NO: 387877 - DNA, 222 bp, Salmonella enterica
atgactctggtaatcaccgatggagaattttggtggagctggcgggagttgaacccgcgtccgaaattcctacataccattataacattcaataaaacaactatttatcttaactttcatgcggttaagtttacggtgtatcacctcattttatacgtttttaactctttgccgccattatgccgccactcttatcttagatactcgtacttcatcatttga

SEQ ID NO: 387878 - DNA, 1242 bp, Salmonella enterica; identical to SEQ ID NO: 374067

SEQ ID NO: 387879 - DNA, 441 bp, Salmonella enterica
atgggttacagtatgaactcgacacttagtttaaaagaaagaaaagcaacatttgcagagttgaaggctgaatatttatttatagccattccttttctacttttaatttcgataaaaatttatatttcaacatggcaagagataatcacatctccagattggtctttagcatcatgcctgatctttggacaaataacatctaaagtatcgaaagccgtcgcttgctctaatactaaaacaagtgagcatttttttggatggtataccgcaaagcgtttccttttagtagtcatatctattgctgcttattttggcatgctggcaaagcctacaatgagtcttggatacatacaaataattattttcattactgctagttactttcatttcaaagatggcttcacaactaaactgcttcaaaaaaatgagtgtaaaagataa

SEQ ID NO: 387880 - DNA, 225 bp, Salmonella enterica
atgtttttttgtgattttgatctgataaatgaaagtttcgaaataaaatggaagttatcgaaagtcaggcgtaaaaaaagcatgtcgggcagacatactttaggctacagactaagggcgaaaaaataccgggtagcgctggcgcttacccggtctacagattatgcggttataccctggtcggagaagggtactgactggatcaggtcactggcgccgggttaa

SEQ ID NO: 387881 - DNA, 2247 bp, Salmonella enterica
atgagttttgtatccacgggtaataaaactgtcgggagcgatgggccagctatcactacgccgccaattgtcggagaaaataacggtgttagttcaggtgccgccgtagccagcgttactgacgcagccgaacaaatggcagaacaggcagtggaattgttgtttggcgagttgccggaaccatcaggactggtaaaagccgcggtggcagcggcgcaggccgccgctgtggcggcagggatatcggatatagctggtgccgcacaggacgtaatgtcatcccttatctccggaccgggagtgcataacgttacggtaagcggcagtgccgtgccgccgcagatgttgttgtttgccagccttaatggctcggaaacactgggagccttgtttacttatgtggtacagctaaaaacgcccgacaccctgaatctgggctatgtctccccggcggccaacctgccgctcaaaccgatggtgggcaaagatctgtgcgtcaacatcgaactggatggtggcggtaaacggcatatcagcgggctggtcacggcggcgcgggtagtcggtcatgaagggcgttcggttacctatgagctgcgtatggagccgtgggtaaaactgctgacccataccagcgactacaaagcattccagaataaaaccgtggtggatattctggatgaggttctggcggaatacccctacccggtggaaaagcggctggtagaaagctacccggtacgcacctggcaggtacagtacggtgaaactgattttgattttcttcagcgactgatgcaggagtggggcatctactggtggtttgaacacagcgaggacagtcacacgctggtgctggcggacgccatcagcgcccacaaagcatgtccggactcgccgctggtcgagtggcaccaggaagggctgaagctggacaaggagtttatccacactatcacggcaaacgagagtctgcggactggccagtgggtgctggatgatttcgattttacgaagccacgttcattgctggaaaacacggtggcaaacccgcgtgaaaccggtcatgccacctacgagcattatgagtggccgggagactacttcgacaagagtgaaggcgagatgctgacgcgcattcgtatggaagcgcagcgcagccccggcagtcgggtgctggggggagggaatatccgcacactcatgacaggctataccttcacgctgatgaatcaccctacggcagaactcaaccaggaatatctgttggcgcagactacgctgtttgtgcaggacaacgcgcagcacagcgggcaggaccagcactttaccttttccaccagttttgaactgcaccccacccgcgaggtgtaccgcccgcagcgaaccatcagcaaacaccacaccaaaggaccgcagagcgccattgtcaccggcccgtcgggccaggaaatctggacggatcagtacgggcgggtaaaggtgcagtttggctgggaccgttacggcaaaatggatgaaaacagctcctgctggatacgcgtcagctacccatgggcgggcaaaggcttcgggatgatccagatcccgcgtatcggccaggaagtgctggtggatttcaaaaacggcgatccggatctgccgatcatcgtggggcgtacctacaaccaggacaccatgccgccgtggggactgccgggcgcggcaacacagagcgggatatacagccacactatcggcggcggaccgaccaatgccaacgccctgcgttttgaagataaacccggtagtgaagaggtctggctacatgctgaaaaagatcagcgtattgaagttaataataatgaaagtcactgggtggggaataatcgggttaaggtcattgatcagtcagaaatagccactattggcgctgtccgcgaccataaagttcagtatgacgatacctctctggccggaggaaataaaaccattcagacggtaaaagagttatatctggcagcgggtgattctattaccctgagttgtggtgacactgttctgtacatgagcagtaagggggaattttacgtaacctgtaaaacgttcaatattactgcaacagatgccgatggtcagattaatactataaaagggcagctggatttaaatatggataaaagagaacccaaagtgggaacatttggtgagtcagaaaaaacagcaatggcagcagtaattaaggaaacttttccacccaaagaatag

SEQ ID NO: 387882 - DNA, 4728 bp, Salmonella enterica
atgggagaggcattctgggcggcaagggaaggcgacgcgctgctgcatacgtcctttctggcagatctggtgggcagtgcgctggaattcgccatcaatgcggctattgattttgcggcactggctgttgtggcgctggcgacgggggctacagtggcaacgctgggatgcagcgccgtattacttgtggggaccgtggtcggcgcgacgatgttgctgagtggcgccggggagaaaatcagtaaagcctgtgaagacatagccaacagcctttttccgccgaaaattgagggatatatcctgaccggctcaggcgacacccggattaacagcaaacgggcggcgcgggcggcggcaacggcattatcacgccatgatgtggaaaccctggacgcgcaggcgcaggcagaggcagaagaagaaaaacgcaggcaggacgccaaatcaatgtgggatgtggccggggaatatctggatgcagtaaaaggccgggcagagaatatggctaagggcgtcgtttccgtggtgagccggatggggtcagcggaaggatgggcctcgctgggaaatgatgctctggcggaggcgggcgatatgctttccgacacgggccactttatttcagagatgtggcagcccacggtggcaacggcatatccggggtctgacccgaaacaggatgataaaatcgactgccacaaacatccctcttcattcagccagtttatggcgcagaaactgcaggcgctgacggacgacccggtggggacggtcttgggggcgatgaaccctttcggtgcgctggaaatcggttttcaggcggcaagcgcgcttatcggcagcgtgtcgaacctgttcaaaggcgacgatgagccgcccgcagcagaatatatcgccgaagggacgcgggatgtgcgtatcaacagccagcctgcggcgcgcagcggggtacgctgtacctgcgaggcaaaagtggtggatgagcctgagaacggcgtacatgtatccggtgatgtacgtatcggcgggccgcttctggtggtacgggatatcaaaagcggtaagtcacaaataaccctggtgaccaccattgcgctgacgttcatgcagcccggacgggcgtcagctaaaagtgcctgctttatgatgggattgggcattaacatgatggttcagaaggcggggagtgcgctgaaccgcccggtaaacgccgccaccggagccaagtacctggcaggcgatgatgacgttgatttcagtctgcccggccacttcacgctggagtggcagcggacctacagcagccgtgatgaacggacggaggggatgttcgggcggggctggagcgtgctgtatgaagtgtgcctggagcgtacgccggacaacccggatgaaaactgcatgacgtatgtggccccgatgggacggcgaattgacctgcaggcggtggagccgggaagcggtttttacagccccggcgaggggctggcggtacggcgcagcgaacagggccactggcttatcagcagtgatgacggcgtgtacaggctgtttgaagcggacccgtccagcccacagcgccggcggctgaaaatgctgggcgaccgcaacagtaactgccagcacctgacctacgacaaccacgggcgtctggtggaaatcagcggcgatcggcagcgcccctgcatccggctgcactatgagctggcagcgcacccgcagcgcgtgacgcgcatcttccgccattacccggaaggggagccggagctgctgcggcgttaccgctacgatgaggcggggcggctgaacggggtagtggacaacgcaggtcagtatcagcgcgagtttgcgtacgacgacaacgactgcatgacgatgcaccgggagccgggcggcgaacggtattactacacctgggcgtggtttgaaggcccggacgatgcggcgtggcgggtgacgggccatcatacggacagcggcgagcagtaccgtctggactggaatctggcagaacgctcgctgtgcgtgacggatagcctggggcgtacgcgctgccactggtgggatgcgcagggcctggtgacggcgtaccgggacgaggccgggcagatgaccactttccgctggagcgatgaagagcggttactgctggggatgacggacgcgcagggcggcaaatggcgttatgtctatgaccgtctcggccacctgacggagacgcatgacccgctgggccgggttgagcagacgcagtggcatccggtgtggcaccagccggaaacggaggtggatgccgcgggggcggcgtggcgttatgagtatgatgagcggggcaacctgcaggcggtcatcgacccgctgcaccagcgcacggtatacgggtatgaccggcacggccaggtggtgcggataaccgacgcgcggggcggagataaatacctgcagtggaacgaagacgggcagcttatgcgccacacggactgttctggctcgcagacggcatggttttatgatgaacgcacgcggctggaaagggtgacggacgcggagagtaacagtacgcgttacagctatgacggcaacggacatctgacggaggtcatgttcgcggacgggcgtacggagcgttaccagccggatgcggcgggacggctggtgaaatacaccagcccggcagggcagataacacgctggcagcgggacggccaggggcgggtgcgcaggcagacggatgcgacgggtcgcaggacggcgtatgagtacgacgcttacgggcggctgaccacgctcacgaacgagaacggggaaagctaccggttccggtacgatgttctggaccgggtgacggaacagacggaccccggcggcagccgccgggtatacgggtataacgcgctgaatgcggtgacggcagtgatatacggcggggagcgcgggggcgaaatccgccacggtctggagcgtgatgcggcggggaggctgacggcgaaaatcacgccggagacgcgcacgaaataccggtacgacgcggcggaccgtctgctggaaatccgccgcaggcagcatgatgcggcggaaggcggagagccggaagttatccggttcagctacgacagtgcgggtaacctgctaagcgaggagacggcgcagggcgtgctgcagcaccggtacgatgttcagggcaaccgcacagaaacgcagatgccggacgggcggacgctgcggtacctgtactacgggagcggccatcttcagcaagtcaacctggggcgtgatgtcatcagcgagttcacgcgcgaccacctgcaccgtgaagtgcagcggagccaggggcggctggacacgcggcggatgtacgaccggacgggccggttaacgcggaaactgacctgtaaaggaatgcgcggtgtggtgccggagacgtttattgaccgggaatatgcgtacagcggccaggacgagctgctgaaaaagcggcacagccggcagggggtgacggattatttttacgacacgacggggcgcatcacggcgtgccggaatgaggcatacctggacagctggcagtacgacgcggcggcgaacctgctggacaggcggcagggagagaccgcgcaggcgggtgcaggcagcgtggtgccgttcaaccggataacgtcataccgtgggctgcattaccgttacgatgaatatggccgggtggttgaaaagcggggccgcaacggcacgcagcactaccgctgggacgcggagcaccggctgacggaagtggcggtcatccgggggagcaccgtacggcgttacgggtacgtgtacgacgcgccgggcaggcgggtggagaagcacaaactggacgcggaaggaaagccgtataaccggacgacgtttttatgggacggaatgcggctggcgcaggagtgcaggctgggaagaagcagcagcctgtatatctacagcgaccaggggagccacgagccgctggcgcgggtggacagggcggcgccgggcgaagcggatgaggtgctgtattaccacacggacgtaaacggcgcgccggaggagatgacggacggcaggggcaatattgtctgggaagcgggctatcaggtatgggggaacctgacgcatgaaaaagaaacccggcccgtacagcagaacctgcgtttccaggggcagtatctggacagggaaacggggctgcattacaatttgtacagattttatgatccggatatcgggaagtttatatcgggcgaccctatttcgatccggggcgggataaatctttatcagtatgcgcctaatccgataagctggatcgatccgttaggacttgctgtagatccaatagctaaattagaagatcgcggttatacaggggttacaagaacttctggtggcggtttagactattcagatagtaatgcgttatataacaaacgacccggagttaaccctgtagttactattgaatattcaggtgattatcttaaagattttgaacgggcaaatacggctgctaagttgaaccaaaaatcgacaccaagaggttatgtctggcatcatcttgatgattacgatcctgtcacaaataaaggtacaatgcagcttattaaacagggtgcacatcaaggaataagtcattctggtggtgttagtcaatataaagcagcaactggtaaaagctatacgttcccggctagaaaaggtggtagattatgcggttag

SEQ ID NO: 387883 - DNA, 246 bp, Salmonella enterica
atgaatgcctccggcgccagcgtccgccacatcaacagcgaaacctgcatgaccacctgttactcacaaatccccagcggcgactggcaggaagaagcgggatttgagaccgggcacggcgtcaccgtgaagatttcacaggggtgtattgtgctgatggcggacagtaacgaggtgcagaagctgcgcgaacagctttatcaggctaaacaggtggttaagggggtgaaggatgtgctggtttag

SEQ ID NO: 387884 - DNA, 2259 bp, Salmonella enterica
atgcatctggtgtgtatcattggcggattaccatcaggttctacactagacaaaccattacaggtcatgaagcgctggtattgggaaatggtaaataaaacaggtcaaacgcatccaatgtatctgacttccgatattattcatgcagcgatggagcggcatcatgagaattctgacagtcctgataatgtcagtgactattgcgatattgcagtaaaggccattgctttactacgtcaatatgatcttttcttagttaatattgaagtcaaaaataagtatccttatcgaaatggttctaacagcactaaagaaaggaagaaagcgcaagaagccacccctgatcaaactgatgatgaaagactcatatcaatccgtgcatttatgtgtgttattgagttgatcgctttagctgagaatagttatcagcgtatcttttacaatatgttgttactcacaattatttgcggtttccgtttccaggaaataatgttgctgaaaatgacttctttggttaagcgagaaattacggataaagataaacgtcagcacgcaatagatcaagactggcctacttacaggttgggtattgagtatcttggtgcaaaaaaggctggatggcggatccattggctggcgccaagcacttattctgtcgttgagatgatttataaatctgttcgagaattgacctctgggttccgtaaaacgattcagggcttcagagattctaatttcactaatatgctcccaggtaagatcgctgattttcctgatgaatggattgagcaaaattatcttgaagacatcatgtttagtggttctggtggctccaggaatgatcttggaaagagtattcggaattccattgcgaactttagcggacataaacctaaggtaatacccgttcataaacagaagaacagctggtacttcactaaagaacagttgaatgattatgtctatcagcgttacgctcaagcaaaaaactttgagcctgggcaccagtgcataatttcagccaaaaacaatggtgactgggaacacttcaattatgaagacctgatgttcatcatgccggaaggtgcatttggaattggtaaagattttgtttcattgcaacatattttcccacttgatgaaaactcaatagaagcttggttaggcggaacacaaaaccgaaaatctatctttgatcactttaatctttttgaagatgatgggtcccgtgtcattatcaaaaagcatgtaccgagacataacataaatacattcttggcaatcgctggagtgacggatcatattcaggccatcctaatggggcgtgttgatatcacccagaataaacactatcagcatcaggccgaatcacagtcctatcagaccgcttctctagcaatcaatatgctggaaaaggcttatgatgagaacaatcaagctctcacgaagagtttccagctatcactctttactacgcagcagaagccctgcattccggtcaacctaccctcccccagaactgaggttagccgcagaatggcagctctatcacggtcttccaagacggtaaaaaacacaggtgttggaaacgttaaattaacaacctcactaatgataaatcctgagctcaataccgagcataatctgaagcagaacatgcagacttttggtgaaacaactgctgaggttgtggactatataactggcacaatgtccgataagtttctgcctgaactaaaacgtgcacatgacaagttagtacaacaaaatttggctgataaggcgaaatcactgcttcaacgccatgcaaaactgcatcctcttggatttggagcctgtacgagagatgtagctcgctggggttgtcctcatgcgcttaagtgtcagtctggtctaccttgtggctacttcactcttacaggtcgtcttggcgaagcggaagaagcatcacgacgtttatcaaacaagcgaaaagaaatcattcaactccgtaagttgactatagtgaatccaggcttcatgctggctttaaaagaacaggaagaagctctcatcgtgctcgaggctcttgaagctgatgctataaaggttcaaggcgagaaaaaactggtttccctgttttctgatgatctgaacaacccattatataaagttattgagcgaattaataaacaaatgctaattggcaaaaccccaaaaaccctagctgatcttttctttattgaacagaaacgtatagagagaaataataatggctaa

SEQ ID NO: 387885 - DNA, 504 bp, Salmonella enterica; identical to SEQ ID NO: 141325

SEQ ID NO: 387886 - DNA, 135 bp, Salmonella enterica
atgcaagttctgctgttgtctgatcatcacaaaaaaaatagttcaacggtacgtttaactctgccgccattcgtcgaagcgtatcaatatcggggacatggcgtcctttctcataatgattcatacgactgctag

SEQ ID NO: 387887 - DNA, 561 bp, Salmonella enterica
atgaatagtcgagtaaccaaccctgagtcgtacatattttctgcaatcatcttaattggcaaagataacttcaccagtaacgaagtagcaaaaattcttatcgagcgattttcacttccgaaaaattatttaaaggcaaaagcttttgcttataaccaaattcaatccctggttagaaaaggattattaaacaaagtaagaaaaacaggcgtgtatcaatatttatactcagtcacatcagaatttaatatcgcaacagaatgcgtggaattaattgaggcaaccccaaagtcttcctgtcaacttgtttcaagtgctaccaaccatgaacacagaaatgtaaatatccaaataaagtctcttattgaaaaatacagcagtgagttggcgaaagtatcaggagcaaaggagatttatgaagaattgatagttgctgtgccgagcagggaaaatgaattcaggaagctttctcttgaacaagagaaaaaacacatcaagataaatgaaaaaataaatacattaattggaattattaatcaatctcttgcagtaacgcaatga

SEQ ID NO: 387888 - DNA, 756 bp, Salmonella enterica
atgagtgagaaaaagtcactatctatgaatgctgtacgttttgtttatggtgatgaaaccatcgtggttcagtgtgtaccacggcaggttgttaaaggcaggatacttatcaaggttcatccggactgccgggtagtcgcatctgtaccacccggaacgccggagctggatgtgatatctgcgctgaaaaagcgagggcgctggatataccagcaactacgcgacttcagggagcaacaaacgcatatcgttccgcgtcagtatgtgagtggcgaaagccattactatcttggcaaacaataccagttgaaagtaacagaagatgctgctgttacgcaaaaagtgaaaatgttgcggggccgtctggaagtcaccgtcagacacaaatccgctgaacgcgttaaggcggtgctggttgagtggtatcgggaacgcgccagagatgtgtttcaacgcagactggatttactgataccgcaaaccttatgggtaagtgagcgtcctccgatacgtttacgagccatgcagacgcaatggggaaactgttctgcaaaaggctgcctgacacttaacccgtggctggtaaaggcttcctcggaatgcatcgactatgtattgctccatgagttatgccatgtcgctgagcacaatcacagcgagaaattttaccggctgatggggcaggttatgccgggttgggaaaaggtaaaaaaacgcctggacgggatagccgggatgctgttggctgatatgtag

SEQ ID NO: 387889 - DNA, 3285 bp, Salmonella enterica
atgaaccagacgtacacgccaaaattccaggaagaatacagcgccaaaattccggcactgacgttactgaccagcctcggctggacgtttttatccccgaaacagattatggattaccggggctataaacaggatgaggtggtgctgcgtccggttctgcgtgaagagctttcgaagcgttcctttatggcggggggcaaaatctgccagttatcggaaaaggcgctggataacctgatatcgcaggtctgttctccggcgctgaatgaaggactgctgaaagccaatgagcggatgtataaccatctgctctacggtatcgccgtcacggagtttgtcgatggcaagaaggtgaaccccaccattgcgctgattgactgggaacatccggaaaataaccagtttcactttaccgaagaatttacggtattgcggtcaggcggtgtcgaaacccgcagaccggatattgtctgctttgtgaatggtatcccgctggcagtcattgaagcgaaaagcccggcaggtcacggtaagaaagggccaaccattgacgaagggatatctcagagtatccgcaaccagttcaacgatgaaatcccgcagctgtttgcctatagccagctattgctttcgattaacgggcatgacggtcgctacggtacctgccatacgccaatgaaattctgggcggcatggcgggaagaagatattacggatgcgcagatgtatgctctgcgcaaccatccgttatcgactgaacagattcatgcgttatttgatcatcgtccgtcagccgatctcaactggtatcagcagttaatcgccgggggtgaactggccgttagtggacaggacaaactgctcatcagtctgctttcgccggaacgtctgctggagatgacgcgctttttcaccctgtttgataaaaagaccgggaagattgtcgcccgctatcagcaggtgttcggcattaaaagactactggaacgcatcagtacccgtagatcagacggcggcagggaaggtggtgtcatctggcataccacgggttccggtaaatcttataccatggtgttcctcagtaaggcgctgattcttcatgacagcctgaagcagtgtcgtattgtggtggtgacggaccgtatcgatcttgaagaacagctcagcggtacctttgcttccggcggcgagttggtcgggaaaaaagacaaagccaatgcaatggcgacatccgggcagatgttggcggaacagattggctccggtaaagaacgtattatcttcaccctgatccagaaatttaattcagcgacaaaacttcctgaatgcgtcaataccagccccgacatcatcgtactgattgatgaaggacaccgcagccagggtggcgaaaaccatgtgcgtatgaaactggccctgccgaatgctgcttttgtggcatttaccggtacacctttgctgaaagaagataagaccaccaataaattcgggccgattgtccacgcttataccatgcagcgagcggtagaagatcaggcggtgacgcctctgctttacgaggaacgtattcctgatcttgaggtaaacgaccgggcaatagatgcatggtttgatcgtattaccgatgggttaagcgaagcgcaaaaagccgaccttaagcgtaaatatgcccgtaagggtgaggtttatagtgcagatgaccgcatccggctgattgcattagatatcgccatgcacttctcgaagaatattgatgaggggctgaaaggccaacttgcctgcgacagcaagatttccgccatcaaatataaaaagtatcttgatgaagccgggttgtttgagtcagctgtcgttatcagcccgccggatacccgggaagggaacaccgaggtggatgaaagcaaactgccggaagtgacgaaatggtggaaggataatgtcggcacgcaggatgagtctgtgtatacccgtaatatcattagccgcttcgataccgatgataagcttaaattgttgatcgtcgttgataaattgctcaccgggtttgatgaaccgaagaataccgtgctgtatatcgacaaacctcttaagtcccataatcttatccaggcgattgcccgggtgaaccgactgcatccactgaaaaagtttggtctgctgattgattatcgcggcattttggctgaactggacacgactatcggtaaatatcaggatcttgcctcccgaactcagggaggatatgacatcaaggatattgatgggctgtacagcgccatgagctctgaatacaagcgtctgccgcatctgtataaccagttgtgggccatatttgccggtgttaaaaacaagaatgatactgagcagttacgtgcagttctggtgcctaaaatggaagaacgtgacggagagatggtcgatatccatcagaaaacccgtgatgatttcttcgaggtgttaacggcctttgccggatgcctgaaagtagcgctgcagtccgccaccttcttcaccgacaagagctttacggaacaagaccgaaatatctataaagaaaccgtaaaacagatgtccagcctgcgccagtgggcgatgcaggtcagtggtgagcaggtcaattatgacgactacgctgaacaggtgaaaaaactgctgaataagcatgttactggtgtcgcggttcgtgaaccggatggcgtatatgaagtgggcaagatgggtaaaactgaaaagccggaagagtgggataacaacaaaacccgcaatgagaccgacatcattaaaacccgcgtcacgaagatgattgaacatgaactgtgcgacgatccctatgctcaggaggcattctcaaaactcctgcgtatggttattgaagagactgaaaaactgttcgaccatccgctgaagcaatatctccttttccgcgagtttgaggcgcaggtggaagcccgcaaactcagcgacatcccggatgcgctggccgtaaacaaacatgcgcaggcatactacggagtatttaaaaaagagctacctgaggttttcgcggtaaacgatgatcaggttcagcataaatggacgaagctggctttcgaagtggacactattattgtcaaagcggttgcggaaaattccctcaatcctcaggatatcgagaaagccgttaagacaagcctgttgccgcgactgtttactgcctgtcgagagatcggtgctggaatgaaccaggtaaaccgtatcgttgaaaccatcatacagatcctgcgcgttggtttgatgaaatcatga

SEQ ID NO: 387890 - DNA, 684 bp, Salmonella enterica
atgaaactgacgaaaagcggtccactgactgaccgggaaatcgactggctggaagaaatattaatgaagtatggaatggatgattctgtactctgtttctctgagctggatggattgctgacggcgattttatcaggtccaaatatggtttcacccaatatctggctgagtgctatttggggaagaggcgattatcatccgaaatggtcatctgagagagagatggagcgttttgtcagtctgtgttttcagcatatgaacgatatcgctggttgcctttatgacgcccctgaactgtttgagccgattttcaatgagcgtgaggtaaagggggaaaaatataccattgtggaagagtggtgttttggttatatgaaaggaaagtcactggatgactggtctggtcttcccggtgagttacggccttctctggaagtgatcgctcttcatggcgtggagaagaattttcctgtacttgagaaaatgaccggagagcagtttgagaaaagtatttcccttattcagcctgctgcactggcactttatcagtactggttgtcagtgagaatgtcagaggcatcatcccggcctgttccagtgaagagggcagaaaacatgcccgggcgaaatgacccgtgtccgtgtggcagcggtaaaaaatttaagaagtgctgtctgcattga

SEQ ID NO: 387891 - DNA, 1185 bp, Salmonella enterica
atggtgcctaaggggtggatgcttctccaagtgtcagatatctgtaagttacaaaatggtaatagttttaagccacatgagtgggatacaaaaggtcttcctatcattcgaattcaaaatctaaatggaagcggtaattataactatttttcaggtgttcctcaggataaatggttagttgaaccagggcagttactattttcttgggcaggtacaaaaggtgtatccttcggtcctttcatttggaatgggccaaaaggtgttttgaatcagcatatctacaaggtatttgcaaatgaaaatgttcatgaacactggctgtatttagctttattgcatataactcaaaaaattgaagcgcaggctcatggtttcaaatcaacattattacatgttcaaaaaaaagacattgataatcaatttgtgcttaccccgcctgttgctgaacaaaagaaaatatcccaaatcctgtcaacctggaataaggcgatttcggtgacggaaaagcttctcgccaacagccagcagcagaaaaaagccctgattcagcaattgcttaccgggaagaaacggttgctggatgagaatggggtgaggtttagtggggagtggtgtacgtgcactttgtctgaagtagcacatattattatgggatcatcacctaaatccgaagcctacaacgataatggcttaggtttgccattaatacagggtaatgccgatataaagtgccgagtttcatgtcccagagtttatacgtctgacattacgaaagaatgtactcctggagatattcttctaagtgtcagggcacctgtaggtactgttgcactttctcaacataaagcatgtatagggcgtggtatatcggctataaaatccaagagaaaaatgagtcaatcatttctttatcaatggtttctttggtttgaaccaaaatggtgttacctatcacaaggtagcacatttgaatcaattaatagtgatgatataaagacattaaaattatcagtgcccaattttgaagaacaacaaaaaattgccgccgttctgtccgctgccgacaccgaaatctccacacttgagaaaaaactcgcctgcctgaaaaacgagaagaaagccttgatgcagcaactgctgaccgggaaacgtcgggtgaaagtggatgaggcggttgccgtatga

SEQ ID NO: 387892 - DNA, 1524 bp, Salmonella enterica
atgaacgacaaaatcagtcaggacacgatcaacaaagccctgtgggccgcgtgcgatacgttccgtggtaccatcagtgctgatacttacaaagactttatccttaccatgctgttcctcaagtacatttcggatgtctggcaggatcactatgacgaatacaaagaacagtatggcgatgcgccggagctgattgaagcgatgatggctaacgagcgttttgtgctgccgaaaagtgccagcttttatactctttacgagcgtcgctatgagccgggaaacggcgagcgtattgatcaggcactacacgctattgaagaagccaacggcaccaaactgaaagatgccgggaaaagcgtctttcaggatatttcgtttaacactgaccgcttgggtgaagaaaaacagaagaacaccatcctgcgtcagctgctggaagactttgccggtgaagatcttaacctgaagccaagccgtgtaggtacgctggacgttatcggtaatgcctacgaatatctgattaaaaactttgccgccagcggtgggcagaaagccggggaattttataccccgccggaagtctcggacctgattgctgaactacttgatccacaaccgggtgataccatctgcgatccggcctgtggttctggttcgttgttaatgaagtgcgggcgtaagattgtatccgggcatgacagccgtaactatgctttgttcggtcaggaagcgattggctccacgtggtcgctggcgaaaatgaacatgttcctgcatggcgaggacaaccataaaatcgagtggggcgataccattcgtaacccgaagctgctcgataaaaatggcgatctgatgctgtttgatatcgtgaccgctaacccgccgtttagtctggataagtggggccatgatgaggccgagaacgataagtttggtcgcttccgtcgtggtgtaccgccgaagaccaaaggcgattacgcctttatctcacatatgatagaaaccctgaaaccgggaacgggtcgtatgggggtggtcgtgccacacggtgtgctgttccgtggctccagcgaaggtaagattcgccagaaactgattgatgaaaatctgctggatgcggtgattggtttgcctgaaaaactgttctacggtacggggattccggccgcgattctgatttttaagaagcagaaagtggatgacaaggtgctgtttatcgatgccagccgtgaatataaggcgggcaaaaaccagaaccagctcagcgcagaaaatatccagaagatcgttaacacctatcgtgaaggcgataacgtcgagaaatatgcctatctcgccagcctgaaggagattcaggataacgattacaacctcaatattccgcgctatgtcgatacttttgaagaagaagacgagattgatttgctggccgtgcgttctgagcgtgagcaattgaaggtggaactggcgaaactggaaacggagatggcgggttatctgaaggagttgggttatggtgcctaa

SEQ ID NO: 387893 - DNA, 624 bp, Salmonella enterica
atgccgccgtcgcttactgcggcgacaggtatggatgcattaacccatgcgatagaagcctatgtttccaccatggcgaatccgttgacagatgcggcggcattaaaagccattaaaatgatcacgcaatatttgccgaaagcagttgctaacggtgaatatatgaaggccagagataatatggcctatgcgcaatatctggccggtattgccttcaataatgcgtcgttaggttatgtgcacgcgatggcgcaccaattaggcggcttttataatttaccgcatggcgtatgtaatgccattctgctgccgtatgtagaatcatttaatttaattggcaacttaaatcggttcagggatatcgctgaagcaatgggggaaaatgtcgcgggtctatcgacagatgaagcggcgctcaaagcgattagcgctatccagcgtttgggtaaacaagtcgggatcccgaaagatctcaagagcctgggcgttaaaccggaagactttgctgtgatggctgaaaatgcgaagaaagatgtgtgccaactgacgaatccacgaaaagcgacgaaagagcaggttatcgaactctatcgtcaggcgtatgaaggtgaggcgattgtgtaa

SEQ ID NO: 387894 - DNA, 711 bp, Salmonella enterica; identical to SEQ ID NO: 170897

SEQ ID NO: 387895 - DNA, 585 bp, Salmonella enterica
ttgaaaaacacattactttatactgacgacaatatcatcgggcactcaatccatgattatatgattgataacaaaaaaaacatcaccactcttaacttccaggatattgttaaggggaccagcgcgccatcaaccactaccattattgtcaacactatccataaggatatctctgcagccacaacggtcgcattgcttaataccctgcgcaagcgtcttacgcactgcgctttgctggttttaattgtaaaaagtgacctctccagactgttccgggagctgctttatattgataatatattgattttgaatgaaaaatcttctttatcagatttctcagccatcatcaacagacctttgaccgccgatggctgccagcggttatgtacccggcgtaagctaaccgctagggagcttcaggttctggagctaatcattgcctgtaacaacaataaaagaatcgcattactcctcgatattgatcacaaaacggtacacagtcataaggtacatattatgaagaaactggggatgaataactcacggataatgaataaaaggatagtcaatatgtatcggtgctaa

SEQ ID NO: 387896 - DNA, 717 bp, Salmonella enterica; identical to SEQ ID NO: 219764

SEQ ID NO: 387897 - DNA, 651 bp, Salmonella enterica
atgagtgattcagcaaagtataaaaatagcacacgactcattcagttggccctgataagcgggacgcttattgcctcctcggcgtggggattcgagacgaattacgatcgtgggcgggttgattttgccggacgggtgacagacatctcctgtagcgtggcgcttaacggcggcaataatgcagggagtggaagcgtctggctggcgccggtcagcctggcagaagtacacgatcgcggggcgggggcatttatgaaaccacagcctttcacgctggaactctcaaactgccagcttcgtcatgatggcggcgcggcggataaagatgaagttcggatggtgaatgtgcgctggattgatgggtttatggttaattccgtcagcaatgaaaacgctggttatctggcgaatacgcgcgcggatggggccagccatattttcctggcgctgtcgactaacgacaataatactctggacaagagcaataaaattgtcccggctgacccgcagcaaaaccgggtgcctctggtcgaaaaggcggtggatggcgggatatttacttattacattggctacgttacgccagcgccggaaaaagcgaccagcggtccgttgaccagctgggcgacctgggagttagtttataattga

SEQ ID NO: 387898 - DNA, 975 bp, Salmonella enterica
atgtcgctaatgaaaaaactgacgctttttattggcttaatggcgctggggacaacgtcagcatgggcatcatgttggcaatctaatagtgcctatgaaattaatatggctatggggcgcgtggttgttagcccggacttaccagtagggagtgtcattgcaactaaaacatggacaatgccggataataatacgatttatgttacatgtgatagaattactactctgaaatcagatgcgaaaattgttgctgctggtttggttcagggggccaataaagtctattcaactgcaattcctggaattggtttacgtttctcacgtaaaggggagatcagtatgatctaccctgatagttataccacgacaggttcctcctttagactcgcaggttcaacattcacattagatataattaagaccagtaccacaacagggagtggaaccttagccagtgggccgtatacagagtacggaccaggatttacaatccttaaaaccagccttaatgctgatgccattacaattgtttcaccttcttgtaccattttaggtggcaaaaatatgaatgtcgatataggcacgattaaacgagctgatttaaaaggggtggggacctgggctggcggtacaccatttgatattaaactggagtgtagtgggggagtcagtgtcagtggttatgcaaatattaacacctcattttctggaacattagctacaaatacatcagcgaatcaaggtgttctactaaacgaaaagaccggaaattctgctgctaagggcgttggtgtgcaggttataaaggacaacactcctctggaattcaacaaaaaatataatattggtacattacaaaaccaggaaactcgttatatcaccctgcctctccatgcgcgcttctatcaatatgcgccgactaccagtaccggtgaagtggagtcgcacctggtctttaacctgacgtacgattaa

SEQ ID NO: 387899 - DNA, 2487 bp, Salmonella enterica
atgaagcagaggtcaatctgcccgggaagattaagcacggctattgcggttgcgctgtgctgctttccgccattttccagcggacaggaaaacccgggaacgatctatcaatttaacgatggttttatcgtcggcagtcgcgaaaaggtcgacctgtcgcgcttctcgaccagcgctatcagcgagggcgtctactcccttgatgtctataccaacggcgaatggaaagggcgctacgacctgaaaatcaccgccggtaaagacggcaaaatgggcgtctgctataccaaagcgatgctgatgcagtatgggatttcgccggataaattaaatccgcagctcagcgaaaaagagggcttctgcggacgcctgcaggagtggcgtcacgaagataacgtcaaagacacgctgattcagtcctccctgagactggatattgccgtaccgcaaatctacgaagatcagcgcctgaaaaactttgtcagcccgcaattctgggataaaggcgttgcggcgctgaatttaggctggatggccaacgcctggaacagccatatctcctcggccaacggttccgataacagcagcgcgtatcttggcgttaacgcgggcctgtcgtgggacggctggctgctcaagcatatcggtaatctgaactggcagcagcagcaggggaaagcgcactggaacagcaaccagacctatctgcagcggccgattccgcagattaactcgatagtcagcggcgggcagatttttaccaacggcgagttctttgacaccatcggcctgcgcggggttaacctggcgaccgatgacaatatgtttcccgacggcatgcgctcctacgcccctgaaattcgcggcgtggcgcaaagcaacgccctggtgacggtgcgccagggcagcaatattatctatcagaccacggtgccgccggggccgtttaccctgcaggatgtctatccttccggctacggtagcgaccttgaagtgtcggttaaagagggcgatggttcggtcgaggtattcagcgtaccttacgcctcggtagcgcagctgctgcgtccggggatgacccgctacgcgctctccgccggtaaagtcgacgatagttcgctgcgtaataaaccgatgctctaccagggaacctggcagcatggtttaaataacctgtttaccggctataccggcgtcaccggatttgatgactatcaggcgttcctgctggggaccgggatgaacaccggcatcggcgcgctctccttcgacgtgactcactcgcggctgaagagcgatacccttgacgagcacggtcaaagctatcgcgccacctttaaccgcatgtttaccgaaacccagaccagcatcgtgctggcggcgtatcgctactccaccaatggctactacaacctgaacgacgccctctacgccgtcgatcaggagaagaactacaacagcaactacaccgtgtggcgccagaaaaacgggatgacctttaccgtcaaccagaacctgccggacggctggggcggtttttatctgagcggtcgggtggcggattactggaaccgttcggggacggaaaagcagtatcagtttagttacaacaacatgtacggtcggctctcgtggtcggtcagcgcccagcgcgtctataccccggatagttccggccaccgccgcgacgatcgcgtgtctctcaactttagctacccgctgtggttcggtgaaaaccgcaccgctaacctgacatcgaataccgcgtttaacaattcgcgtttcgccagctcgcagattggcgtcaacggttcgctggatagcgaaaacaaccttaactacggcgtgtcgacgaccaccgccactggcggccagcacgatgtggcgctgaacggcagttaccgtaccccgtggacgacgctgaacggcagctatagccagggcgaaggctatcgccagagcggcgtgggcgccagcgggacgctaatcgcgcatcagcacggcgtcgtattctcgccggaaaccggcactactatggcgctgatcgaagcgaaagatgccgcgggcgcgatgttgcccggttcgccgggtacccgcatcgacagcaacggctacgccattctgccgtatctgcggccttaccggataaattccgttgaaattgacccgaaaggcagcaatgacgatgtcgccttcggcagtaccgtggcgcaggtggtgccgtgggaagggagcgtggtcaaggtctccttcgataccacgctgcagaacaacatcactctgcgggcgcgccaggctaatggcctgccgttaccgtttgccgccacgatattcggtccgtccgggaaagagatcggcgtggtggggcagggcagcatgatgtttatcagcgacgccagcgcgccgaaggccacggttaagtggagcggcggacagtgctcggtggaattaagtcaggaaaaaacaaaggaaacgctatgtcgctaa

SEQ ID NO: 387900 - DNA, 702 bp, Salmonella enterica; identical to SEQ ID NO: 216676

SEQ ID NO: 387901 - DNA, 609 bp, Salmonella enterica
atgaaaaaggttcttctctctgctgcaatggcaactgcgttttttggtatggctgcggcaaatgctgctgataccaatgtaggcggcggtcaggttaatttcttcggtaaagttaccgacgtatcttgtactgtttccgtaaacggccagggcagcgatgcgaacgtttatctgtcaccagtgactttaacggaagttaaagctgccgcggcggatacctatctgaaaccgaaatctttcaccatcgatgtttctgactgccaggcggctgatggcaccaaacaggatgatgtgagcaaactgggtgtgaactggaccggcggtaacctgctgtcgggcgcaaccgctaaacagcagggctacctggctaacaccgaagccgccggcgcgcagaatatccagctggttctctccaccgataacgccaccgcgctgaccaacaaaatcatcccgggcgacagcacccagcctaaagcggccggtgatgcctctgccgttcaggatggcgcgcgcttcacttactacgtcggctatgcgaccagcaccccgaccacggttaccaccggtgtggttaacagctacgcgacttacgaaattacttatcagtaa

SEQ ID NO: 387902 - DNA, 246 bp, Salmonella enterica; identical to SEQ ID NO: 170643

SEQ ID NO: 387903 - DNA, 3438 bp, Salmonella enterica
atgatctggcgtgacggtgttcttcctcctggtgcgccggatttctcggctcaactcagcttcgatcttcacagttacgcgtatggtttgcttggactaggtctgcgccttttagagtcagatggcgacccgaatcaagcacggatcgcattcgaacaggcggcgacagcgcttgagtcggtcatggccaacggcaatcgcgaagaagctgatcgcgatttccattttctccttgcagctgccagttatcacctcgcgcacctttctgcccgggcctattccctcctcgcaattgtggccgatgaagcaaatttctcgccgatcgagcatgcgctaactctgttgatacgccgagatatcaattcgctgcgtacacgcgtatatacctttcgtctcgatggtcgtggatctgatgcgaccattacgacattcttacagcagcatctcaccgagtccatcgttgccgatgcggcggaacgagatggaaaggactttcttttcgaaggcctgaatctcgcactgacagatgttttcttcggtgccttttcgatgttcctgctcgccctagatcgcggtgaatatactcttctcgaaaaagcgatcgcccagcttcgtgaaaacctcgatatctgcggggagctgaaccttataccgcaatggtgggtgcaccggattgctatccatctgcttaaagatttctggtcgaacaccttccacgaaaaagttccgctgcttcccgctggcggcgttgccccttcgtggcctgtccttcgtgaactctttattggcttgctcgctcgacgcccaagggcagaggtcgacttgtggccgtcgcagattgaagcggcatcgcgagctgtcaaccagaccgacaacctcgttgtttcgttgccgaccagcgcaggtaagacccgcatcgctgaattgtctattctgagatgtttagccggtgggaggcgtgccattgtcgtgaccccgcttcgcgctctatctgcgcaaaccgaagccacacttcagcgtaccttcgggccactcggcaagaccatttctgccctttatggcagtatcggagtgtccggcttcgacgaagatgccatccgcgggcgtgatattgttgtcgcaaccccagagaagctcgatttcgccttgaggaacgatccgtcactgctcgacgatgtgggcttgctcgttttcgatgagggccatatgattggttcaggtgagcgcgaagttcgttacgaggttcagattcagcgcctcttacgtcgtaaggacgcagatcaacgccgcatagtctgtctatcggcaattcttccggacggagatcaaatggaagacttctcggcgtggctacggcgcgatcaaccgggaggtcccattaagaacgattggcgtccgacgcgtttgcggttcggcgaggtcacttggaattcgccgacagcgcgcctaaatcttcgcgttggtgaggaaaggccatttgtgcccagatttctgactggtgcggcaccgccgctgttcgtaccaccgaagaagcgtcgcaaccgactctttccggacaatcagcaggagttgagccttgcaaccgcatggcgtctagtcagagatggtcagacagtgttgatctattgcccagagcgtcgcagcgtcgaaccatttgccaaggtcatcgttgacttgcactcgcgcggtgcactcgagtctttgctaacagtcgaattgaccactttgcagatcgctatagcactcggtgaggaatggcttgggacagacagctatattctgaaatgccttcggcttggtgtggctcttcaccatggtgccttgccgacagcttatcgcaaggaaatcgagcgccttctgcgagaaggtatactcaaggtcacgatctcatcgccgactctggcgcagggactcaatctctcggcgacagcggtcgtcatgcactcgctctaccggcacggtgaaatgatcaaggtttcggaattcaagaatgtcatcggccgagcaggccgtgcttatattgatgtagaaggccttgttctctatcccatctttgaagatgtgaataacaggaagcacaacaaatgggtcaatctgatagaagaccacggtgctcgtgagatggaaagcgggctcatccagctcatcttctcgctgctgagccgcatgcactctcacattggcggtgatctcgaccatttgatcgactatgttgtcaataatgctgctgcgtgggtcttcccagaggttgccggtgaaaaggttgatgagcgagagcaggcgctgaaagagtgggatcgccatatggcgacactagataccgccattctcagtctcattggtgaggccgatgtacccgatgaccagatcgagaccgctctcgacagtattctccaatcttcactctggcaacgccgcctgctgcgtgttaacgacgaatcacgggctgcctatcgcaccgcgctgtttactcggagccgttatatctgggcgaattcgactgccgtcacacggcgtggttattttctggctgggcttggccttgaagctggacgtgcgctggatgcaattgcaccggagacgaacaatctgctcatgcaagctaatgcagccttggttgtatcagatcatgaggctgcaatcactgcgatcacagatatcgccgaacgcgtgttcaccttttatccgtttgaaccagacacgctcccggcgaattggcgtgaaatcctcagaggttggctgcttgggcatccgttggcaatgatgatcgccggagaggaggtagacgcattgcaatttattgagggcggtctgggctatcgtcttccttgggctatggaggcgttgcgggtacgtgccgccgccaacggtgataccgttggcatgccagcactagcgttggaagattatgaactcggccttgctgttccagctgtcgaaacggggacgatgaaccgctcagcctcaatactgatccaggcgggttttaattcacgacaggcggccatcaaagccgtcaccgatacggctgctaacttcacgaacggggcggaattgcgcgattggttgcgttcacctggtctcgctgtctattcggcacaaccaaactggccaacggccgaagctcggactatatggctcgaattcatccaggaatttgctccgtcagacaacctttcttgggcgcggcgagattatcttggaaacgtcaattggttcgatgttccggcgccttccggaactccagtcggtctctttcattggaacggacaaccgctagtgcttgcaccagatgggcacgcgattggtctgctacaacaccctcttaaccttaatcggcgaggacttgtgcgagcgacggtcgctatgaataacggccagatcaatctgagctatctcggccctgatgatttgtgggtagttgcgaagccacattaa

SEQ ID NO: 387904 - DNA, 780 bp, Salmonella enterica; identical to SEQ ID NO: 143737

SEQ ID NO: 387905 - DNA, 837 bp, Salmonella enterica; identical to SEQ ID NO: 141374

SEQ ID NO: 387906 - DNA, 1650 bp, Salmonella enterica; identical to SEQ ID NO: 141373

SEQ ID NO: 387907 - DNA, 3123 bp, Salmonella enterica; identical to SEQ ID NO: 141372

SEQ ID NO: 387908 - DNA, 1434 bp, Salmonella enterica; identical to SEQ ID NO: 141371

SEQ ID NO: 387909 - DNA, 804 bp, Salmonella enterica
atgatacgtattccattattcaactctcagcaccttgaggccgcttgtcgcgttcttgctgataccgaacgtggcttgagtggggcgcagatcgagcgactcctacaagaaatcaaagttgccgacacatcgccaagcatgacaaaatggaaacggctgtataatgcgctcgtaggtgcgcagaaccaatatcaggtcggcaaccatctcataatgttcattaaccgtgcgatgaatccggtaaattacgctcgtgatccagcagtatttacctggaggcgtgatgaactcaatgttgtcctagctttttccggcttttatgtccgcgaagatggtaaggtcacgaacgctactaaagcaacaacactcgattcagccagagcccgcgccgggcgacttaaggctgcactcgaaaaccgtgctgtgcatgcagaagttttgaactattgtcgtgcagaacttctggacgaaaactattttcatgccgtcttcgaggcgacgaaaggggttgcggaacgtattcgtcagttgtctgggttgagcggcgatggtgctgacttggtgaacaaggcatttaccggacaacaaccagttctgaccttgggaccgctcactaccgactcagaaaagagtgaacaaaaaggttttgcgaacctactcattggtctattcggcgctgtgcgcaatccactggcccattcgcctaagaagaattggcccatgtctgaattggatgcgctggacatccttacgttggtttcgcttattcatcgcaagctggatggcacacagaaaaaaatatag

SEQ ID NO: 387910 - DNA, 480 bp, Salmonella enterica
atggcactgaccccggctcaaatacgctacctcaatcaatgtgaaccaggcgaacctgtgtcacatgcattgtccgagctactattcaatgatcatgatctactcagtattgatgctaacgaacggtccattacctttcgctttgcgatgtacctccagctatctttccccggttggaatgtagattgcgaatataaccgggatggtgtagaacctaaacggctcagacatttggagctttatccagacagcgaagacgttgaagcaaagacagtatttcctgatgtgatcgtgcatcggcgaggtacacaacagaatcatctggtcttagaatttaaaaaatcaacgagtcgcgtcgatagacgaatcgatctactgaaacttcaaggttataagcagcagcttggctacgatcacgctttgtttgtggaggtcggtactgagggacaatcgattatcacggcgctcgagtgggtctga

SEQ ID NO: 387911 - DNA, 237 bp, Salmonella enterica
atggaacaaccaaacagtttagctgttcagttaggcgctttcgatactatgcttcgcgctattttgcacgtagttggtgatgatcaattgaatggtattaaaaaggagcttgaaagaacctgggattatcttgagaaaaacaatccaaaacctgccgcagcatcgcagtttaaagcttcaagagaaatggctattggaatgattgagcatgagctgcaagtgcgttctgcaaaatag

SEQ ID NO: 387912 - DNA, 291 bp, Salmonella enterica
atgaagtttaccgaactacctgatcatgtaattgaagcagcagcaaaaacgctttctcgcgaacttgaaggggtatcgacgtggaaagatgatgaacgaacggaaaaggccaaagctgttgccgaatccgttcgtgatagttttatccaattgtgttcagaggagaaaaatggcacttcctcttttaattgccaaatccgacttggcattcagaagcgggaagggaaagatactaatcttgaatctattttgcagaacgcacttgcagctcatgctcaatcattccaatag

SEQ ID NO: 387913 - DNA, 222 bp, Salmonella enterica
atggcaatggaaacagaagttggcaacatcactgctttcgataacgcgaatggacagggtgtgctggttacagttgaatttaaggattatgcccttcgccacgaggggattcgtgtctttgttaatctcccgctagataaagacgtttccctggcagatattgaaactcaatccattgaaaacgcaaagcagcaactgaaagacttggtagctggcttctga

SEQ ID NO: 387914 - DNA, 3360 bp, Salmonella enterica
atgcctgagaacgtcggtgatattgaatatgtaattaaagctgatacggctcagctactgcgtgctgataagcaggtccgcgatataacagacggcatggaaggtggattcaaccgcgcagataaggcagcttcatcgttaacatcatccttcggtagcttaagccgggttgccacttctcttatggctattttgtctgtgcagcaggtggctcaatacgctgacgcatggactactctcaacaacaaactagcaaacgcccttcggcctggcgagcggctggttgacgttactgagcgagtattcaacatcacgcagcaaactcgcggcagcctcgacgctacagcttctttgtatgcaaggctggagcgagcaactagggaatatggaaccagcgctgatgatctggctaagctgactaccatcatcaaccaagggtttgttgtctccggtgcgaccgcgcaagaggccgaaaacgctattatccagttgtctcaggggctggcatctggcgcgctgcgcggtgaagaatttaactcagtgaatgagcagggcaaccgtctgatcgttgcacttgccgactctatgggtgttggcattgggcagatgcgtcagatggcagccgctggaaaactgactactgatgttgtggttaacggattactttcacagggggtgacgatcggcaatgagtttgccaataccacgacaactatcagtcaggcgttgcaggtagccgggaacaacatcaccaagttctttggtgaaaactccacggtaaaaaccggtacagcgattttcaacgatgccgttatcagcgttagcgagaatatcggcgctcttggtgccatcctgaccgccactgctgctgtgatgggtagccgttatgttggcgcactgactatggctacctcaaagaaaattgatgatattgcagcatcgcgccagcagcttgtcgcagaaaggcaggcagcacaggctgctttgttcgctgctaattctgttcagcgtaaggctctggctgataaagaggctgctctttcttctctcgcgctggcccaggctgaatataacgttgcaaagggtagcactgctgaaatgttagcgatggatgcgcttgttgcagcaaaatcaagggccagtactgcgtctcttgctcttgcggaagctgaaaacacacaggctgctgcatcaactagggcggccgcagcggcaagggctgcctctgtcggggttagcgctgccgggaaggctctttctcttgttggtggccccgctggctttgcaatgcttgcagcgactgccgtgtattacctctatcaaaaagtacagcaggcgaagcaggagagcattgattttgctgactctcttgatggcctgacagccaaaatgaaggagatgagctctgtgcagatagcttccgctattgcgaaaacagagcaatccatcatcgatcagcaagatgcaattgctagtttaagagctgaatatgagcagcttgaacagaaaaaaacctttattgaacaagccgcacagattagagggacggcagcggtagctgatgatttagcagaggctaatcgcaatctggccgtgcaagctgataaggtagagcaggccgagaataaattaagcagaacaaccagctctcttggcttgcttagggctcaagctaacggtcagttccgtgagggaattgacctgcttcgccgggatggggaggaggcgggtgttgccgctggcatgatgggcaaccttggcgacatgattaactttgccgcaaaagcgaaggagaaattcaactccagcagtttgatggtagagcgcccaaaagacgttcaggactatcttgataaactgcaagaccaggtgacactccagagcgagcttaacgatcgtaagcgtgcgcagttgaaggcagagcaggacataagaaaacttggtggaactgaagccgatgtcagactggcgagggagagggctgctgctgaatacgacgcccagcaagctcagcagaaaggtaagaaggaagccaaagacgccacgtctgaggcgaccagatatgctaatcagcaagaagtaatcgcccaaaaacttacgaatttgaagcaacagtctgaacttgccgccaggtctacttctgagctaagcagagagcaagcggttatcgcagcgcaacaatcacttggcaaaggtgctacccaggaacaaatagcgctggctggtaaatatcgaggcgaaatttgggacacggccaacgcacttaaagcgcaggccgctgctgagaagttattaccggaagcgcgcgagaacgccagttataaacaggatgttcaggatctgaaaactgcgctggatgcgaaaaaaatcagccagcaacaatacaatcaaaccagtgaggtgctagagcaacaacatcaggctaatctggcaaagatacgttctcagcaagtagttagcccaatgcaatcagccgtggcagaagttgatccagttcagcagcttgccaatcagcacgcgcaacaattagcgctaattcagcaattcgagcagcaaggagtcatcgcgcacgataatgctcttgcactgaagaatgccgctgataccgagtatgaacaggcacgcatcgccgcgcagtgggaaattttccgcaaccagagtcaggccaatgagttactggcatcctccctggaaggcctgcaaagcggagcgactaatgcccttaccggtctcattagtggcacccagagtcttcaggaagcattcgccaacatcggcacgacaatcctcaatagtgttgtcggtagtctggtgcagatggggatagagtgggtcaagagtcagttaatgggtcaggccgctgctgctgcatcactggcatcgacgatggctcaggctaccgctgctgcatctgcatgggctccggccgcaatgagcgcttcaatcgcaaccatgggtagcgctgctgctgttggccagactgcatatgccggttcattgctggctgcaaaaggaatggcggtggcaggtgctcgctacaacggagggcctgtagatgcaggttctatgtatcgggtaggcgagcacggaaagcctgaaatatttcaggccagcaatggtagtcagtacatgatacctggtgataacgggcgggtgattagcaaccgagatatgcatggaagtggtagtggtggcagcagcgtagttcagcacattaccttcgaaattaacaccaccggcggcatagacgatgcaacaaaggcgtggattgttaaatctatgaagcaggttgctctgtttcagatcaatgaccaagccaaccgcccaaatggtatgatacagcctagaaataagcgttga

SEQ ID NO: 387915 - DNA, 288 bp, Salmonella enterica
atgtataaagcaataggtggtttgttagttgtaacaggaatttgctgggtagggtatgccttcagcatggatgtggctgtcggatattcggagaaagtttataacacagggctcttagctactaggcagctgcatgctatgtgcggttcagctgttgcaatcattggctcaataacgcttatagcaggcattgttgttgagaaaatcgaagagatctccaaacgaaaacaagatgtcttggtaagcatcaataatggtatggcagattactttgatagtaaaaagtaa

SEQ ID NO: 387916 - DNA, 354 bp, Salmonella enterica
atgaagaaggtagttgctttagctctcggggctttaatgctgtctggctgtactgttcgcgttgctgatatgaccgtaggtagtaccaaaaactacaacctgaacgcagctaagtttgaaaaaggtcagcgcgtaactggtgaagacaaagctccgattgtcattttcccactgggcattcctagcgtcaaaacagcaatggatcgcgccatcgaaaaagataagtgctctgtaggtttgagcgatgttgttatctatcagcttaaccatgcgttcctgttcggcacgtatggtttccgtgttgaaggtactcaaatcatcgataaatctcagcttggttgcgaaaaccgctaa

SEQ ID NO: 387917 - DNA, 729 bp, Salmonella enterica
atgacttctaagaatgtagcaaacatcggatctgttgtcacggacaaaaccattgatagccagtccctgctggcaatggtcaatgaggcgcgcaaacagtgcggtgagccggaagttcgcaataacaaattcatcgagaaagttgaagatgaactggatggcgagcactacacaaaaagtgtagtgcaaaaagcgaacaaaacctcgatgatcatcattgatatgtccatcaagcaagcgctccgcgtggccgccagagaatcaaaagcggtccgccgctcactggtagacaaactggagagtatgcaggaagcgcacattaaaagcggtaagtcagcgagtggccttgttgagtatcgtcaggcccgcacactgaaaatgacggttgaagcagttaccaacctgttcgatctgatgcctaaccttgcacctgaggcaaagcagacggcggccgccagtatcatcaatccaattgtaggcttcaatgccatcccgctaccggctattgaggagcattactactcggcaagagagattgcagagcaacttggtgtaacggcgaataaaattggacgcatcgccaatgctaataacctcaagaccgagaaatacggcaagttcttcctggacaaatccgctcactccagcaaacaggtagaggcgttccgttacaactcaaacgggattgaagcgctgcgccatctgatccacggcgctgatgtagcgtaa

SEQ ID NO: 387918 - DNA, 168 bp, Salmonella enterica
atggaaaaagcaaaagacatgtaccagcgtaaggttcgcttccctgaggacgtgcggaaagcaattgagaagaatggcgaagatgagtgccgccatttcaatacggagctgatttatcagttgagaaaggtatacgggttgactggtgagaaaaatgcccaagcataa

SEQ ID NO: 387919 - DNA, 456 bp, Salmonella enterica
atgagcagagaagatcctcagttacggataagacttcccattgaattaaaagagaagattgaatccgcggcaaaaagcaactcgagatctatgaacgccgagattgttcagcggttggattctagcttctatgaaagcatgcagctggaagaactaataccagccgatcaagccttgcaagtggtcaaagcagcaaaagatgagctatctaaggttattttcgaaaggacattttctgagattaacaagaagatcaggcttggtcatactttgtttagtattgaccttacagacctagaacttgatggtttaagtgacaatgattatcccgccgtcttcacccctacatttagcaagctatcctctttaggatatgtggtacccgaaacaatgcgtgattgcgatgggtttatggtagagattccaacaaccaatgaaaacaaaaagcccacctga

SEQ ID NO: 387920 - DNA, 267 bp, Salmonella enterica
atgatctctggacttcatcactttgattcatggctttctcgtagcacctggtacactcttcatcccgatgaagaaaaactcttctatctggcgttaaaaaaaattattgcggaaaatccaggtgtattgatccacgagcagtacgtgagggattacattttaaacaaaaaagtctcaacattggctgatgataccctcaagcaagctgccaaaaaatatgggaagctagctgaagatatttcagattacgtattgaacacacagtga

SEQ ID NO: 387921 - DNA, 522 bp, Salmonella enterica
atgaatatcgtgccacttaattacaaaggtgaagttgtcagtttcaacactgatggttggatcaacgttacaggtgttgctgagagatttgggaaacgcattgataactggatgcgtttggcagaaacgcttgaatacgttcgtgctttagacgaagcgttgaccgggaaagaatctcaaattttacatccctcacaatcgaggtatgtaaaaaccagcaaggcacgaaaggacagaggtggtggtacgtggctacatccaaaactttcagttgcatttgcccgttggtgtgatgctcgttttgctgtgtggtgcgacctgcacattgatagtctgcttcgcggtgaactgactgagcagcagaaatatgagcaagcgtgtcgcattcgtgatgaccggaaatcaaaagccagcaatggagcaagagagatggctcgctggcgatgggataagccggtcattgaagccaatgttgagttctggcgcgagcaactacagttgactctcgatatcgcgtgctga

SEQ ID NO: 387922 - DNA, 462 bp, Salmonella enterica
atgatgttcaactggaaagcgatgtttgttggcctgttgctcgtctctctaattgttgctgttcggctggcaaatcactaccgcaataacgctatcacttacaaggaccagcgcgacaccgctacccacaagctgacactggcgaacgcgacaattaccgacatgatgaagcgccagcgtgacgttgccgccctagatgccagatatacaaaggagcttgctgatgctaacgcgactatcgaaagtctccgtgctgatgtttctgctggtcgtaagcgcctgcaagtcgccgccacctgtgcaaagtcaacgaccggatccagcggcatgggcgatggagaaagcccaagacttacagcagatgctgaactcaattattaccgtctccgaagtggaatcgacaggataaccgcgcaggttaactacctgcaggagtacatcaggagtcagtgcttaaaataa

SEQ ID NO: 387923 - DNA, 327 bp, Salmonella enterica
atgaaaaagatgccagaaaaacatgatctgttaaccgccatgatggcggcaaaggagcagggcatcggggccatccttgcgtttgcaatggcgtaccttcgcggtcggtataatggcggtgcgtttaagaaaacactaatagacgcaacgatgtgcgccattatcgcctggttcattcgtgaccttttagtcttcgccggactgagtagtaatcttgcttacatagcgagtgtatttatcggctacatcggcacagactcgattggttcgctaatcaaacgcttcgctgctaaaaaagccggagtcgatgatgcaaatcagcagtaa

SEQ ID NO: 387924 - DNA, 180 bp, Salmonella enterica
atgaacgactttaaaacgagaagactcaacacaatacatgcaactcttcaagaaatcgccgacaagactttagagatatctatgtcaacgttctctgatgagaacaagcaaaatcttatcgaaccactaatgaaaagacatgccgaactgatcgttgaagctcaggaattattaaagtaa

SEQ ID NO: 387925 - DNA, 492 bp, Salmonella enterica
atgttaaaacgtgaagatgcattgagactttttaattacaatccagatactggaattcttacatggaagaatccacctcggtcttctagatttatctatggcgctgttgttggctataaaacaaatggatatctgcaggtaaaactttatggaatgcggctatatgtccatagaattgcatggctgatggtttacaatgattggccaaccgatgtgattgaccatattaatggtgataggtctgataaccggatagccaatcttcgtgttgttactaacactcaaaactcatggaacagcaagatgaggaaaaacaattcatctggtgtgaagggggtgacttttaattctgctgcaaacaagtgggttggaagaattagggtcaatggtaaaagggttcatgtggggtgttttgacgatatcgaggaggcgagaaaggcaatggaaaatgccaggataaaatatcatggtgaattctccagtatgggatag

SEQ ID NO: 387926 - DNA, 219 bp, Salmonella enterica
atgagtgattcgtttagtagctctgattatttgtattttgttttagtacctgtggcagaagtattccgctctcgatttcctgaaggctcagcaccatttaatgccattcgcacttactcaaaatgcagagtgaaatttacaggtaagcggctggaaagagagtggcaggaattctgcaaaaaacatgacctaaaaaatgaccctgaactggagtattaa

SEQ ID NO: 387927 - DNA, 267 bp, Salmonella enterica
atggacgaatcaagaaagcagtttgaagaatggtttaaaaacaaatatcacgtttcaagtgacgtgatgaagattatgcatatcaaggtcgagattgcatgggagtcgtggcaggcatcgcgagcagctattgaaattaatttgcaaaagccaaagcgaggaccactttacggtgattatcacattggctatgactcaggtgcagaatcacaatacgaaagcgatgtagaggccatccgtgccgctggaatcaaagtgaaggagtga

SEQ ID NO: 387928 - DNA, 246 bp, Salmonella enterica
atgaaaatcaaaactatgggtgcaagcccactaacaggccagatttttcagggaaccttgaatactgaaaaaggaatgtgggtgggaaaaaaggaagatgttactgagcaagcagttaaagcggtagctgaacatctgatgattaaaaatcagaagtatgcatatgtggtgaaggatggaaagtatttaatcctaagccaccagatagttgatgaactacctgctgaatttgccagaaaagcatag

SEQ ID NO: 387929 - DNA, 801 bp, Salmonella enterica
atgaccatccactttcacggcagcccaatatggggggatgagcatgcccctacagatatgctgattaaagccctttaccgtgatggtggggcttttgtttcatttgccagaccagagcagatgaaaaagattgccatgttcccttgtgacatacgccttgataacggcgcttttagcgactggatgaaagcatttaagaaaggtactcctgtagactggagtaagagacgtgcaaaattctacgactttgttgggaagtggttcagcagaattgaatggtttcttatacctgacgttatcgaagggacagaggcagaaaacgacgagcagattgagttggttcctgattggctcaaatcaaaagcggttccggtctggcacaccgacgaatcaattgaacgtcttttacgcctttctggcaaatttgaatgggtagcgattggatgctgcggcccacacaggcacatacgctctaaatggtggcaacagagaatggatgaagttttcgctgagctttatatcaatcgtaatttgaaagtgaaaattcatggtcttcgaatgctcgacgtgagagttcttggtatgtatccgttcgccagtgcggattctactaatgttgctgttaacgtaccgaagacagagaggcgatttcctgagattaccgacaaactggcacgtacagctgtacttcgcgcagctattgaaaaggtgcacccaccatcgatatcagcgtgggtagacagaaagatgagagagccggcgcaagccggttttttatttgaattcaccgacgccgcttaa

SEQ ID NO: 387930 - DNA, 477 bp, Salmonella enterica
atggaaaaggatatttttccttttatcggtcagcgcccaattgagcagattgaaccactagagctgctaaccgtcctgcaaaaaatagagaaaagaggtgcactggaacaaaccagtaagatccgccgccgctgcggtgaggttttacgttatgccgtcgccaccggacgggctaaatataactttgctcctgacttggctattgcactcaacaagcctaaaactctacacttcccgttccttactgaaagtgaattgcctgattttgtcaatgctctggaaaactatcaaggcagtttagtcactaaatatgccacgcatctgttgatgctaaccggagtgcgcacaattgaactatgtgcagcggagtgggctgagtttgatttagataatgccttatgggagatccccaaagaacggatgaagaaacgcgcccccatttggttccgttatctactcaggcgatcagcatcctga

SEQ ID NO: 387931 - DNA, 249 bp, Salmonella enterica; identical to SEQ ID NO: 374213

SEQ ID NO: 387932 - DNA, 780 bp, Salmonella enterica
atgtataatgcttttactctccccatatggaaccctaacatgaatcgtttgactgagattggttttatcaaggtaggattctggcaaattatagacggcagcctgaagtaccatctcgatgacagattcactgatgttaagaacaacctctatgcatttgtttgtgatggtgaggtaaaatacgttggtaaaaccactcgtctactacgtaacaggatgtaccattattcacgtccaggcccttcccaatctacgaatataaaaaataacgctaacatcattgagatgctatctaataatgttgccgttgatatcttagtacttccagattcaggactgatgcactacgggcaatttcacttgaatcttgctgctggtcttgaggattcaatcattagtgccattagtcctgaatggaatggagttcagaggccagaactgaagagtgaagaagtaatatcaactgaagctgaaatcatcacacacaatagtattaaacaattcactttcaacatgacagatacgtactggcgtagaggattcttcaatgtgccggtagtaagttctcaaaagtttggtaaagacggtgagaacatcaagattattcttcgtgatggcatgtcttccatcactgcaatgattaatcgaactgccaatcagtctggttcaccccgcatcatgggtggcgttgagcttagacagtattttcaactcaattacacaattggtgatgttgcacctttcgaggtaatcacacaaaacatgatgaagctaaaatga

SEQ ID NO: 387933 - DNA, 972 bp, Salmonella enterica
atgacggtatatcttggtatcgatattgccagtaagaaatttgatgtagcagaactctgtgacggaaattaccgatgcaaagcttttgaaaacacatccgctggatttttggccctctataaatggcttggtcagagcacaatgccagacattcacgcatgtttggaagcgactggtgactatggcacttcactcgccacatttttgtatgaaaataagataaaagtcagtgttgttaatcctgcacgtattaaaggattcggtgcatcggaactttcgcgcactaaaaccgacaaagcggactcaaaacttattgcccggttctgtaaagctgctgtgcctgacggatggaaaccaacgccagcaccagtgagaaagttgcaggccctcgtccgtcgtatcagcgcgctcaatggtatgttaagaatggagtgcaaccgtcgtgagaatgctgaagcaaacattcaggcttctctcgatcgcatcattagcctgcttaaaacggaaatcgaggttgtccggcaagagataaaagatcatgtgagaagtgatgacgaactgaaaaagcaggatgcacttatacagtcagttcctggtatcggcgaggtttcgagcaatctgattttatcattcatgtccggtaaaggattcaggaaagcaaaagaagtcactgcgtacctggggctaaatccacgtcaccatcaatccggtagttctgtcagaggcaagacgcgtatgtcaaaaatgggtgatacgcgactaagaagtgccctttatatgcctgcgttggtcgccctgagatataacccagatataaaggcatttgggcaacgactattgcttgcaggcaaaccgagaatgcttgtcgttggagccgttatgcggaaactaatccatatagtattcggggtactaaagtcaggtacagcgttcagttcacgcatagctgtacattctgtagttacaagctga

SEQ ID NO: 387934 - DNA, 402 bp, Salmonella enterica
atgcaactttccgcgcgcatggtggaaagactctatctcggtgaacatgccggacacgttttcccgaaagaggacaatacgccgggcgtaacgtcttcgcttcatcgcgatctcgacggtaaaacgttggcaatttacagcctgatggaaggtgcggcgagacgcggaaaagaggctctacttaagttatatcctgggttgaatgtggaactcaatcacgatcacgtagctactccggcgctgataaatctggcggaaaaagctgactactttatctttgccagcggtagctcaaagcatcaggcgttctataccgtgactgattatcgcaaagagataatctatccctccggtaaaggggcatcgagtatgatcgcagccttcgtcagtgcgctggattga

SEQ ID NO: 387935 - DNA, 150 bp, Salmonella enterica
atgtttcatccgacgaatcccgtcagcaagctaagcaaaagccagcaatatcgggttgcttacaatctccccgtgctctttaaggtgccgcaccttatgaatcccgcttgcgctcgtgatggttcatctggcgctctacgcgtcgattga

SEQ ID NO: 387936 - DNA, 135 bp, Salmonella enterica
atgagtaatgtactggaaatgttgaccactttaacgggtactgatgttattattgctcgcttatgtcgtctgcatagcacagaggacccttcaatgaacagagaagaaatgcactgtgatgttgtcaaaatttaa

SEQ ID NO: 387937 - DNA, 1302 bp, Salmonella enterica
atggcagaaattattcagcgtatagataaaaacaacgctgaggctccggagatgcggcgacgcatatgggctatcgtgggggcatcttccggaaacttagtggaatggtttgatttctacgtctactctttctgctcgctctattttgcacatatcttctttccttctggtaataccaccactcagcttttgcaaacggcaggcgtctttgccgccggttttttaatgcgacctatcggtggttggctgtttggacgcattgccgatcgacgcgggcgcaaagcctcaatgttgatttcggtgtgcatgatgtgcatggggtcgctggtgattgcctgcttacctggttacgataccatcggcacctgggcaccggcgctgctactgattgcaaggttatttcaggggctctcggtagggggagagtatgggaccagcgcgacatatatgagtgaagttgcgcttgaaggtcgtaagggatttttcgcctcgtttcagtacgttacgcttatcggtggccaactactggcattgctggtcgttgtgattttgcagcaggttctggaggatgctgagcttcgtgcctggggatggcgtattccctttgcgctgggcgccgtgctggcagttgtggcgttatggctacgtcgccagctggatgaaacctcgaagcatgagactcgcgcgttaaaagaagccggttcattgaaaggtttgtggcgtaatcgcaaagcctttttgatggtgcttggtttcaccgcggcaggctcgctgtgcttttataccttcaccacctatatgcagaaatatctggtaaatacagcaggtatgcatgccaatgtcgccagcggcattatgacggctgcgctgtgtgttttcatgttggtgcagccgttattcggcgcgttatccgataagattggcaggcgcacttctatgctatgttttggcgcgcttgcgacgcttttcaccgttccaattctctccgcgttgcagaatgtgacgtcgccttatgccgcatttgctttagtgatgtgcgcgctattgattgtgagtttctatacctcgattagcgggatcctgaaagcggagatgtttccggcgcaggttcgcgccctgggcgtcggtttatcttacgcggtagcaaacgcgttatttggcggctctgcggaatatgtcgcgctgtcgctaaaatctgtcggtatggagagttcattcttctggtatgttaccgcgatggccgttctggctttcctggtttcgctgatgttgcaccgtaaaggaaagggcttgcgcctttag

SEQ ID NO: 387938 - DNA, 126 bp, Salmonella enterica
atgttgcagggtcaattggtgggcaacttcattaccatctcggtggatgtaattatgaagaagacatttgcccctttgcacagggtcgtggatgttacggttgcctgtatttcaaaccatttatag

SEQ ID NO: 387939 - DNA, 1641 bp, Salmonella enterica
  misc_feature (1520)..(1529): n is a, c, g, or t
atggcatataccatcttacatttatcgaggaacaaccagagaactcatctcatagttgatgatgtgactaccctaccggtcatgttcgccacaatttatggaatgaatgaactgagcaagaaaagcctagggactcaagaaaacattttgtgttcgctgcgtttcttttacgtctattactataagaagcataaacaaacatttgactacgatttctatcggtctggctacaatatctcctgttttatcagggagcttgatggcttctttacttatctgctcgggaagcagcacctgagtgacgagaccgacataatctctaacgggtttttacattcggcactctccagaaccaacaagtccacctatggtaaccacgtcagaaacgttggccgattccttaagtatctcaactatagatatatgaatctggcataccaagatatgtcacctactgaagctcaccagattaaccaggcgaaccatagagatctcgctgccagaattaaggtcttcaatagagttgaagtatccaggaacgaaccagctcaccgatacaaaagtatcaccagccagcaaagtatcgaactaacgaacatgttaatcccctccactcctgaattttcagatatcgagaccggcgaactattcacggccgtggttaatccccaaaacccattcgattcaggatttcaacaataccgtaactaccttattcaccggttaatgtttaactatggcttacgtgttggtgaagttcaattgttgatgaaggattgcgtggggccaacccttccagactcacgaggtaacattcgtttcatcctgattgtacaaaatctaccagatgatgtagttgacccaaggaaacaacaaccttcactcaagactgagcattcacagcgacaaatcgaactaaccgaagatgacttcattatgtttaccatttatatggagcaatatcggtccccattatttgaagagaaaaaaattgttgaccatgagtttgtttttattaaaggctcaggtaggttaactccattaacttacgatgcaattcgaacattttataaggaaaaaattgatccggcattcattgccctattccctcattatcgtacgaaaagtaataaaaatattaataatatggttaatataacaccacacgttgggcggcatacttgggctaatatcactcttgagtttatttacaatagtctcctgagtgaatcactaatactggcgcaagactatggtattcgagcaaggatgaatggagtacttgaaccagctattgaacaacttcgtgctttaggcggctggtcactgaccagtaaagttccattaagatatgccaagcggtttattgaagtggtgagtaaccagagcaactataagcgtacgaaacattcagatatgcatttagcttccccagaaacaaacatttcgcaaagaaaaacctccaacttgctagaagataatgtttatgacgaagacttcacattcaaagatctattcannnnnnnnnnactgagagcggtatcaccgggggtggtttttttaaaacccatccccttcactttacaaaagaacagcttgaatggattgaaaatattcagctccctaaacgattgtttttaa

SEQ ID NO: 387940 - DNA, 519 bp, Salmonella enterica
atgcatcagcaggaagttctgcgggtccgactccaggcccactttgttcgacacccgtgccgccatcggcaccgccgacacccccgccgaaccgataagcgggttgattttgttcttactgcacaggttcagcagcttcgccatcagcaccccggccgccgtcccgataccaaaggcaatcacccccagcagcagaatgcccagcgtctgcggctgcaggaacttgtccgccaccagcttggcgcccaccgacagcccgaggaagatggtcacgatattaatcagcccgttctgtaccgtgtcgctcagacgctccaccaccccgctttcacgcatcagattgccaaagcagaacatccccagcagcggcgcggcgtccggcaacagcagggccaccagcatgagcagcaccaccgggaagaggattttttcccgcttgctgacggtgcgcagctgcaccatgcggattttgcgctcagtctccgtggtcagcgccttcataatcggcggctggattaa

SEQ ID NO: 387941 - DNA, 1134 bp, Salmonella enterica
atgctcaaaataaaaatgcacaaggctgataacggggattgtgttgcaatagagacggagtgtgaattcatcttaattgatggcggtactgcgcaatcttttgactcatggaaatcccaagttattggaaaaacggataaaatcgacgctataattgttactcacattgacaacgatcatatcaatggagtgatcaaactattgacacattccaactgcccgagtgtaaaacaagtttacttcaatggggcagaacaactatttggtcaacttgctagcgatggtttagaagatagacgtgtagaattaaagcttcaggccttatccgcagaatgctcagctattagcaataaagaatccatagggtactctgaaggagcttcgttatcgtatgtgctttccagcaaaaaaattatatgtaatgctgtagtttctggtaaggctttatacagagaagtatgcgagagttttgaaataggctctcttaaatttacattaattggcccagtgaaaagctcacttgatacgctcaagcaggtctgggaatataagctagaacagcataatataaaagcccggattatcagcaagcctttctatgatgctttcgagcaatacacaggcagtataaaatcatcaatacagaataatcaccaaatttcatcagacaaaacaagcagtattaaagctctggcaaacttaccatttgttgatgatgattcgccgaccaataggagtagtttctcattcttaattgaaaaggagaataaacgaattctttacttaggcgattgtgattctgaagtcgtcatatcatggttagatcaacaaaaaatagaaaaaattaaagttgatattgtgaaaatttctcatcatgggagtaaaaataatactagcttgatgttattaaaacgtattgactgttcaaagtatttgattagtacaaatggtaattctcataaccacccagatatagagactattgcgagaattgcgcttgttaataatgagtcagagaccgaaattttactaaactatgagcttgaaaaaatacctgattggtttattaaagagctttctgaaaattacccatcaatgacgttaataatgaactcttgcgaggttgagttatga

SEQ ID NO: 387942 - DNA, 1449 bp, Salmonella enterica
atgacagtcggaacattagaagagttcaaacttaactgtatatatattcttcaagcttcattatctgataatgtgacaaagcgtgggacgtgcttttctattggtgaaaacttgttacttactgcaaaccatgttgtctcaaatgcaacttcaataaaaatatttttgacaagtgactcttttgtacaaaatcagcacatcgaagctcagtgtatttacagtaatgcagatctagatatcgcagttctgttggtgccagacggagtaatacaaaattcaattgaattgtattccacagctgtgagtttagataatgaagtgaaatcatgtggatacccagcagagaaaggacactatcacgctcctatcagagttaaggtaactaatacattttcgcatatggaaagtcgtgattatagctttgaggtatcacaatctgatactgtcagtaagtatgatggtatgtcaggttctccagtaatgtatgaaaatcgttgtataggtatattattagttcagcagggaggtaatacactatatgctctatcggttaaagattttttagctgatagttctttgcacgaaatagttatcgcacgtgacataaaaataataatccaagatggtatcagttacaaagcccctgattttccaaaatcaccatttacgtattgcattaattgcaataatggtcatcctaatattaagggtattgatattggttttaccatgagacaatggaatatcaatgaatttacggagtctgtttacgattggatgatagactattgtctatcttacaaagaaaaagtcaatttttcagggggtgaacgaggtttgtttaaatatgctcgttcgcattatccggttggtgagctaaatgcattgggcgatctttgcctgcacatagcaatcagagaatcttattcgacgattccaattatgaataaggttttcgatgtaaataacaaaaccttttcgtgtacccatgctgtgctcaattttgatagcattgagctctggatcggagcatcatcggtcactacaaatattgaagaagcaacgctgtctgctatcgaaagtataaaatatatcgttgacattaagtcgcttcaaaatagattaattacactcacagccgaaatagataactcttggcctcatcaggaaaaactaaaacgtcttgctaactcaagtttggcattggataaaagatttgacaagattattattccagtatttatcatgcataatagtgagttaattactaaatatgatgaagcaaatttcattcgtttgtttaacgataatgtagcaaactgcaaaggaatattacaaaagaacatagaccagagccttattaacttgatcgatctgagagtgttctattttccggtatcagatattaatgaagttaacaatgctttaatgaaggagttaaactcatga

SEQ ID NO: 387943 - DNA, 2166 bp, Salmonella enterica
atgagcgaatggtatcaagattcaaaaaataaattaaatgatctctctttcgctgaatgggataattttttgatatcgctggtaaataaatttaatgagcataccaacgaatcattagtgcaagatattgtcatcaggtccctagaaagaaggcatgaaatacctaatagctttattctggaccatattttaggtgagttaggtcttttcccatacgttgatgcgaaaaataacgcatcaaaggataaatttaggaaagccatttttaccacccctcaagatgaaacaaagatatttcacatacgccaagctgaagtatttcataggataatgagtggtgaaaatgtaattctgagtgcgcctactagttttggtaagagtcttattattgaagctctgattgccagcaacgagttcaataatattgtaatagttgtaccgacaatcgctctaattgatgagttaaagaaaaaactattcaaatataaagataaatataagatagttacacagatttcacaacaaccaagcgaaaggaatgtttttattctcactcaggaacgagtgttagaatatgctgatttaagaacagttgatttctttataatagatgaattttacaagcttgcaccagtcggtcaaaatgatgaaagatgtgttcgtctaaatcttgcattcagagaactatattcaaaatgtaaacgattctatatgttagggcctaaaataaatgggcttttctcagggattgaagaaggattaagatgtacatttcttaaatttgattcatacacaactgttgcaacaaatgaatattatcatacattaaaaacaactggcaacgatgcggtcgttgatattgagagagacgctgttttaaaatctatattggctaaaataggtagaaatgaacagacagtgatttactgcaagtccccaaaacgagctagctccctgatgtgtcgcctccttaaaacaaacctactttcatctgatgataccaatgatgagcttgctacttggttaggggataattttcatagtcattggtccttaatcgatggtgttaaacatggcattgcatatcaccatgctcagctaccaagagcagtaggtgctttaatcgtagatttatttaatgattcaaagataaatattcttatttgtacgtcaactttaattgaaggtgttaatacgaatgccaaaaatataattatttacgatgactgcataacacgaagaaaaaaacttgatatgtttacattcaataatatctccggtcgctcgggaagaatgtttgagcactttgtagggaatgtatttatatttggagaaaaaccacaaattgaacttccatgtattgacattccggtagtaacgcaaagtgaaaacgcatctgaatccctattgcttcacttaggagcagatgttagtgatgaaaataaataccgtgttaaaaaattttatgagcaaaatgttattccattgtcattgttgcttaaacaccagggaattgatcccaataaactgataaactttgccgaaaaactcattgaaaagtgtaatgtttggaatccgttgatgtgctgggacagcatctatcctacatctggacagctactgcatctatcaaacatgctctttgaacatttcaacatatcttcgatgggaggaggaacagttcgctctgccagtcaattgcatagaaaactctgtgatgtaataaatagagtagacgataaagatttgatcttggatgacttcagattttggcatgggcgtgatgtaacttatacagtggatgatgctgtacaaggtgtatttagttttaagaaaaatcttgttaactataacctacctaaaattatatatgctataagtgatattcaggaaacaatattcaagcgatttgaatacccttatggtgactacaaaccatttgcagctacgctagagaatttctattttcctgctgcaataaactcccttgaagagttcgggatacctaatcaaatagcaaaaaagataattaacaatgctagaatcaatgatatggaatgcattgatgaagtaatagattatctcatgtctacaaatttagaatcatattcatacttatctagatttgaattggaatttgttataaaagctcgaacttatatgtaa

SEQ ID NO: 387944 - DNA, 165 bp, Salmonella enterica
atgaccataactgacatgtcaggcgccgctttcaggtctggcgcgggtgctgtcgacgacagcggtttagcagaggagaaattacacaaacacaatgggcgtgaaaaggggaaactcatttttctggaaaaagggtttcctcttgattttaattttattttgtga

SEQ ID NO: 387945 - DNA, 255 bp, Salmonella enterica
atgaacacaccgcgaaacgactggcatcctgccgatattattgcagcactccgaaagaaaaaaacctctctcgccgcgcagtcccgcatagccggactgtcctccagtacactggcaaacgcgctgacacgtccgtggccgcgtggagaaaaactcattgctgatgcgctggggatatcgccggaaattatctggccttcaagatatttcgatgatgaaggtcatcgcatagaaagagtcatgcgaaaccggtga

SEQ ID NO: 387946 - DNA, 831 bp, Salmonella enterica
atgtcgaaacataatcttattatctatagcctgcttctggcggctgtgccgataagcgtcttggcggattcgtcgacaacttccgcggcaaccgtcgggatgttttctcctcctacggcgccgagcgttgggcacaggcctgggcaaccgagggctgtcttccatttcctaaatgagaaggggcaggctctaacgtatgacgattattatgtgccttttccgggtatgacactaaaaagatatttaaggtggcgggtcagtgatcctgatacacagtattatcaggctagtgaaacgtttactgaggcatgtacatattatctggttaatcgagatggttctcagcataaaattaaacgtgaaaaaccatgtgaatatagatttgacttcagggaggaacatgttggttcaaaactaaagttggaactttataacgaaacggatatggcttcagcatcaggctacacgccggtgcctacggtctctgtacccttctactttgagtcaaaggtcatagttaatatgcctccagacttagctatcgtggatatagataaacctgttcttttgccaggagaaagcgctatcgtaaaacttattttcaaggacaaagataacaaccctataaacgatcttgaggtaagttattactttggttataatggggaatgggatatttcctcggtcaagaaaggttctaatccaggcgagtatatacaaacggtaacctataaaggtgctaatggcagtagaaacccaatggtattcatcaaatatgattatctaggcaaatctcttttgtctaaagaaattcggattacagggaaataa

SEQ ID NO: 387947 - DNA, 1545 bp, Salmonella enterica
gtgagtgatattctgtcgtggatcgaggttggtaaactttcagctgaaagagatgataatcttgtaaattacttctttgataatggagtacttcaaagtgttattaacacaccatcttcttttttaattcttggaagaaaaggtgccggtaaaacagccctttttcgttatctaacaaataaccctagacaatatttaaaagataatgaagtattagtatctttatcttttgaagactataattggcgagttcattcactgcttagtaatgaatatgcagctgagtctttggcatataaacagtcttggaaatttgtaattttagttgaagtgattaaggcttacttaaaatatttagaagaaaataggctaactatacctaagccattaaaaaatgctaaagttgcactggagaaaatttttgacacgccattcccttctatttctgtattggttgggaggaaattattagggttaggaaaaatttcactgccaaaagctgggttagatatatctgacggtgacttgaattctcttgaattaaatgggggggaagtaaatttcgaatccgcctcaagtgatcccgatttacgtgataagttgtgtaataatattgatcatttaattgattattttgaaagttgtctccgaagcagtcagccaatgcatgcaaaagtttttgtttgctttgatcgtatagacgaagcatgggatgatatttcagtagatgtatccagaagagttatagcagggttagtcaccgctgctgatgccataacaccaaaatataatggtaacattaggcctttgattttcctgagggaagatatattcgaagtattaagcctaaatgattctaataaactgcgagaggattgcggagctcttctccattggagtagagatactttaatgaagatgcttctccaaagaataaattattatggcgccaatgtaaataaagagccagtacatgatgttgatgagctttttgatcgtcctgagatgcggcagcgtgcaaaaccttttaattacctgatgaaacgctcgatgatgcgtcctcgcgatatgatatgtttattgactaaaacaattagttccatgcgtgatgataaaaacgatccgttctcagataatgatcttgttggtgataagttggaagtcgaatatatctatcaggctgaaccaagttattcagagtggttaaaacaggaaatcaatgatgaatgggcggttcagcgccctgaaataaaaatacttatgtctgctatacagaatcattcgtctacaatatttactaagaatgaattggttgctgaattgcaaaaaatagatgccacctataatactgaattaatcaatgaacagatacgctttatgttcgatatatcattgattgggtttaaagttggtcagtcgacaatttggcgttacaaatgtttttatccttcacaggggtttattgattctgatgaatataaaattcatgatggattgatccgagttctgaatctaaaggaacctcgggataagagtgatgcctga

SEQ ID NO: 387948 - DNA, 657 bp, Salmonella enterica
atgaaccgatttcttcgcaccttatttacgttgtgtcttgtctggcccgtaatccggttgtggcttgggctgcgggtgaagcaccgggagcgacttccccatcgcggcccgctgatcgtggtggccaatcataatagccacatggatgtgtttgcgcttttgtcgctgttttcactacgtcaacagggttatgttcatccggtcgctgccgctgactattttttgcgtaacaagtggatgggctggtttgcgattaacattcttaatattgttcctgtaacccgcaaaggcggagaggcaaacccgctggcgcggtgcgagcaagcgttgcgtgataataaaatcctgattttgtttcccgaaggaacgcgcggcgaaccgggaatattatcgccgctgaaatcaggaatctggcatttgagccagcgcgtgccggaggcgagcgtggtccccgtctggctatgcggcacagagcgaatcatggcgaaggggaaccgcatcccgctcccgctctttattgatgtcacgattggcgatgcgttgcattcacaccccgaaaaaaagcaatttatggacgatctcaggcacagactgcttgagcttcagcaacagacgtcagggaatcttactcatgcctcaccttcgcacgccgaataa

SEQ ID NO: 387949 - DNA, 1761 bp, Salmonella enterica
atgcctcaccttcgcacgccgaataaacggtgttttttgacgagtgacaacactgaactcttctaccgtcactggcctgcaatgtcggtaagcacaacgccgaaagtcattgttttatttcatcgcggccatgaacattcggggcgcctgcaacatattgtcgatgagctggcgatgccagagatgatattttacgcatgggatgccagaggacatggatattctcctggccaacgcggctatagcccgtcgctcgcccgctcggtacaagatatggacgagtttattcgttttgtcgccgctgatagccagactccgttggaaaatatcgttgtagtggcgcagagtgtcggcgcggtgttagcggcaacctgggcgcatgattacgcgccaaacattcgtggtctgatactggcttctccggcatttaaagtgaaactgtatgtaccgtttgcacgggcagggttagccttgtggcatcgtttgcgaggtctgttctacgttaattcctatgtaaaaggtaaatatctgacgcatgaccctgaacgcgtgacaagttttaatcatgatccacagattacccgcgctattgcggtgaatatcctccttgatttgtataaaacatcggtacgtattatcgccgatgccagtgcgattactttacccacactgctactggtatccggtaaggattatgtcgttcaccgccagccgcaggtggatttttatcaggggctacgtagtcgactgaaagagcttcatgtttttgcaggtttttttcacgatacgcttggcgaaaaaaacagacatctggcatttgagaaaatgcgttgttttattgagacgctgtataacttgccgccgcagcgttttgactaccagcatgaagaccgctggagtccgggcgcggatacctggcgtgtactcagtggaggggctgctccctgttcatgggatgatatcgcttatcgtagtttgcgttatgtaatgaaaagatggggcgctcaatcggcgggtatacgcctggggtttgagacgggatttgattccggtagtacgctggattatgtctaccgtaatcagccgcagggaggcaatatagtgggacgtttaatcgataaaaattatcttaatagtgtcggctggaaaggtattcgtcagcgtaagattcatttgcaaaaccttatccgtcaggcggttcaaaagctgatagagcagggaaaaccggtccgggtagtagatattgccgcaggacacgggcgttacatccttgatgcgctggaagatgaggtgacggttagcgatatattattgcgtgatttcagcgaattaaacgtcgcacgagggcaggagatgattgcgagccgaggaatgtccagcagagtgcgttttgaacgcggtgacgccttcaataatgacgaactggcggcgctgaaaccacgtccgacattaggtattgtctctggtctttatgaactttttccggataacgctttggttcgacgttcgcttgctgggctggctgccgctatcgaacctgggggcatgttgttatataccggacaaccctggcatcctcagttgaaaactatcgcctggtcgcttacgagccacaaagataataaagcatgggttatgcgtatacgcacgcagggtgagatggatgctttagtgcatgaggcgggatttgataaatgcgcgcagctaattgatgaattcgggatttttaccgtttcgatggcggtgcgccgtggaaactga

SEQ ID NO: 387950 - DNA, 1311 bp, Salmonella enterica
gtggaaactgagcgtcgcaaggtattcatacagggtgctggttggctgctgctactggcgccgtttttctttgtcacctacgcaaaagtaaatcaatttaccgcctggcgagatacccaatcccatgatattgggagcgtggtacttggctgggaatctgccattccctttattccgtggagtattgttccttactggagtctggatttgctctatgggctgtcactatttatctgcgcgacaagctttgaacaatgtcggctggtgcgccgtctggtactggcgtcagttatagcctgcgttggatttctacttttccctttacagtttagttttacgcgtccgcctgtttccggcgttgcggggtggttgtttacgcaacttgaacagttcgacttgccatataaccagtcgccgtcgctacatattattctttgttggctgctgtggaggcatttcagccgccatctttccggtggttggcgcaggctgtgcgatggctggttcctgctgattgccatttcggttttgacaacctggcaacatcattttattgatattattaccggtctgatggtggggatgttgatcgactggatggtgccggcccagagtcgttggcactggcaggtacccaacgcggttcggttccggttggtgcggcgttacgtattcgggatgtccttatgcattattgtgggggtattgctggcgccatggtcattctggccgtcggtgtgtctgtgctggccagcattatccttgttgattgtgggacgcggctatggcggattcggcgctgcagcgttgtgtaaagacaaagaggggcggttatcgccttccgtctattggctaacgcttccgtggcgctgtgtgatgtggttatcgatgcgttggtttacgcatcgtctgcccccggtcaatcacatcgccgccggcgtttatcttggtagttatccgcgccacccccccatgcaaaacgcggtgctggatgtaacctgcgagtttcctcgtggccaggcaacaaggttgaagacctattattgcgtaccgatgttggatctggttacgccggacgatgcgcagttacggcaggcggtggctatgctggaggcgctgcgtgaggaacaggaaacggtgttggtacattgctcgctggggttgtctcgtagcgcgatggtggttgcggcatggctattatgctatggccatgccgcaacggtagaacaggcggtagcatatattcgtgcgtgtcggttacaaattgtgctaacggatgaacatctggacgaactgcggcaatggcaataa

SEQ ID NO: 387951 - DNA, 405 bp, Salmonella enterica
atggcaataaaaaatgacactgtaacaaatggagatatacttcagcgcgagttattgtcgcagacgttagcgagttggcgattttttctactttttactctccttcctggtgtatgggtgatatttatctccccgccaggggcgctgcgcgtggttatcgcattgttgtgcggcacggcctgtttcggctgttggcggatctggttagataagcgctattttgtgctgattacgcatgagaataaccagcaagctggggaagggctttttattatctggcggcgcgaaagagtgcgaacgctaacactaagcgaacgtcagcagggggcgctcaaacaatttcgccgcacgctggttacgatagtcgcgctttgggggatatggctattcgcgcttgctctttga

SEQ ID NO: 387952 - DNA, 129 bp, Salmonella enterica
atgtttcttcacgcccgtgatccgccgctgcaacctgcgttcttactgaataatggctatgaccagcagaccgaattatctcggttcgagggggattctatgtgtttgcacaactgcggtgaatcgtaa

SEQ ID NO: 387953 - DNA, 150 bp, Salmonella enterica
atgatcgatgcctggctggaagctgaagtcgaactgctgcagcgccatgcacaggaatgtcgacttatttttgggctgacagaggcattggtcgttaagacttgtacattcatgttgcttactcgcacaaaagggggaaaggaaccgtaa

SEQ ID NO: 387954 - DNA, 327 bp, Salmonella enterica
atgagagaatataactcagaaaatacagacaatctaaaagatgttttgatatctttagaagagattgttactgtaatagataagattggctctgggtttgataaaagtggcaaaatggcattagcgttgttgctattctttaatcaatgcagtgtattagataaactatccagaacaagaaaatacttatatcaagagttagaagccagattaactcctgaagaatatgatgagtggatagagaaaaattttcctttatggaaaccgccatatgataaaacagaagaggaaatgttggaaatgctaaattctgcgatgcgaaaataa

SEQ ID NO: 387955 - DNA, 183 bp, Salmonella enterica
atgcgtaagccaaaaaccactacaaaaacaattattcatttcaccttaaagcgtcgtcctgaaggcaacagaaatggagacgagcgaggtcgtgtttggtttcacaaatattcgtttttagataaaccattttaccgggcaccacgcctgttacgtcgtctttcttttaacttcaaccaataa

SEQ ID NO: 387956 - DNA, 237 bp, Salmonella enterica
atggctaacacaaatatgtattcaccaaacgagcaggattatatccgcagggttgccggaaaagtccctgctgacgttatggcatccaccataggaagaaccagaaacagcctggttaactgggctaatagacatggaataagcctgagagttccttacggaatacttaaaaagcactggcctgaatatgctgaaaaaatgacaaaaggtggacgcaatggcgctaaagagagataa

SEQ ID NO: 387957 - DNA, 336 bp, Salmonella enterica
atggaaattttacttgtttcaattgtcatcggcttaattccggccttgattgctcatagcaaaggccgctctttctttgcctggtgggtgtatggtgccctcttgtttattattgctttcgtgcattctcttgtaataaagaaggatgttgctgctgaagaaaaagacttaattgaaaacgatggtatgaagaaatgtccgttctgtgcggagataatcaaaagcgaagccattaaatgtaaacactgcggcagtgatttggcagctggatcacctccacctaaaactgatgaagaataccttgaagaggccagacaaaaggtctggaaacaataa

SEQ ID NO: 387958 - DNA, 348 bp, Salmonella enterica
atgactttagaacaacgagttgagccacttgaatttacagcagggtttccgaaagagaatggagtaagaatttccttcggagaaaatttacgcatgtcatcgacacaacgcattggcagtaatgtgtcggtgaaaattggcaaagaaaccttagctactatccagtacagcgaagacttaacgccagaacttacgcttgaagggtacaatcagcgggcgaaagagcatgctgaaaaaatggtctcgaagatttttgaagcggcccagaaacaggccgctttattcagattagataatggtcatgtgtacatcaatccagtaaaaatcaatttttctgttcaggaataa

SEQ ID NO: 387959 - DNA, 255 bp, Salmonella enterica
atgtctaaacaaatcacactggaagaagtacttgctggaatgaatgatacggcaagaaaaaattatgcaatgacagaattacttatgcagacctttagtgcgtttgccgtttctactggtaataaagaagctatcgctgatttcataaaatcaaccagcaccacaggtgaactagtagaggctcacgagcacgccaaaaacgtctttctcaaagtacttgattcagtaaaggttattcctgaacagaaaaattga

SEQ ID NO: 387960 - DNA, 297 bp, Salmonella enterica
atggatgccgtaagtattggcggtgccatacgcggaaatcgtgccgtcattggtgacgaggttgttggcgcccgctttaagttccatggcggcggactggatgccgacgaggctgctgtttcccgccgtgatcaccccgccggcgcggttgatcacttcaaaatgcgcgccgtgatagagcgcaacggcaataaaatcagactgcaaaagaccgctattatcaacagaaacataatcgcccgccgcgatatcatcaaaggtatgggcataaatcgccgcatcctcaatctcgcctga

SEQ ID NO: 387961 - DNA, 564 bp, Salmonella enterica
atgtcaaacacaagtgttatgttaactaaagaacaaaaagcaattattgcagaagcattagatgttatgcccgaagatctggaagaaataaaagttaaagcaagtgcctgtagaaagacatcctttcgtgacgatttttcgatggtctttaaagataatacagccacactcgccagaatggatctgacaccgacggcattcagaattgttatttatctcttctcagtcattgattatggaaatattatccctgacttttcacagtcacgtactgccagagagttaggactgaataaatcaaatgtttcacgtgcattcagagaattatttgagaggaaaatactgatccgtaacgctgaagacggtcaggtttacctgaattctaatttatgtgtaaaaggcattcctcatcgtttcaatgaagatctgatggataaattcagtaaatccagacttgagactgaagattttgccacttcattcaacttttatcgcgcagggcgcaaaacaaagcctgtaaaaaaatccagaaacagatatccaactgacggcattcccttttaa

SEQ ID NO: 387962 - DNA, 309 bp, Salmonella enterica; identical to SEQ ID NO: 144694

SEQ ID NO: 387963 - DNA, 207 bp, Salmonella enterica; identical to SEQ ID NO: 144695

SEQ ID NO: 387964 - DNA, 423 bp, Salmonella enterica
atgttgacggaagatctcgcgcttttaatgcctatgccttcggatttaatgaacattgagcttttattgtcgccggaaatattcaccgttgaggcgttagcggcctcaatggcggcgcctttggcattatcgtgcgtgacggtagagttcgtaatatcaagaacgcccttgttggacgcgataacagtactgtctgtacccgtggaattaactgcactaccgtccacctccagccaggtgttgtatgtcgtatcgccaaccacacgcacctggccgtttgtcagcgtgattgtgctgccgccctcaattctcagcgtacttccttcttgcgatgttaagtcactggtattttccgttgtcgccttaacctcagtccctatcaaggttgcttttgactcgccattgagcgtcaggacaccatag

SEQ ID NO: 387965 - DNA, 294 bp, Salmonella enterica
atgacaaaaccacaggccaggcatcatcgaaaaaggtggacgcccgaagaactggaattcgtgaaaacctactctcgccactggcatgagcgggaacgtcaggttctggtacagtattatcctgtggaaggtatggctgtagcagaccgcttacccggcagaacaagagcatccatgagacaagcggcatactcaatgggcctaaaatttccagtacggcttccgcacattcgtggaacgtcttctgtcggcgggctttttttcgcattaaaccccccgtcgattaccggatga

SEQ ID NO: 387966 - DNA, 480 bp, Salmonella enterica
gtgcttaaatatataggttatattttagttctgatgttatctggaattgttggttgtgctgcaaccgagccaggcaacataccattagatggcctaaacactaatagcttcgacattggggagattactgatggagagattactgatgatttgaggcactccacttgcactctgcgcctggctgataataagaaggaggattcctataactatattgaaggggcgatttgtcctgcgggtggggaagagtgtacatactctgccatcatgaagctgaatgggaatataacaatattgaaacagatatcatcagatgaaaataactcagtctataaaaataatgatttatctctttccataacacagactccgatgacagaggcaaatgatgatgagggaagcgacgttaaagctactattgtcctcaaaacaaaacacggtgaaaagatatttaatatgactggatactgtggggtttaa

SEQ ID NO: 387967 - DNA, 315 bp, Salmonella enterica
atgttttttcctgcgtataaagtcaactcatcaaagagcctaaatgaagtagctcaatccatcggagtaaatattgatactctacagagtagttttacttgtattattgcaagaagcgaacatttaaaggacgagaaagttaagtacattaaaaaagatgatattcattttgttgtataccatttagatggagagataagcctttggtatggtgatgacaattggaaaagttccactatagatgatgcagaagatattatagatagtgttgagagcggaattagtgctaatttttgggccatattcataatatga

SEQ ID NO: 387968 - DNA, 915 bp, Salmonella enterica
atgcaggttaacaatacattatggtctcttgataaaaatttgagtattgcgccatcactggatatcatttttcgtttaaaaaatagctcatattctattggttttttaaatatactatttactgcattacaggaattagaagtaatcccattttatgatgatcaatgtattacagtcatttctcatgacaggtcacagggcggttgggagggaagaataactccagagttatggcaaaaaattattgaagagataaaatatgcatcatcacttaaaattagaaaaaaacaaattgtacttaaaatttgcaagaaaggcccactgactgataattatgttgatgatttatccttatcggtaaatcaaaacatattcccagatcaaggcattgtaatttctctacagttcagcacatcggaagaaaatccttgggcatatttacaatatattcgagataatctcatatcaaaattagagttaaattttttctggggtaatttaggatataaatttatcctcaacccgtttaatcgtacagcacatgaagtcatgcgggcatcctgcatgcgttatccaggggtagatttacatgatgtagtctgtgttcataattcattttggtgggataaattaagaaccataaactggcaagtcacattaaatgttactcaggtattatgtgaaaaaatagagacatcacctcaaatcatgtattataaaacaggaaactcaccttcaatatgtgatcgaaatagttcggaatccaataatttatctgcaattcacgagtataaagtcctcgagaaaaaactttcttcgcgcattttaaactccgataatatttcatggttatgtcaatggaataatgatatatatgctcgatggagtaacagatggaatgaaattgatttatag

SEQ ID NO: 387969 - DNA, 990 bp, Salmonella enterica
atgactaatataaatgatagcataaatattttctctgattatagactcgaagagaatggtatcacattgtttgaaccctgtttctgcatcactttatttactaacgagaagataactcagacgcatgcgccagagagattactgaccccgtacggaaatttttttaacaaatttggtggcaaagtaaataaaatattatttgacggtaatcagaagaatggcgtaaaaattactaatgaaagaaaaaatactccttatgactggttagctaatacaaaacgaaggttcaaagataatgctgttgcagatatctatttcgggacagctaataaattagaacgaaaattacctcgcatgcgttggtattatgatcatgctacccctgaaattaatcaacctgctaacagctactacagaatattactctctttaaactggcttgcagaacaaagtctacaagatgttgaggcatttatcagagaaatcatcggtgattttcccttatcgttcggctatgcaggttttgccctatcttttaatgatggtgaagtactgagccgtaaagatctagaatattatctagggcagtggcttgaacgccatccgggaatcatgtcaccagacccttcgatcgagtcacagtgggcatcaaaaataaccgggattactagtattggatggataacctttttaggcacagaatttactacccaaataggaggacacgatgaactaaagcggaaatcagctttgtttcccgatatacaggtgactccctttatccaacaggggatgatgattcgtattggtgaagctcccatattaggtgatacatttcataataatctacttgataattatcatgccgtcggaaacgttttatctcctctccataagatatcagagagactaaaaactgattatttgtacgtaaccggaattaagggtaaagaggctcgtgaaaaatggtttaatcgtttttttatttaa

SEQ ID NO: 387970 - DNA, 1152 bp, Salmonella enterica
atggcaataacgattaatatcaacgggctgacactttgccataaaggcagtggaggtatcagtcataacactctgccaaatgtatgcaaaactcccccttttggaactccggttccttacgagaatgaagcctattcagcggatttggtaaaaggtactattagcgtatttgccgatggcggaaatatggtagccatcgttggctcacagtttgcccgaagcgtgtttgatgaaccaggtgctatgggcggaatcatttccggaacaaatatggcggaaactgactggatatcacattcatttgatgtcttctttgaaaaaaaacccgcctgccgtttaacagataagctatttatgaatcatcggaacacggtaaatatggcaggattatgccaaaatccattaaaagaaaacgtattggaatctaaaatttgtgatgctatatgtaaatgtcgaaatcgtattgcccgtgagtttcgacaaaaaatcaaaatgttcacagaggctccagctattggccttgcccaagaactattgggacgctttttaggcgcaaattcagagctaccaaaaacgggcgacaaaataaaaacaggccctcgtcaaaagtgttttgcacaacagtttaatcagagtggacaaagcgacacttgggcaggagctactccgcaagacccatgttatcttacagaagttccttacaaaataaaaacaggcggactaatccaggagaagagcgatggacgttcaactttccctggaggacctcaatccccagcatcagtaaaatatgctgtcagggaagtggcaagagatcttggaaaagggaaggtagttatctgggatcttattgtcctcagaaacccagcgttacatgctgaatgggataacattgagcaaatcatcgaaattaagtttcacaatgatactctcactgataatcaagagattgcaaaaaaaacacaaatggacgaaaaaatccgtataattgatgaaagtgagtgccattgcgacgacaaggatgaagaggagaaagaaaaaactctgcacaaggtagaaaattttatacgacaactcaatgattctgcacgaaaaacttttggtacagctccgggtggatttggcattccttttccattaccattattgtaa

SEQ ID NO: 387971 - DNA, 1062 bp, Salmonella enterica
atgatttctattatctctgcggcgtgcctgtttccctccggcccatcgttgccgttggctgatattgccagtcgtctgcaattctcattggtgcgcaaacatccgttatgcgtggatcactgtggtgctcgcgtaaaagccagctattttcctgaaattgtgcatgagttgccggaggtgcgtttttggaacctaacccgacaggtattgaacgagttactggagcgtcagccaggtctgacaatatcagcgccacacagagtatgggtgttgcttccttcattaagcagaccgggaatgactgcaggagtcgcttctgcggtaaaaaacataattcaggaaagtaccacatgggatgtcagcagcattaatgtgctgcacggggggccagcagaaattacaacagcactggaaactattgctgccgaagaaaagcgaaaagacagagtaatcgaggttcttctcgcaattgattcatggctgcccgcgccttctctgatgtggctggataaacaaaacctgttacataatgcgcttcgccggttccgggattatgagcgccctaacccctatgggagagtgccttcagaaggcgctgccgtcctggtactgacatcagacttacagagtgacgcctggtgtgttatccgtggagcggcaagcgctgaagaagacgttttgtattcagatgagggcgtttgtctgggaaaagggttaattcgtgctgcacaggcggcgatgagcgctgccgggaaccctcttttgcaaagcgtcatcagtgatgtcaatggtgagccttaccgggcagacgaaatgggctttgccctgctgaaattgagctatcgtctggcagaaggcagcacgcgggaaacacctgtgctggcaagtggcgacctcggcagtgcaggtctgttaacacatctggcactggtagcatggcagctacgttcatccatacgaacaggaaatgtgctgattttgtccagctcagatgatgaacgacggggtgcggtggtggtatccaaaggactgagagaagaagagaatggcaataacgattaa

SEQ ID NO: 387972 - DNA, 1026 bp, Salmonella enterica
atgtggcagataaataatcaaaccccttatgcaataaaagagagctggatacgaggccgagaaggtgaagaaatctggatagtagcattaaaagcaacatgggatattcttccaaatggaacaactcggctttcttcagtgcagtctccagttaatgcaggaaaagttctccataatgatggaacgagtctgttatacgatactgatctggggccagaaaaaaaagcgacagatatcatcctgaatggatgtgctcaggcagcaggcggaaaaaaagccagttctgtcgccatagggttaaaagttggcaatatgatccggcttgccagagtctatggtgacagaatatgggacggcaaacagtatggtgaacctgaacaatttaaccggatacccctgggttacagcagaatgggacggggagagtttttaccatctggtcacggcgattttaatccagcaggaatacaggttgatgaatatcctgaagtaggcaaatcaaaattgcctaatatcgaattttatggtgatggcaaagctccgggatttggcccattgccccggcaatggccaggacgcctgcaatttgccggaacttatgatgaacaatggcagctggaacaagcgcctctgctaccaaccgatctggatgagcgctactggcaatgcgcacctcctccattgtatgccggaggtcgactgaaaggaggagaagctatttgtctgggcaatctgacacctcccggctatgggcacggtggattactgatttttgcactaccacgcatagtgcctgctttccggacgcaattctatgacggtagcatgcgtcatcaccatggacggctacataccgtgattatcgagtccgattttccccgtgttagcatggtctggcacagcgcattaccctgccatcatctggcgaatcaacttgagtctacaacagtatcggagaaaaaacgtctgttcatcaggagacccctgcttccggtaaattttcccgagtgggagcaattgttatga

SEQ ID NO: 387973 - DNA, 672 bp, Salmonella enterica
atgaaaaaatcactattgtttacctttcttctcggcttaactgcctgtcagcctcacccgcagacgtccgcctttaatcagggggattacaagctgccatttgataaatggggtttcgtttttatcgacccatggaaactacgaacactggttactgatgctattgtggtggatacaaccgggcgaatgtaccgttttcataccctggatttgccaggtaatgacccgcaaagcatcggcacatggaacactaaggttagatctctcccaggctataatataataaaaaatgcagcgcctcctcagtatattgttttatgctgggattcctgggtagataaaaaacattatgaaaccagcatgttttttaataaacctgtatggcaacgaatgatgacaccactggagcataatgccagtgatggtgggcctctttggtacaatacactcctatttggacttgctcctggagggacagtaaaagtctggtttcaggcgagtgaagatgatggcagagagaattaccccattacaccaatcaatatgaagacattgtccggagataatctggatgtctgtaaaggaacgtctcaaaatatcttttctaaagatatggcaccggataccgctgagtttattaaaggcaaaaaatatccttatggcaactggtaa

SEQ ID NO: 387974 - DNA, 660 bp, Salmonella enterica
atgataacgattaatatcaacgggctgacactgtgccataaaggtagcagcggcgtcagccacaacacactgccagatgtgtgcaaaacgccccctttaggcgtaccagtcgcgtatgaaaatgaagcttattcagcagacctagtaaaagatacaaccagcgtgtatgcggatggcggaaacatgatagccaatatgggctcgcagtttgcgcgcagcgtgtttgatgaagcaggaagtatggggggaatactctcagggacgaatatggctgagactgaatggatatcgcattcgtttgatgtcttttttgaaaaaaagccagcgtgccgtctgacagataagttgtttatgaatcaccgaaacacggtgaatatggcgggattaaatcaggcgaagattcgtgggactaatgaggacaatactacaccaaaagaggatgaacagaccgaagttacactaacgatcggtgttttttttgacggcaccggaaacaatgcgataaatcttgaaagaatgattgcagcctgcgacggtaaacattttgatattaataatcaggatgcccaatccattttgaccgaatacgccagagacaatatgggattctccgatctggagtccggcagccacacttgttactataccaatatccattag

SEQ ID NO: 387975 - DNA, 237 bp, Salmonella enterica
atgcaacaggcattagtaaaagaaacggcaagctgtgaaaaaaatgctcagaacgaaaaaagaacaactgttccagaagaacttgtcctcacagcacagcagaagatcaccctgagctgtggcaagtcgcagatcacactttaccctaacggaaaaatagtgattaaaggtgagtacatcctcagcgatgcggaaggtgtaaaccgcttatctggcgggagaatcgaagtcaattaa

SEQ ID NO: 387976 - DNA, 1260 bp, Salmonella enterica
atgttaactcgaacggtacggcctctgcttgcagaacaatatgctgatatgttggcgcaggattatcgtcttcgtaatgtattactgtcatcatatcaccatgattttagtagcctgttacagtttgacaggcgaatgcagacatatctggacggtatgctgctgttgaaagaggaaacgtcagagtatcttcggggacaactacaggagcgactgtctccgggggagttattttctgtcgctgcctttgcggcaaatacagatgatgaatttctgttgtccggatgcctcgggctggtacagggaatgccccgccttttaccatcactactggccgtgaccggctggatgtccgaagcatcagcattatggccattgataatgtcacacccggcctgtcgggcttttgcctctgtaatgagggaagggataatttctcccgcaatatttacccagcaggaaattatttcactgcctggaaatgggcagtgtgtcgattttctgctctggttacttcgtaaaaataactccccgctatttgtgccagcgataaagcaggtattatcttcaggccaggaggcacttatcctgcaagggtgccgtgcgatcctttgcctgcgcccgttatccgataaatatattgaaatcgtccgggaacagcttttgctgctggcaagcagtaaaaaaacggatattcgcacacaggctgttcgttaccttttagtgtgcgcgctctgtgagccgcacgcactcatcaatacgctgtctgaagaaaaagaagatacccgcttattgatacaggccatggggtggtcaggtcttgcagaatacattccttctcttgccgccttttttgatgaacaacggtatgcacgtttaagcatgctatccaccgtggctataacgggttctctgcctgaacgggatggctggcagatgaaaaaagagaatgaaatacctctaacccctgctcctgattcagcagatatcccggaagtcgatcctgaacaaggggttagctggccggacagaacggcatttaatcgctggtggcaggctaatcaagggcggtttgatgctgaaacatcgtatttatgcggacagccaataacatcagaaggtctggaggctgttattgcaaatggctatctgaatttacgtcccctggcgctcatgcgctctggcatgttttcagaactctcttccctgcccgcagcgagtcagtatccaatttttaatatgtcatccaaaaacagatga

SEQ ID NO: 387977 - DNA, 483 bp, Salmonella enterica
atgatctggccattcgtgaaagcgtactggaaacagttgcttatcgtggtgatgcttgctgccctggtggccgtaggagttgtttcctggaatgtacacggcagtcggcagtacgatgccgggtatgcgcaggcaaaggcagaccgcaaagccgaagatgataaagctcgtcagcgtgacgaacaggagaaagcgaccaatgaacgtgaagcgcagcagaggatcgaccaggcgcgcaatgatgctcttgatgctgccgctcgcgctggccggttgcagcaacagctcattgccatccgtgagcagctcaggcagtataacaccactgtcggcgctgggacgtcagccgcagacaccggagttttgcttgccgacgtgctcggcaaatctctcgagcgaaaccgacaactggcagagtacgctgaccgggccgccgaagccggacgagtctgtgaaaagcagtacgattcgctgacccggtga

SEQ ID NO: 387978 - DNA, 630 bp, Salmonella enterica
atggacattaaccagttccgccgcgccgccggcatcacacagcaactggctgaacgctggttcccgcatatcactgctgcgatgaaagagtttgatattgtcgctccagaaaatcaggcaatgttcattgctcaggctggacatgaaagcgccggctttactcgtctggtggaaaacttcaactacagcattgccggtctggctggatttatccgcgccggtcgcataacacaggaccaggccagcgcgcttggcaggagaacctatgagaaggtcttgccgcttgagcgccagagagccattgcaaacctggtctacagcaagcgcatgggtaacaacggtcctggcgatggatggaactaccgcggacgtggactaatccagatcaccttcctgaacaactatcgcgattgcggtaacggtctgaaggttgatctggtagcgcagcctgaactgctggcacaggatgaatacgcggcccgcagcgcagcgtggttcttcgccaccaaaggctgcatgaagtataccggcgacctgattcgcgtcacgcagatcatcaatggcgggcagaacggtatcgatgaccggcgcacgcggtacgtcaccgccagtaaggtgctgtcggtatga

SEQ ID NO: 387979 - DNA, 363 bp, Salmonella enterica
gtgcttcgtctattcgctaaatatacgtcgatcggcattctaaacacgctcatacactgggtcgtgtttgccgtctgcatttatgggctacatactaatcaggcgcttgccaacttcgcagggtttgtcattgctgtatcgttcagcttttacgccaatgcaaaattcacgttcaacgccgcgaccacgacattgcgctatatgttgtatgtcgggtttatgggcactctgagtgctgcggtgggatgggctgccgatatttgcggtttaccacctctggtgactctggtcacgttttctgctatcagcctggtatgcggtttcgtctattcaaaatatatcgtcttcagggatgcaaaatga

SEQ ID NO: 387980 - DNA, 1452 bp, Salmonella enterica
atgaataacaagttgacgatgaaggcaaaattatttttgtctgtgttcgtactttttagtttcatctactgcctgtcacttgctttaaaaagtggaatcacttcggatgcagcatcaatgtatcttgaagctcttgatatggctaatggaaactggttgttacacggctggaccctttcaacagttccattttatttcactgagacattatggtatgccgttcttataaagataattggttaccatcaaagcactatgtggtgggcaccggttttagtttataccgtagttattttaattgcgtcactacttatagccgataaaaataacaaagttatcggtgtgcttgcgttactgatgtgtgtttcaatgccatcacctcttgcttcaggtcttacgcttgccatgtgtattcacgtcggatgcttactttcatccctgttgtgtgtttatttggcaaacaaaaaaaacagcatttaccttattgctgtgctgtttatttcaagccttgctatgtatagcgaccctatgtatctatatacttttgctgctccttatttggtagcaaccgggattgctgcatacaacatgaaaaagttagaaaatataagactcatatttgtaattattttatccattgttatagcaaaaataatatcatatcttacagtttctaacggcatactggtaacgccaggaacattaccccccaaatttgttgattataataacattctgcataacttggatctatttattcagggtattatcaactactttgatgcttttatctttgggagagaaattggagttgaatcttctttttatgcagcaaggtttgttatcatggttacatggtttgtcttgcttgttatttccgtgcggaaattattcaataaatccttacttgataattatctaataatctcaactgtgttattaccaattgcttacattgcaagcaatatggtggtagatttagcaaccactagatatttagtattctctttcattacaggatcaattttgattggtaggcttattaacaccacttcaataaaaaaattatatatctgtatagcatttgcagtactttttgtttgtaattacagccccatcgcattccataaacctaacgaccaatccagtcaattagctgattatatttatgataataatctaggcgacggttacggaactttctgggttgcatcatcagttacagtgaggggtgataataatgttcgccctgtagcgtatgatggagaaaatggagaggcctttcactggttgtctaagaacacctggtataggtttaaatctcgatatgttatcttaagcaatagcaatgacatatctaaagtagcgagacagtttggtgaggattatgaaactgtcaatattggtaatgcacatatggtcatatataaagacaaaagaatcattttctga

SEQ ID NO: 387981 - DNA, 2061 bp, Salmonella enterica
atgacggtctcgaccgaagttgaccacaatgaatacacagggaacggcgtcacgacaatgtttccttacactttccgaatttttaaaaaatccgatctggtggtacaggttgttgacctgaatgagaacataacggttcttgcgctggacactgactacacagtaaccggagccgggggatatgtggggggaaatgtaatactggcgaccgctctggctgacggctaccagatttccatatcacgcgaacttccggttacgcaggaaacggatctccgcaaccaaggtaaattctttgctgaggttcacgaggatgcttttgataagctgacgatgctgatccagcaggttcgtagttggtttagcctggcgctgcgtaagccgtcgttcgtggcaaattattacgacgcgctgaacaactatattcgtaacctgcgcgatccgtcacgaccgcaggatgcggctacgaaaaattatgttgatagccttgctaatacaaacctaaataaaacactaagaacgcctgacgcaattcaggcactacctgacgctgcttctcgtgctaacaaaatcgtagcttttgataatgcagggcagccatttgctacgctaccgccttcaggatctgcaacggatgtactgattgaattagcgaaaccgactggcgcggcacagattggcacatcatcaggcaataccgttcaggaagaactggataaaataaaactgaagttcgagtccttcgcagcgatgagaacctccacggcgtcagacattggcgattacgccatcctgacaggctggcatgaagagtatcagggctatggtgctggagtatttcagtgcgtcgataaaacgagcttaacggatgatggcggcactattgcagtagcatccacatatgcttggaaacgtatcacgggtccgggtgatgccactgagtttggtgttgtgccgaacgccgggagtgcgtttgataataaggtgtatattttatccgctgcggctacgggggcgcttatctttccggctggtgatatttatacgaagttttttacccttacagatacgtatattgtgcgcggtaattcaaccaatctgtacgaaattaacgattcagaggcaatagactttattgttcactgctcacgtaatgatcagtgggatggtagaattgacggtatttcgtgggaaggcgttaatatttatccagtagacgagcatcgcgcattccatacttatttcaccactaacggcaacatgcgggattgtcgattccgtggcggggttggctcatggtttgatggtgtttcaaactggtttattgattcctgtgaattctcgggatcattaggaggagagaatatccttaatacgccgaaagtcgatcctcagggaacaattgggacatgggtgatattccacaaatgctttatatcacgaagcgctggagtaggagccagaactattggccttccttctgtatggttcagggattgtattgtatattacaaccgtgatgctggtctcttgcattataaagatgaaggcgcttatcccaatgtagagtttggagttcagaaggtaacgggatgtgacattgattcaaatgattcctccggggtaattatgcgggatgtggtttaccctgatatatctaacaattgggtcagcacaggaagggttcttaatcagcctggagtagtgctcattgggtgtaatgatataaatgttgtagagaacagcgtgtattttaatggaactcacggtatatcagttgaagtatgcaattttggaacgatttctaacaacaactgcaacgataacaaaaacagaggaattagcatccagagtgactcagggataagcagcaaactaactgtctctggcaacacctgctgtggaactccactaggttcgttcccaacagcgcaggaagagggcattcatatcgagggggatcgcatagtttcttatggcaacgtatgcaccggaaacgcatcaagtcaatatgttaactctgcatctaataagcaagagggacttaatataacctcatag

SEQ ID NO: 387982 - DNA, 261 bp, Salmonella enterica
atgcaacggcagtatcaccacccgctggtagatggatttgctgagaagatacacacgccgggaggcgtaagatccctggtggagggctcgcacctgatgaccctgctgcgggaactcgataatgacggtttcaatgttgacgggccgttagccgaactgaccgctctggtgaactatgtcaccagttcacaaatgaccatgcaggacctgcaaacccatcttgattactgcgcggaacagctgcggcggcaaatgagataa

SEQ ID NO: 387983 - DNA, 141 bp, Salmonella enterica
atgattgtttttattctggttgtgctggcacttgtcgcactgggtgtgttgaaccataaaggtatcattgaagacagtgaatttgccgtcgcagttgttttaatattatctggcgtagcagggtacataggtttgtcatag

SEQ ID NO: 387984 - DNA, 540 bp, Salmonella enterica
atgtgtagcccggctatcgcaatggttgctgtcactgtggcgtctaccgccgcgtcaatgtacagccagaaccaacaggcaaaatatcagtcagcagtagcggatcagaatgctgatgtggcagaggctcaggctcaggatgccatcaaccgcggcaatatcgaggcagatcaacgccgtcgtgaaatgcgtcagcgtgccggcactgcggcggcaacaatgggcgcaacaggcgcggaactcagcagcgggacagcactggatgttttcggcgacaatgcacaatttggcactctggattccctgacgacggttaataacgcgcagcgagaggcatacggctatcaggttcagtctgcaaattaccagacgcagtctaatgcagctcaaagcgcaggaagttcggcaatgactcagaccctgttaactgctccactgaaagcctacggcgcttatcagatgggtggtggaacgtggtcgccgttcactcagaaagcggcgcctatttccgccgcggttggaactccgacaggtcgatag

SEQ ID NO: 387985 - DNA, 465 bp, Salmonella enterica
atgatcgatgttcaattacttccggcaaccgaatgccacttgcagatgattctgcctgacgttcgtcaggctgatattgatgaactatatgccgtctctctgatgacgacagaggcggcgttacgtgttggcctgcgtactgcaacaatggcatggtctggttttgcaaatggcgaactggtcaccatgttcggcgtgtcgccagcgtcaatgatcggcggcaacggcataccctggcttgtcagcacccccctggtggagaagtaccagaaaaccttccttcgccgtagccgccatgcacttcaggacatgctggccgtttatccgcatctggaaaactatgtcgacgaacgaaaccatgttgccaaagcctggctgcactggctcggcttcaggcttgaagatgcagcgccctatggtgcgcttggcctcaatttccaccgctttcacatggagagaaaataa

SEQ ID NO: 387986 - DNA, 2472 bp, Salmonella enterica
atggctatcagttggatccagcccagcttcgccggtggagagattggcccatctttgtatgggcgtattgacatggcgaaatatcaggtcgcgcttcgtaagtgcgacaatttcatcgtgcgccagtacggcggtgtcgagaatcgcccgggaacccgatttgttggtgcgtccaagtacgccgacagaaagtgccgcctgatcccgtttcagttctcgacagtacagacttatgctctggagtttggtcaccagtacatgcgcgttatcaaggacggtgcgctggtgctgaacagcagcaacgttatttatgagattgccacgccatacgctgaagccgatctcttccgtattaaattcacgcagagcgctgacgttctcaccctggttcacccatcctacccgccgaaagaactgcgtcggtatgcgcatgacaactggcaattggtcgatgttgagacgaaaaatggaccatttgaggacataaatgtcgatgaatctgtaacggtatatgccagcgccagcaccgggacaattacgctgacggccagttcttctattttcggtgctgagcaggttgggaaactattctacctggagcagccagctgttgattctgttcccgtatgggaaacaagtaagagcacggaaataaacgatgtgcgtcgcgccgacagtaattattatcgtgcgaacactgccggtaaaaccggcacgctgcgaccgtctcacacggatgggatggcttgggatggatggggcggaactggcgatgatgacacagggatccagtgggagtatctgcatagcgggtttggtatcgtgcgcatcactacggccaatggaacaacggcaatcgctgacgtaatttcatacatcccgtcgcaggtcgtcggatcagaaaactccagctataagtgggcgcggtacgcatggaacggcgtaaacgggtatcccggcaccgttgtttattatcagcagcgtctctatttcgcagcctccaccgcatacccgcagactatctgggccagccgcacaggggattacaaagacttcggcaagaacaaccctactcaggacgatgaccggatcatttacacctacgccggtcggcaggtgaatgaaattcgccatctgatcgacgtaggttcgctggtggcgctgacctccgggggggaatacgttatcactggtgatcagaataaagtgctcacgccgtctgcgtttgcattcagttctcagggttccaatggctccagcaacgtgccgccgatagccgtggcaaacatcgcgctattcgtccaggagaaggggagcgttgtgcgcgacctggcgtactcattcgacgttgatgggtatcaggggaatgacctgacgattctggctaatcatctgttccagaagcgcagcattatcgactggtcattctgtattgtgccgtactccagcgcgttctgtattcgcgatgacggaaggctgctggtgatgacctacctgcgcgatcagcaggtttttgcgtgggctccgcagtccagtaccggtaaatacgaaagcacatgctgtatcagcgaaggaaatgaagatgctgtgtatttcatcgtcaatcgcacggttaatggtcaggtggtgcggtatatcgagcgcctttcaagccgaatgtttaccagtgatgaagacgccttcttcgtcgattccgggcttagctatgacgggcggaactcatcttcacgaacgatgagcattaccggcggatccggtgactgggattatcgcgttgattatacaattaacgttactggcggctcttatttcaccagtaatgatgtcagtgcgcagattcagtttccatacatgggaaccgacccggatacaggcgcatcagtagcgatggaattgcgttgcgacatcctgtcggttgccagcagtaccgccgtggttgttcgtgcaaatagaaacgtgccaccggcgcttcgaaatgttgccaccaccaactggcagatggcgaggcatactttcggcgggctgtcccaccttgaggggcagacggtaaatattctttcggatggcagcgttgaacctcagaaagtggtttctggtggatctgtcacgctggaatctcccggcgcagttgttcatatcggcctgcctatcaccgcagaatttgaaacgctggacatcaatatcaacggacaggaaaccctgctggataaaaaacaggtcattccgacggtaacactggtggtgaatgccagccgcggtatcttggctactactccgggtggcaaatggtacgaatacccgcagcgtgaattcgagttctacgacgatcctgttgatgatgcaaccggcaaagtggaagtgaagctggacagtaactggggaaaaaacgggcgcgtaaaaatacgtcaacttgacccgctgccgctttccgtactggccgttattcctcgtctgacggtagggggattctga

SEQ ID NO: 387987 - DNA, 606 bp, Salmonella enterica
atggcctcagttgtcgagatctgcaaccgtgcgctgtcgaacattggtaacagccgcagcattaacagtctgaatgaagccagcaaagaggccggtgaatgttccctgcatttcgaggcatgcagggattctgtgctgtcggactttgactggaacttcgccacaaaacgcgtggcgctggctgacacgaacaacccaccgccagactgggcatatgcgtatcagtatccgtcagactgtctgcgcatcactgaaattatgcttcccggcgttcgcaatcccactgctgcaatgcgcgttcagtatgaagttggtgcagatgccgacggcaccggaaaactgatttacacagaccaggcgcaggcatggctcaaatatgtcacgcgtattactgacgtgaacatgttcgacgctattttcatggaagcgttggcgtggcgtctggctgcggccatcaacatggcactcaccggcaatgctgatctcggcaacttcgccctcaacatgtacaaccgcgtgatcctgagtgctggctctcacagccagaacgaatcccaggaaccgcaaccgccagttgatgaatttaccgtagcgaggttgtcctga

SEQ ID NO: 387988 - DNA, 324 bp, Salmonella enterica
atggaactggtaaacctcaaaaccggcaccgacagctaccaggacgagagcggagaaaccaaaacccgcgacgaatacccgtggggactgtgcatcacgctgaacaatgaaacgctgaacaagctgaaagcacagccacagggtgtaggtaccgaagtgatgattactgcgaaagcagtaattcgcgggctgtctgcacgcgaaactgatgatggtgttaaccgtagcgccgatctccagatcaccgatatggcgatcgcgccagcatcaggagagcaggagaaatcagcggctgagactctctatggcaatgggggtgattga

SEQ ID NO: 387989 - DNA, 333 bp, Salmonella enterica
atgtcaggtgagaaaccaaagtaccgcgttctgcgcctctctcatatccacaataacctgtggccggagggatcagaaattgaatacgacggcgagccaggtagtgcactggaacccatcaacgatgctgcgaaggcagcgaaagcaaaagttacaggcaaggcagcagtagtagccagtgccaaccccatcaacgatgcagccgaagatggcgatctggataagatccgcgaagagtatgaaatgctctttaacgagaaaccgcaccataacgccaaagctgaaacgcttcgcgagaaaatcgcagataagcgtaaagaactgggcgtgtaa

SEQ ID NO: 387990 - DNA, 438 bp, Salmonella enterica
atgatcctcgacaaactgttgatgttctccgaagcgcaggcagttacggcttccgcagcttctaccgatgtaattgacctcggacctattgatggcgcccgccgcgatataggtgtcggttatccgcttgagttctgggcgatggtgaatactaccgcaaccgctgacggtgctgccacggtaaacgtgcagttgcagaccagttcagataacagcacatggaccactatctacgatagcggcgctcttgctttggctaaattgactgctggtaatcgtgttgcatcagcgaaagttccgtccggagttcttcgctatctgcgtgtgaattattccgtcggtactggtccgcttacggctggcgcattcacttctggtattaacctggatgttgatgcgaatacaccgtatccgatccgttccaaagtgactggttaa

SEQ ID NO: 387991 - DNA, 711 bp, Salmonella enterica
atgaatttatttgagcgtttgctgtatagccgcctttgcaatgaacagcctgctgatggcggcgcagcgccggcagcgtcagaacccgcagcacctgctggcgaaaatccggctccggctggcgagcctgcaccaaaggaaagtgacacgtcacaaccaggcgctgacggcgccaaaccagcagaggataagcctgctgatggtgagaagaaggaaggcgataaaccggctgaaaagaaagaagacgacaagcccgaaggcgcgccggagaaatacgagtttcaggccgctgagggcgttgagttggacactgaagcgctgaaggacttcgagccggtggcgcgcgaactgaacctgacaaatgagcaggctcagaagctggtggacgcatacccgaaaattctcgcaggtgtacagcaacgtcaggccgaagcctggcagcagaccaccgagcagtgggcggcagatgtaaaagccgacaaagagatcggcggcgacaagctaacatcgaacctcagcgccgcgcagcgcgcgcttgacctgtttggtacacccgaactgaaagaatatctgaacaccaccggtcttggtaatcaccctgatctggtgaaaacgttcgtgaaaatcggtaaggccatgtctgaagacggcatggtaaccggtaagaatgatggccagcgtagtgcggccgaagtgctctatggcaaataa

SEQ ID NO: 387992 - DNA, 297 bp, Salmonella enterica
atgatcgattatgacgatgacaaactaaaggaagagaacgcgcgtaagcagcgcgatctggctcagcgcgaaatcgacgacattcgtttcgtcatggacagcaagcagggccgccgcgtcatctggtcagtgctggaaaaagggcgtgtattttccgccattccgccgatggacgcgctggcaatggcattcaacgaagggcagcgcaatctggcgctggagttgtttcagcgcgtaatggcgcactgcccggatcagtatctgaagatggccgcagaggccagtgaacaggagtga

SEQ ID NO: 387993 - DNA, 1671 bp, Salmonella enterica
atggcggaaacaacgaaagagcggttgaacaaacagttctcgcagcttgaaaacgagcgtcagtcgttcgaaccacactggcgtgagctgagcgactatatcaatccgcgcggttcccgctttctgacatcagaggccaaccgtaacgaccgacgcaatacccggatcatcgactccaccggaactatggcggctcgtacacttgccagtggcatgatgtccggcattaccagcccggcgcgtccgtggtttcgcctggcgactcctgatcccgacatgatggactatggtccggtcaagctatggctggagacggtgcagaatcgtatgaacgatatgttcaacaagtcgaatctgtaccagtcgctgccgcagttatacggcagcttaggtacatacagcaccggcgcaatggcggtactggatgatgacgaagacattatccgcacgatgccgttcccgataggcagttactacctggcaaactctccgcgtggaagtgttgatacctgtttccgtaagttctccatgactgttcgccagcttgtgcaggaattcggcctgaacaacgtcagcgaatcagtgaaggggatgtgggaaagcggcacgtatgagaagtgggttgatgtgattcactcagtatatccaaacatcgaccgcgatacggaaaagctggacagcaagaataaaccgttcaaatccgtttattacgaagtcggcggcgacaacgacaaactgttgcgtgaatccggattcgatgaatttccgatcatggcgccgcgctgggaagtgaacggcgaagatgtgtatggctcgtcctgtcctggcatgctggcgcttggtccggttaaggcgctgcaacttctccagaagcgcaaatctcagttgatcgataaagccactaacccgccgatggttgggccaacatcgctcaagaatcagcgcgtttcactgttgccaggcgatatcacttatatcgaccagatgacaggccaggatggtttaaaacccgcttatctggtcaatccgagtactgctgatctggtggctgacattcaggacacgcggcagaccatcaacagtgcctactttgtcgatctgttcatgatgttgcaaaacatcaacacccgctcaatgccggtggaagcggtaatcgagatgaaggaagaaaagctcctgatgctcggcccggtgctggagcgcctgaacgacgagtgcctgaacccgcttattgatcgggctttctcgatgatggtgcgcaaaaacatgctgccacagccgcctgacgtgatggaaggcatgccgcttaaggtggaatacatatccgtcatggcacaggcgcagaagtctatcggcctttccagcctggcatccacggttaatttcatcggtcagcttgcacaggccaaaccagaagcactcgacaaactcaacgttgatcaggcgatcgacgcatttgctgatatgtccggcgtgtcaccgacggtcattgttccgcaggaacaggttgaacaaacccgacagcagcgcgcgcagcagcaacagcaacagcaggcaatggcgatggctcaggtagcggcacagggggcgaagactctcagtgagacgcagatgaaagatcccagcgctctgtcagcaatggctcaggcagcgggcgggcagcagcaatga

SEQ ID NO: 387994 - DNA, 207 bp, Salmonella enterica
atgtgcatgggtagttctccatcagtgccagcggcaccggaagtgcaggcagcgccgcaggagcaggatgctgctgtcgttgacgcgcgcgacgaagaaacccgtcgccgtcgtgccgccgccggacgtagctctactctgctgaccggatcgcagggtgatacctcaacggccaataccagcggcaaaacactgctcggtcagtaa

SEQ ID NO: 387995 - DNA, 183 bp, Salmonella enterica
atgtcagagcaggcttatgatttaactaaaattaaagagattgaccagaccgacgatcctcagaaggcaaaccatctgctggctaatgggtgggtgttactgaaggttactgaatcgcagtctcatgatgattacggcgccttatattcaacagtttggtttactattggcaatccacaataa

SEQ ID NO: 387996 - DNA, 594 bp, Salmonella enterica
atgcctgctgagccaaaagcacacaaacgcaaatcaacgcagtataagcccctgacagcaatgcaggaggcttactgccagtcatacattcagacgcctgaaaaccagactcaggcggccattaacgccgggttctcatataagactgcacacgtcaaagccagcatcatgatgcgcgatgagcgtattcagaaacgcatcgccatgctgatggaggatcgcaataagcgcctgcgcgtcagcgccgattacgtcctgatgcggctggtggaaatcgaccagatggacgtgttggacatcctgaatgacgacggaagcctgaagccgatccgcgaatggccgaagatatggcgtacaaccctcagcggtttcgacctgtcgtcgaccatcatgaacttgaacgaggattcgatagagaccatcctcaaaaaaatcaaatggccggacaaggtgaaaaacattgagcttatcggtaagcacgtcgacgtcaatgcgttcaaagagcgcctggaggtttccggcaccgtcactattgccgaccgcatggccgccgctcggcgccgcgtaaaagagcaggctggtggtgaagaatga

SEQ ID NO: 387997 - DNA, 327 bp, Salmonella enterica
atgggctttccttctcccgccaaggactatgcagagacaaccctgtctgttccggttctatgtaactacgacggtaactgccgcacgatagaaacgtcgcaaggttttgccgtcattaacgtttcgatgaagccagggcagggcgataccgttctggtttctttctgcgggcatatccagtttgccgttgttcgtgggcgtgcgttgatcactgacgacggagaggctattgaaggcgacgcgctggacgatgctgtgatacagggcgtcgtcactcacctgattaaccgggccagacaacccgacgacgacattcccgttatgtaa

SEQ ID NO: 387998 - DNA, 480 bp, Salmonella enterica
atgaccaatgacaaaataacagacgtaaagcagttcactaaaaaaccagtaacgatttctgctattcagtggacaggcgaaaacctgccagccgtaattgaatttactggtaaacacccgcgctggggtggttggtttgctgacatggatgagtatgtggcccacgtgcgcggagacggcaaccggttcaaaatttacaccttggaaggggtgatggatgcacttccgggcgattggattattcgcggcgtccagggtgagcattatccgtgtaaaccagatattttcgcggcgacctatgaaccggcagagctacaggaacgccgcaaggctgatagcgagcccgccagtctgccgccggtgagcgcaagattgaactggtactggatgcgcaggaactggaaatgctggagcggaactgcgccgcccggcgccctggtcgtgcgccgtatgaaatgggtgaatacattgcgctgctga

SEQ ID NO: 387999 - DNA, 954 bp, Salmonella enterica
atgacggcctattacaacgaattcgatccgttcgccgcgcaatggttgcgaaatttaataaaagaaaggcttatcgccacgggaattgttgatgacagaagtattcttgaagttgccccaagtgaccttgcaggtttcacgcaatgccacttcttcgccggtatcggtggatggtcatacgccttgcgactcgcaggtgttcccgactctttcccgtgctggacgggcagtccgccgtgccagcctttcagtgtggctggcgcaggtcgcgggactgacgattcacgtcacctggctccggcctttctcgatctcgtcagtgaatgtcgcccttcagtcatctttggagaacaggttgcaaatgcagttaaaaaggataactggattgatgctctactcattgaaatgtcagaagaaggttacgccagcgggtttgccgtactaccagcggcaggcgtcggcgctccgcacaaaagagacagaatcttctttggtgccgcgctactggccgacaccgtgcgcaaacaacaacgacaggaaggcctgcgaagatgcggccttgaaaatgtacaggtcagacggaacgaaaatccagcaacgattacaggatgttgcggcaattgcagcctggcaggcaccaatggcaaacgaccacagggggagtggcccgactgtaattcgtcaggatggaaaggacaggacttacgaccggctggactacgcatcggagcagggaataaagacggctacgcgcatcacagccactggtcaggtgctgactggcttggatgccgggatggaagattcaggccagttgaatccggcacattcccgctggctaatgggattcccgccagagtgggacgcctgcgcggttacggtaacgcgatagtcccacaagtagcggctgaatttattaaagcgtttatggagtgtagaccaaatgaccaatga

SEQ ID NO: 388000 - DNA, 594 bp, Salmonella enterica
atgagcaacatcgacaaacaggcagtaacagcaaaaacaaaagaactggcatccctcatggttgagcgattcagtatgaatcctgtcagctgcaaattgctgaatgaggcatgggaaaaagaattccctgacgaagtggctatcgctgagcgaatgctggcgctgctggatgagaatattcaactccagcgggaaaaagacgcgatcgaagccgtggcgctggcgctgcgtgatgatatgcgacaggcacgggagcaactggcagccgcagagcaggagcgggaaaactggcgtatcagctttgataatgagcggtaccgcgcagataagctggcggctgcattaaatgcagagcgcgagaaattagtaatggcgaatcgatcgcttattacacaacacatccgtgcaaacagtgccgagagtcgcatagcagagctggaggcgcggacagtttgcctccctaaacttccagttcttggctctacttctgagcggtacgagggatttgctgctggtgcatccagcatgagaaatgaatgtgctaatgcaatccatgccgctggcatcaaggttatcgaaggagaaggacagtga

SEQ ID NO: 388001 - DNA, 417 bp, Salmonella enterica
atggaatgcaatatcagtgagttagtgaagtcagggcatgagcgcgcggctgaattgaaagcatcatgttgcgccgtcgatgtgcgcagcgtggcgcaactgattagggacctggcgtcacagcttgaagtgcagttggtgcgtagtaatacgctggctgcggagaatgctcatgcgcgtgagcgccatgtgttcatccgcgcactggcggtttcgattcttgagcatagtggcggtcgcatggactggcgtggcgcgatggacgacgctaccggctgcctgtttagtggatcgcttgaaaagcgccgccgcaactcccggcacaatcctcgccgtggtatgcgttacaccaaaggcgacctcaagaaagcatttcgtaaatgggcgatcaagcacaagcaggaggcggatcaatga

SEQ ID NO: 388002 - DNA, 777 bp, Salmonella enterica
atggccagcagctggattaaggtagaggtaatcactcctgataagcctgagatatttcagatagccgagctactgaacatcgacccggatgctgttctcgggaagcttgttcgcatctgggcatgggctgatcagcaaacaatagacggtaacgctggcagcgttacaaaaggagtactggacagaatcgcttttattacaggtttcgctgatgcactgattactgttggctggcttgcctatgtcgacgaaaagctggttctgcctaactttgaacgtcacaacggtgaatcatcgaaaaaacgggcacttacaaacagaagagtggcagaacaccgcaagcgtgaaacgcaaaatgtaacgcgcgtagcgttacaaaaagagttaccagaggaagaggaagaggaagaggaagatataaataaaacccctctctctccgcgcgaaggacttcaaatctctccgactgtcgttccaggtgtgggtgagccgatcggcaaattcaccatgcatgacgattggcagccggatcctgatttcctccagcgcgccgggctatggggaataaacctgcagaagcccccgacaaaatgcgagttggcagagttcaccacgtactggaaagcagagggaaaggcattccatcacgaccagtggcagcagaaactggcgaggagcgtgcagtcttcgcgagcaagaccttcaccggtgccgcggagtgatgtaaataccgtatcggaaccggacgagacaatccctccaggattcagagggtaa

SEQ ID NO: 388003 - DNA, 210 bp, Salmonella enterica
atggagattattactcgtctggacgctgcaaaggcaggtcttaagcgttattacaccggtaaaaagtgcaagcacggtcatgacagtgagcgctacgtctacaacggtcattgcgttgaatgcgccattaactccagcctgcgccgccaggcggaaattaaacggattatggatgaagctgcgaaaggcaatgtgccggaggtgatctga

SEQ ID NO: 388004 - DNA, 231 bp, Salmonella enterica
atgagcgagaacgcgcaattcgatttcaaaaagcactggcttgcacttactccggatgagcgcgaagccttcgcagcagaggccggaacaaccagccattacatccagacgcatcttactgggaaacgaaaaatgcccggtaagacactgatgaacgggctgtttaaggcggcaaagtcccgtcagtgggtccgtactaaaccagaactggcatacttcttctactcctga

SEQ ID NO: 388005 - DNA, 609 bp, Salmonella enterica
atgaaagagataaattatcagagcatgaaaagcatccaggacgtacgcagacaaaatctcagggacctgatagaccgtgaatttgacggcgtacagacacgtctggctgagcgaatggcaacccaggctaatctggtgaaccgctgggtgctggggaaaaaggtgatcggcgatcaagtagcccgaaaaattgagacggcagctaacaagccgagaaactggctggatatagacagatcgctgacactcgatagttttacgcccgtcggtccgacagacattggaattatcgcggcgcataacctggaacgctggatgagggaaagcgacgaactgaactcgcaaggaaagctccagcgcgcaagtggcatctctcagaataccgtcagcagaatgctgaacaatgaggttagtgtttctgtatccactctggaggctatcgcctcggcattcgggcgccacggttacgagctactgatacacccgcaggatcagtcaaccataaaatacgacaggtcacgctacgcattgttacctcaaagcgaaaaagacaagatcgaaagctacattgaattcgtcctctctcagaacaataaaacaaaagattaa

SEQ ID NO: 388006 - DNA, 165 bp, Salmonella enterica
atgcagtggaaaatcatcaacggttggtactgcgttacagcgtgcgggctgatgagttggaagttccgctcgctggctgaaggcatgcaatgggcgttcatcagtaaagtcgcccatgaagtggctaacgataacgggatatggggtgcaaatgatgaacgttaa

SEQ ID NO: 388007 - DNA, 303 bp, Salmonella enterica
atgatgaacgttaatcagcaactaaatcttcagaaaattatgggcgcattcgacaaagattaccgactgtcagagcagctttacgaccgtcaggttgagctgatcgaaagcatccgtctacaccaactggcatcaacgtttgacgttgtactggaaaagggagtgcgcaaagaagtgctggaagcggcaaaagaatgccctgaattcgaagaactgatggatgcctatcgccgcgaagcgatggcaatcatcgcgaagtgggatctggctgatcaactcgacgggcagagggacgcggcatga

SEQ ID NO: 388008 - DNA, 249 bp, Salmonella enterica
atgaaaggtgcattaggcaaaaaggaactcctggcggtggtgccactgtcatggagcacaatcgaccgcctggaaaaaaacggtgaatttcccaagcgctggtacatcacagacaagcgctgcgcatggacacaagaagaggtagagcagtggcttgataagcgcaaggaggaaagtcctgatgagtttcagggaaaaaagccgccggttgatcagcgcgtttatcgtccggtgagtaacgcagcatga

SEQ ID NO: 388009 - DNA, 300 bp, Salmonella enterica
atgaaaaagcttacgaaattacagaaataccatcagaactacgctcccaaaagccgggtttcgaaggtggtagcggtaacgcctgaagcgctggagattgagcgccgggctattgccagggaacagaaagggcacttccgtgtcgccgcccggttatggcttctgtgtatggatgcagcccgtggtgaagtcgagcgagccagaatcgccgtgcgccgtgatcaatgcattacaaagagcaacggcctgcgccgcggtgattatagcggagtctgctgtcgtggggtggtttatgactaa

SEQ ID NO: 388010 - DNA, 1068 bp, Salmonella enterica
atgagcaaggtaggcgattatttctttgagttccctgcgtcgagaggcttgcagggtagcaccgtgacctacatgatgactgttcctgcccgtacgctagctcgcgtgctggcatctgacaatgtcggcggcactcttgagcgttcgcagcgtgaaatcaatccggcacgcgtgaagaagttctatcaatatctggttagcgcgtacgaaaagaaggagcctttcatcatccccccactggtcggaaactgtaactcagagatcgagtttcaggaattcgggaataccaacgttggcgtggcgcgcttccctatggacgctgaaataaagctgttcgacggccagcaccgggcggctggaattgcggagttctgccggacctacggtgaaccgatcagcattcctctgatgctgacgcacaacctgccgcttaaagcgcgccagcagtttttttcggacatcaataacaacgtttctaaaccaagcgcagccatcaacatggcgtacgacgggcgcaatgacgtagctcagggcatggtgtcgttcctctcccagcacgacaccttcgctgagatcaccgatttcgaacacaacgttgttcctgccaagagcaagttgtgggtgagcttcaaggcgctttgcgacgcgacggctaagttcgcaagtgcaggcagcaagccgctggaaatgggtgatatagaatccatctgggatgcatggctctgcctgactcaggttgaggcgattcgtcatggaaccagcccggctgactacaagcgtgattacctccagttccatgcggtgatgatcaatgcatttggctatgcgattcagcgcctcatggctgaacactctattcgtgacatcacggcgatgattgaagatctggcgcttaatgcgggttcggctgagatggaggacttcttcctgattacccgctggggtggcgtgtgtgtgaacacagataaggagcgcccaacgattatcgcgtcagttcctgctcagaaagcggcggcagagcaactggttcagatcattaaagcgaagacgattgtggagggagcatga

SEQ ID NO: 388011 - DNA, 552 bp, Salmonella enterica
atgaccgattacaccggaagtaatacgccagcagatcagcgtgatttatggcgcacgccgccggcgatcttcgctgcgcttgatgccgagttctgcttccaactggacaccgccgcagcaccacataacgcgctgtgccgccgcttcattactgaggagcagaataccctggtgacgccatgggctgattacatgtctatccctggccacgtatggatgaacccgccatacagcgacatcatgccattcgtgaagaaggccgcggccgagagcaaaaaccagataggcaccgttatgctggtgccgtcagatacctccgtgggctggttcaaggaggcgattcagactgccagcgaggtgcgcttcatcaccgccgggcgcctggcctttatcaatccagtaaccggaaagccagtcagcggcaacaataagggctcaatgctccttatctggcggccttatccgcgcacacaatgcgatttgaccaccgtagagcgcgacgtgctgattgagtttggtagcgcgcgcctggcgcgccgggaggcggcttaa

SEQ ID NO: 388012 - DNA, 1254 bp, Salmonella enterica
gtgcttaccgacaccaaacttaaaaatctcaagccgcaggccaaactatacaaggtttccgaccgtgacggcctgtatgttgccgtgctcacgtcaggctctgtctcgttccgctacgactaccgcatcaacggccgccgggaaacgctggtgatcggccagtacggtcgtgacggtatcagcctggcggaagcgcgcgaggaactcattgccgccaaaaagctgctgaaggcaggccagtcgccagctgcggcgaaacgtgacggtatcaggcagatcgctggggccgaaacattcgcggtatataccgacgcctatatgaagcacgtcaccctggctgagagtacgcgtgctatgaagcaggcggtgatagatcgggatatcctcccgtatctcggcaacaagatgatgacagagataacaaccagggtggtgcgcgacctttgtgatcgcattgttgaacgcggcggccgggcgactgcaattcaggtcagggagataatcagcagcgtgtaccggcacgccaacgaccgcggacatggcctgtttaatccggcggccgacatcaagccatcatccattgcgatgtttaagccacgcgaacgtacgctttcaccgggagaggtcggtattttctttcgcgcactggacaatgtgggagcaatgggaaccatgaagatggcgctgaagctggtgctgctgacgatggttcgcaaaaatgagtttatttccgcaacatggtcagagatcgatttcacgaagtggacatggacgatccccggtgaccggatgaaggccgggcgggcgcatgtgatttacctgccgaagcaggctcaggatttgctggtggggttgcagatgtgtgccggcggcagtgaataccttgttcctggtcgctacaacttccgcaagccattatcgaacgccgcgcttaactcgctgatagacaggacggtggaggccataaacaaagacgacgagaagattcagggcttcaccgtacacgacctgcgccgaacagccagcacgctgttacatgaggcgggatatccatcagactggattgaaaaagcgcttgcgcatgagcagaagggcgtccgctcggtttacaacaaagcggagtatgctcggcagcgctcctatatgttgcagcagtgggcggatatggttgattcctggattaacggggagcacaccgatctggtgccgttctccccgtcgaagtttgagaagtggatgaaagggaaggattaa

SEQ ID NO: 388013 - DNA, 684 bp, Salmonella enterica
atgaatgtgaataaattatttataagcgtcctggcggcttcgacaatactggtattgtcaggttgtgactacgtcgaaaaaacgaaagtagttgatgaactaacaaaacaacaggaagaacaaaaggccagaattgatcaactcgaaaagcaattagaacaacaagacaaaaaaacaaataacattgaaaaacaaaatcttagcgcaataaacagtacaaaaatgctgactcaggtggtgaaagagattaagcgtcagcaagacaactttgtctttactgaatttaacccagctcaaacaaaatattttattctaaataatgggtctgtgggtttagcggggcgcatattatcaatagaggcctctgaaaatggctgcgtcatacatatttcgctggttaatttattaagtgtacctgtttctaacgttggttttcatgccacctggggcggtgaaaaacctattgatctaaaagaatatgccaaatggcaacagctgctatttagcaccaccatgaactccacgctgcaattattaccaggtcaatggcaagacattaacttaacgttaaaaggggtgtcgcccaataacctgaaatacctgaagttggctattaatatgcagaatatcaacttcgacaatcttccacctgccgataccaggcagaaaaaaagcaaaaaataa

SEQ ID NO: 388014 - DNA, 3516 bp, Salmonella enterica
atggatgacaatgctttagggtttgcctcatactggcgcaattcgctggcagatgctgagtcaggaaagggcagttttgaacgcaaagatgccaaaaacttcactcactggcatgggatagcggcgggacgtcttgacgaaacgatcgtcggtaaattttttgagggagaaaaagacgacgtcgaaacagtcgatgtcatcttgcggccaaaggtttatttccggttactgcagcgtggaaaggaccattccgctggtgcgcctgatattgttaccccgatagtgacgccagccctgttgagccgtgaaggttttttatatccgacgccagcgacctccattcccagagacctgcttgaacctttgccaaaaggggcattttcaattggtgatattgggaagtatgataaatataaaacgacacatacctcattctctatcaactttgatgacagcgttgataagaccgccgaaacagatgaagaacgagaagcacgatatgcagcctggcagcaggattggcgtcaatatctggatgattcagagaagctactgaagaacgttgtcggcgactggattaaaaatcccgagcaatatgaactcgctgagcacggttatattgttaaaacggcgcaatctggcggcgccagtttccatatcctttcgctttatgatcacctgcttatttgcaaaaaggatgtgccgctcttcaatcgcttcgcctcgcaagaggttcatgctgcagagtcattacttcctccggaagcaaaattcagcgacagacttggacactccggggataagtttccgctggcaaaggctcagcgcgatgccttaagccattttctggatgcgaggcatggcgatatccttgccgttaatggtcccccgggaaccggaaaaaccacgctggtgctttctatcatcgccacgcagtgggcccgagcggctctcgaaaaagcggaacctccggttattatcgcgacttcaacgaataaccaggctgtaacgaacattatcgaggcgttcgggaaagatttttcccagggcactggtgcaatggccggacgatggttgccagagctgaaaagcttcggcgcttattttccctcaagcactcgtaaagccgaggccgccaaaaaatatcaaactgaagatttcttcaaccaggttgagtcaaaagagtatgtagaggatgcactgctgttttatctggagaaagctaaggcagcctttcctaaaaaagagtgctcatcccctgaaaaggttattgaactcctgcatggtcagttggcagcaaaatccgaacaactggtaaggctgaacacaacatggcaaacgttaagccaggttcgggcagcgcgtgagcttattgctaacgacattaagcaatatctcgataatttaaataaattacttgtcgggcaagaacaaaaagtcactctactaaaaagtgctaaagcggaatggaaaaaatatcgggccagtgaatcactgatctatccattattttcatggctaccagcggttcgcagtaagcggcagtaccaaatacaactgtttctcgaagataaattaggtgcgctgattgcgaggaatcaatggtcggatcctgaaaccatcgaacgtaatatcgataggttacttaattccgccgagcgcgagcaaacaacctaccggcagcagattggctccgcgcatgaaatcgttcttaaagaacagcaggcggctcaggaatggcagaggctggcacttgatttagggtatgaggggggcgaggaactgagcttctcacaggcagatgagctggctgatacgcagattcgcttccctgcattcttactggcgacccactactgggaaggtcgttggttgatggatatggccagcattgatgatctgcagaaagaaaagggcaagaaaggtgctaaaggggtaacagctcgctggcaacgccgaatgaaacttaccccatgcgtggtcatgacctgctatatgctgcccggcaatatgcagataagtgaacataaaggacaacgtaaattcgagaaaagttatttatatgattttgccgatttactcattgtcgatgaagccgggcaggtgcttcctgaagtggctgctgcctcgtttgccttagctaaaaaggcattagtgattggtgatacggaacagatcccgccaatatggagtattactcctgctattgatataggtaacatgctggcggaaaaaattctgtcaggcagtacgcaagaagagattactgagaaatatacggcaatcgcagagcttggtaaaagcgccgcatctggcagcgtcatgaaaatagcgcagtgtgcttcacgctatcaatatgatcccgaactggcacgtggcatgtacttatatgaacaccgccggtgcttcgataatattattggatactgcaacatgctttgctatcacggtaagttgttgcctaaaagagggggtgaagagagcaatttaatgcccgccatgggttatctccatattgatggtaaaggagaactggcaagtagcggaagccgatataatttgctggaggctgaaacgatagcggcctggctgacagataaccagcaaagcattgaagcgcattacggaaaatcgcttcatgaagttgtcggtatcgtgacgccttttagtgcgcaggtatcgaccatcaaacaggcgctggataaacaaggcatcagcgcaggcgcgaatgaaaagtcgcttacagtaggcaccgtgcattctcttcagggcgctgaaagagcgattgttatattctcgccagtctattcaaagcatgaagacggcgcgtttattgatagcgataacagcatgctgaacgttgctgtctcccgagctaaggacagtttccttgtcttcggcgatatggatctgtttgagatccagccagcctcatctccgcggggattactggcaaaatatctctttgagtcagagaaaaatgcactcttttttgactataaagagcgtgaggatttaaaaacttccgagaccaaaatctacaccctccatggtgtggagcagcatgataatttcctgaatcagacgtttgaaaataccggtaaacacatcacgatagtttctccatggctgacctggcaaaagctggagcaaaccggttttcttgattccatgattgcggcgtgttcacgtggtattaacgtcacggtagtcactgacagaagctacaacactgaacataatgattttgagaagcgaaaagagaagcagcagaacctcaaagcggcgctggagaaactgaacgcccttggtattgcgacaaaactggtcaatcgtgttcatagcaaaattgttattggtgatgatggtttgctgtgcgtgggatcgttcaactggtttagcgcgacacgtgaagcgcgatatgaacgatacgatacatcgatggtttattgcggtgataacctgaagggcgagattgaggcaatttataatagccttgagaggcgtcaggtttag

SEQ ID NO: 388015 - DNA, 1092 bp, Salmonella enterica
atggtaaaacgctctgaaattaaattcataagaccttgcctctcgatatatgaaaataataaggtcttgaccccagcttatgctttgcagtgtttgacgctgaaaaaagtgattcagataaacttagataattgctctttacaaagaatggaggaattatcatcgacatcaactctggaggatgtaaaacgagttggcctgttgccgttagtagatttattacaatcaggaagtgtatgcttaactgcaattggtgttaatgaaatgccagatatatgggttgagaaatcaatggctgcataccagaatttttgccaccaattttggcctagtcatattgacgatcccgaggcaacttttagagattactcccctgatgcgaaagaaaagaaagttcttttccaggaactttcagctgaagcaagaacagtatacggcctccactatatatcaatgctgcaaattcaaaatataaaactaaactattctcatctcacgcctgaaaaaagattcgaagtatatctttatagcatgataagcttcattgatatgatcagtgcgtatgatttagaaatagcaaaatatgctttttgggatcttgactcaaacgctattaaccagctaccagagagtatacatacgcgtcgaaaatatataaaagagaatttttataagaacggaagcaatcttgataaatgtcgatggtatgcatttgatgcggcgatggatttacactggcttacgggagctaatttttcagaagatataggttccttcattactttaaatggtgtaaagtttgagactgaacattgggttggaacaaatgacaaaaaattatattacatctcacaagatattcatcatatttactatgagggttcaacgatgaaggcgttgagttcctgtagagaaaatgagatgactgcatttcaatactggaaagttgttgatagtatttcacaatctgtacttttatcccgtaaatattcaaaaaaggaaccaaaccctaatattactaagttgattgatttggctgtagaaaaaatagaaaatgatttacataattattttttaacaaaagacacctaa

SEQ ID NO: 388016 - DNA, 2805 bp, Salmonella enterica
atggcagacatttttaacggtaaagacgttaaggtatattacaacgatgatacgggaaatagagccgtaattactggtggtaatattcagattaacgagttagccgcatacccatcttttagtatgggaaccgaagtacagaagatcgaaacatataatgatgaatatagcaatgccatcgaaggacagaaaaccgtagataatgtgacgctagtagttaattatattcctaccgatccaacgcatgagtacttagataaaaaatacgataaccaagaagaattccaaattactatttttgtcaatgaaaataacgaagccggacgtttagaaagtgtaatgctaaatggtgtactaggtagtcgtatgctaaatggtgataaagattctgtagttactatgacctacgattttgtacctaccgaagtaattagctatgcaccccgtgatattcccccagtattacgccgtggtgatttcggcgtaggatcggacggtagtatagactatccgcaatatcaaccagatcaagcaacgggcaacgcctttgtaaaaatttctgcatccgatattgataacccaagtggtgtagatctaatgggtattgaactagtagatcaacaagcagaaaacaccaatatcatgatgacaacaacgggcgacctacgtttatatgcacgtaatgctactacgccgtggacacgtctatataccagtggtgaagccgatacacgttatctaattaagtccaataacctaagcgatttaactaactttgaatcagcacgtagtaatttaagcgtatacagtaaatccgaaactgataataaattcatgatcggcccgaataacttaagtgaattaactaacgttgtagtagctcgccagaaattggaagtatatagccaatcggaaacggatgctaaatttctacaggctgcaaataatctaagtgatattgtcgatactgcaattgcccgtaccaatttaggaattaatagtactcttgaaaatgatgcaaagtacttacaagtagaaaataatctatccgatgttaaggacgttgcaacggcacgtactaatctaggtattaacagtacaatcgaaaacgatgcaaagtacttgcaggtatcaaataacctaagtgatgtatccgacgcagccgcagcacgtaccaatattagtgtttatagcaaggccgaaagcgatgctacatacgtccctaaaacaaccacagtcaacggacacgccctagactctaatgtaaccgtatctaaggccgatgtaggcttaggaagcgttacagacgacccacagctaaagatcagtgcaaacctaagcgatctatcgaacgttgcaaaggcacgtactaatttaggtattaacagtacaatcgagaacgatgcaaagtacttgcaggtatcaaataacctaagtgatgtagcggacgttgatactgtaaaacaaaacattggtttagacagatttaaacagtcgccatccgaaactatgatatatccatctagtgggcaaaatccttatcgtatcactatcagacctaacggtgattggggaacttggcgtgatgatactggaacatgggaaccattaaagattgttgccggtggtactggtgcaacaaataaaaaagacgccagattaaatcttaatatcccagcagcttataaaataattccagacggaactaatattcttggttggcttatagaaaacaatgaatcaggtgttttctcatctggagaaaatgtaattaataagcccgcagacggtcatggttggtggacttataattttaagatacatcttaggaatcaagaaggaaaaccagattttggagttgtagaagcaacgtcggcagcaaatatcatgtacatcattgtgcttacaaatggtcaatggccgcatggatggtttaaaattgttcgtgagaatgataatgttcaattgcgagacttgaaattaacacaatatgatactgggtttagcggtcatcttgaactttataacatacaaaacaataatccaaaaggtcttacgcaactttataatgaatttcaagacggtgtgctaaagactacccttcgcactggaaacctagaaaataacaggaactcgtatttgcagtgggatgaaaacggatctctttggggtgttgttaacatcctttccaatgatttgtatttcggcccgcatagcgttagaaagcttcatactcgacacggaactcttcttgttgatggtacggcaacaccatattattacacatttggtaatcctgatggtcgacgtagtgtaaccgagttcggaactgtagaagatggatggatattttacgggcaagtaaatagagatctatctaaacagctcgatgtaaatggtgttgtaaatgcatcggcatttaatcaggcatccgatagagatctaaaagaaaatatcgaggttattagtaatgctatagatagagtgagagctattggtggatatacttatacattgaaggaaaatggtatgccacatgctggtgttatagctcaagaagtaagagatgtattaccagaagcaagtggttcttttactaaatatgttgatttaccggggccaacacaagatggtactccacttcgtgaagaggaaagattctattcagttgactatgccggaataacggcacttcttgttcaagccttcaaggaaatggacgaaaagataaccaaacttgaggaacaacaaaaacaaatcgatgaactaaaagaattagtacagaaacttttggacaataaataa

SEQ ID NO: 388017 - DNA, 474 bp, Salmonella enterica
atggcaactatggatatttttgcaggtgctaaccttactgtagaagtaggcacacataccccaggatctaaaacccccactactgatttcgaagaaattccagaaattggtgcattccctaccgttggtgcggaaaacgtagtaatcgatgtagttacttataataacgcatataaccgtaaactattgggtactaaatccgtaccagatattacgctaaccgttaactacctacccgataataagattcaccaaaaactattggaactagaagaaaaccaacaacgtgcacaattccgtattacttattatgaagatgcaacgcatacccaatcatatagtattacctacgtagctttcgtttcttcttccgtaactagtggtgataaagaccaagtagtaacacgtgatttcgttctagccgtcgatggtggcccgattgaatctaaagtaacagtagtaccaacaccataa

SEQ ID NO: 388018 - DNA, 300 bp, Salmonella enterica
atgaatctacaggcactaaaacaagcattaaaaccaaaactacatgaaactaaaattgacggattcacggtatatattcatcgtccatcaattaaagatgcaagtaattgtactaccctagaagccgttctagtttattgtgttaaggatgaaaacggtaaacctatttttgcactagaagatgataacgatctaattaatgtttcggagattgatcaagtgctcgccaatgaaatttacattaaggtacttgccctaatttctaccgaagacgaagtagattctaccgaaaaaaaataa

SEQ ID NO: 388019 - DNA, 369 bp, Salmonella enterica
atgctacataagcgtggactatccctagaagaaatagacaccattgaccctgatatttttaatgccctttatatatacgacaccttaatagagccaaacggggcaagaatggaaatgatcaagtacgcaaatctttgtaacttactcttaatgacttcccaatcaataacccccgaagcacgtaaaaaagcaaaggttagtgattgggatttcgcagatcttctaagtgatgtttcgttaacaatgcgagaaaaagcattaaaaagggaagaacaagaaatagaaaacagtcgcaataatattaaatctattggcgatatgatcaaacgtcaaataagcaatgagggcaaaaatggcaagaaaaaatga

SEQ ID NO: 388020 - DNA, 2223 bp, Salmonella enterica
atggcaagaaaaaatgaaagaattatagtagaggttgacggtgatactactggcttgcaaaagaaactaaatcaagccgaagattctataggtaaatttggtaaaaaagcgggtggatcaattggtggtgctgccgattctattgcaagtggtttaggccgtattagtggtggtttcgttggtattgtaggtgcagtgggtgtagctggtactgcattagctggattggcaataaaactaaatgacaacgtaagacaacttaatcaattaagtatgcaaagcggattgaccgttaccgagttacagaaacttgataaggcattctatcgtactggtgttaatgccgagaaactagcagatataaaccaagataccttagataaattgggcgatgcatttgcaaatggtggtgctatttccgatgatattaaatccgtaggattggatattaatgattttaccaaatacctaaatcaagccgatggtggtattaaagccgtaatcgatactttctataaattgaaagatgcaggaaggactacgggcgaaattacattcttattagaaagtatgggtagtgatgctagccgcctagtatcagtacttaatgaaagtgccaatagtcaagaagcatggaataagattaataatgaatctgtaattatcagtgaagataccgccgcagcattccagaaatttgacgataatttgcagagtgcaaccagaacggggcaatcgtatctctatgacttcatgacaccagttataaaggaatttaatgatctttatgaattggttaataaggattggacgggaagcgattttatgcaaatgctataccgtggtgcagataatttcgtattgggtggtaaaggtgctattccagactttctaaagaaattgttaggtaaagattcattagattctgcatttattgccggatcaaatgaatatgatttcgtaaatgcttcacgtgcaggatatgaagccaataagggtaaatggaaaactaacccccgtaatactggtacagcagatccaaaaagtggatggggtgctaaacaggaagcagagaaggccgcagcagccgctaagaaagcacaggaagccgcagcacgtaaagccgaggccgcagccaaacaagcagcagcgaagcgtatacaggccgagagagcgttagaagtggcattgtcgcaagtagcagagaacgccggagaacaacgcctacaggtattcgaccgccaacaaaacgaactattgaagacaatcgaaactactgcaaagactgtaggtaaaactgcatccgaaattgaagcattactagatcgtgctagaaagtccggtgcacgtgcacgtactgaattaatcgatagcatgattggatatactgaccccaatcaagatttaaaagaccaagttaatatatctggtatgggtattaataaaacccaatctaattttttatctgaccaacaagcacagcgtttaaatggtgataatccttttgcctatgacaatacacaaaagctattggaagaaaataaaaaacgtgaagaattagaactacagttaaatgccaatctattacaaagtacagaagactttgaaaaacgtaaggccgatatacaggcacgttatgcagcacaggcaatgcagattgcacagcaaaacaccaacgcacagatgaatatattagctactgccgctggtgatatgggtaatgtacttgcaggtgtatttggtgaaggtaataaagccgctgccgcagcctttgcgatccagaaagggatcaatatggcacaaattatgatgaatatgcaggtagcactatccgaagcacttgctacgccattccccgcaaatattgccgcatacggtcaaatattgggtatgggtgcacagctaattagtacagcacgtggtactaacatcagtggacaattccacggcggggtagatagtctagatccgtcgatggataataaatcatttgtactaaaagcaggtgaacgcgtagtacagccagaagccaacaaaaaactaactgaatttttagataacaattccggtagtaataattatggtggcgatactacgatctacgcaccattgattgtacaaggcagtataggcgacgatgacgctaaatttaatgaaatgttgaagaaacatagtcaatcagtaaatcaagcagtacgagacgcacaaaagagaagtacataa

SEQ ID NO: 388021 - DNA, 567 bp, Salmonella enterica
atggcaaacttaacattttcaaataatattaaattatcggactttacgttatcgagtaaatcaccacaatatagtaatcaatcgtggacgggtgcacttattcaacgtagtacgggcgtacagtggtatacatttaatttcacacttaatttcaaccaacgcgatagacaggaagttcttgcatttattgcggagtattcacagggcaagctgtttactattccattgggacacctatcgacctataaaggaaaacaaacaggtgcagtaagtgtaaaaaatgatgtaaaacgtggtgtatataaatttactacggcatcggcacaacaacttgaagtaggaacgatgattcaatttggtaatcataaaaagatttaccagatcgtagccaatacaggtacagaagtttctatttttcccgcactacaggccaatattcaagccaatgaaacagttttctacaatggccttgtaattgaagcacgtctagacgtagataacgattttcaaatgcccgtaacgaatctagtagcaattacttttaaatgtacggaggttgtacgctaa

SEQ ID NO: 388022 - DNA, 624 bp, Salmonella enterica
atgaatgcaggagtttttaccaatcccgatctattggaatattggaatgtttttagaggtggcaataaaaaacaactaacattaacagaagtactttctatgggtatacatgttaaatgtttcgacgttattccaaaggcaattgattctattcactggacagatggactaggggaagtaacactaggtggtactttatatgtaccttttcccgacttaatcaccgattcattaccatcatttaccgaagaaaaacaaattaccaatacaaatattaatttcaagatcagtaatgtttccaatactacacgtattcttgcattgggcggggcgtttaaagatgcgaaagtaaatatctatcttgcgattcttaaccccgctacgggcgatgtactggactacgatctaatgtattcgggctttatcgattacatcgaagccgaagccgatccaatgaatgaaaagaatgaattaacagtacagttaaatagtgtatataaacaactagacctacagacccgtacactatgtgcaaatagtgtctatcaatcttattttccgggcgatcaaattatgtccctattgggcgtagttaatagtggtcaaacatggaagtacaaataa

SEQ ID NO: 388023 - DNA, 396 bp, Salmonella enterica
atgaattttaaaaacagtaatgaactatatgaaatatgcgaaaactcacttaataaagaatatcgtttcggtagcaatgattgcaatattctatgcctacgtgtacttgatctaaagcatggtacagattgggcagaagtagctaactacaattccgtaattgacggtgtacgacaattaaatgaattaggttttaaaagtacacaagaaattattaaacaatatgccgatgaaacaaaacacccaatcgatggtgatatttggctagatactgaaaaccccttactaatggcagtggtttttagtaatcgcttgattggcgtaaatgatgaacatacacaatttaaattaattcccctgaaggatcacgggaagtattacagaataaggaaataa

SEQ ID NO: 388024 - DNA, 3204 bp, Salmonella enterica
atgggtagtaaaggtggtggaattttcggagccattattacggcggtcgcagtattcgcagcagcgtatacgggcggtgcatcactctatgccgctgccgcatggggtgcagccgcaggtgcactaagttttgttgcatctagtgcattggcacaattgggtactacgggctatgacgacgcagcaacgagcgtaagccgcagtacaagtcccgtaacaggtctacccgttctattgggtggtgaattgccccacaagaacggcgtaagcaatggtagctttattatgtgcggtacggtcgtaccgtggtacaacgtcaaggattcagaatcacaatatcttttcaccgaacacgtagtagcattgggcggtactgaaaaatggatcgaacagatttatattgacgatgaacctgtactagtaaatccaattaaagccgatggacgcgtagcaaccgaatctattgttgcaaaatatcaaaagtacttacaattggaagtacgttttgggggatcatatagtaatagtaaatccctaccaatggaatatgccggatctcgctggaataataattttcgtggcgatggcgtagttagtattagttgcgttatcaagaaaacccaagattcattggaagacagtattttagtcaatgacaactatattatgaaagttgaaatgaaaggactaatgattactgaccttaccgatatgacccgtaaagcgtccagtaatcccccgtcacagatctatgaactattgacaaatacactttggggaatgggcttagaccctgcattaattgatctagatagtttccgtactacggcacagtattgtaaggatatggaattttatagcaatggcaacatgtcctataacgatacctataaacaaactatcgaagccattctacagacgtttagcggattgctttatatcaatgcaggtaaaatttgttgtggtgcggatcgtaaatcactttcagtacatacattcgacgaaaccaatattacgggatcattgaaagtaacaaccagtggtaacacggactatgccaatacaatcgatgcaaaatatactgccgtaggtaataactacggaaatgatgtagtacgttttccaagtgacattagcaatgacgatgtaattagaagcgacggtagagtaattacacaggcactagattttacatggatctatgaccaatcgcagttagcatttttggcaaaccgtgaattacttaaaatgaagtacgcacaaaataccattacctttactactcccgatgcatgggatctacaggtatgggattgcgtagatattaatgttaaagaatttgatattagcggaaagtaccgaatagtaagtaaagaaattagcacagcacaagatacattaggttttatcaatctagtatgcgtccagaccaatgacggcatttatgacggcaaagatcccggtatttggacaccagacggatctattagtagcgtgattggtgtactaccgccaagcaatctagaagtagttcgccgtgggaacgttgtaagcgggaacattgtagatctaacgtggacagctagccccgatggtaatttacgtggctattacatctactaccgcaaatctggtaacaatgcgtggacgtttgcaggaactacgaccaagtacgaaataagctacgctctatatagtctacagtctgaccagaaatacgactttgcagtagcggcctataacaacttaggattcgtaagtagtaaagtaacggtagatggtttaattccacaatatgattttgcattacctgccgtaacgggtatcaaactttcgaatagtacagaatcggcctatgtaaccgatgcaccagattttaacatcgcatgggacgatcaaagcaatctagttattaatgggcgtccatttagtgagtacttaaaatactatgagattcgtctatatgacggtgaagcatatattaaatctttctattcacctaccaatgcatttaatctaacacttgcactaaacgaaacaaagattcgtaaaccaacgttaggtgtaattgcacagggatatagtacaggtacatactcaccagaagttaaaattaccgtagaaaataagcaatgtaaattagccactggctttactattgcaggtggattcgggaacttattctgtagttggaaacaatcggacgaacgcgactatgcaggtgcagttattcaattaacaagtggtttagtaaatactcagtacatttccaataaaccagaattcgatagtattccaaatattcccgacggtgaatataaagttaagatgggctttttcgatgtatttggcatggataacatacaatatactgccgaacaaacaattagtatcaatagtaagtatcaatttaccgaagaagatgcagccgatattaacgatattcttgatttaaataatcgtctagatgatattctttcgaatgcagttaatgaaagtaatgaatataccaatacaaagattgcggtactacaaaatactatcgacaatgacgtaacggcaaagatcaccgaactaaatcaaaccatcgtcaagaacgaagaagccacagcacagcaaattacacaaatcaaatcgaccgtagacgggaaccaagccagcgtaaaccaacaactaattacaaaggcagataaaggtacagtagacgcacaatacagcctttcagtgcaggctaacggtactgtagcgggtattcgtctagtagcgtccgaaggtgcaagtaataacagtgcaatctattttgccgccgataaatttgttatcagtggatcggataccgcgactgtaggaggacaagcaccatttgcattaatcaatggtactacttatctaaaaacggcaatgatccagcaaggtagtataggtacagcttatatttccgatctaagtgttactaactctaagattgcaaatgccagtattaacagtgccaagattatagatggcgaaattacaaacgcgaaaatcgggaacgaaatttatagtaataactatgtatggcaacaatcaggatggtatataggcaaaaacggcgaaatgtacattaacggtagtggcggtactggacgtatgacaatcaataataacttgattcagatattcgaccagaacggaacactacgcgtaagaatgggcttatggtaa

SEQ ID NO: 388025 - DNA, 297 bp, Salmonella enterica
atggcaagtggtttacagtgctggaatgctagcggtgtattggtcgcagatctcacagattataatatgcgttatgtagggactactacattaggaattggtacaggaactactacatcatggaatgttgggtggggcggtatgcgtcccactggatggttagcaatcgtccgacaaacttataattcaaatgatttttattgtattccctataatgattcatttgtcgtgcaatatttgccagtcagtggagtctatgcacaaacattaataattgatatatacactttcgaataa

SEQ ID NO: 388026 - DNA, 657 bp, Salmonella enterica
atggccgcaggctttcaggcatttaatgcacgtggtgcattaacaattgatagtaccaataaatctattgttactagtcaggtattaggaatgcagcgtttaattgacgttggatattatattttcggtaataacagtatcggcaacggtcaaacattgggttttactggtcttaatcaatggcctactaaagaaggtattcgctggtgccaacttctagtagatggtacttactgttttccaggagcagaattatacgaacaagaccgagcaagatttatgatttccagtaatacaacgccgctacagtcgggatatttggacgtattcaatgcaagcggtcaattggtatggagtgccgcaagtgccggtactatgccccgtatacaagatttctttaatgtgcctgccggacacgatctaggaaccgcaattacattaaatactagctttcctaatccgtggttttgcgtttctcagtgtcccggcaatatttcggacgatggaacggtagcgggatattcaggaatattgattaggcgaaacaatgcacaatcttttaccctgcaatatataaaccgaaaccaaaaaaactatactcaagcaatggggaataatggtatcagaattgccctagcaagtgtaacgggttactaa

SEQ ID NO: 388027 - DNA, 264 bp, Salmonella enterica
atggaatggttagcaattggagcacttgccgccaccgtaattgggctaattggtaagtttaccaattggactttttcgggcgtcaaacgctacgaacataggatcggtatgattgaatccaaattaaaattattggaacaacggacggagactatcgaagacgatattttagaacttaagttagtagttaaggaaattagcgatattaaggtagagctagcacaaattaaaactatcttagaggttttagaaaggaagatttaa

SEQ ID NO: 388028 - DNA, 453 bp, Salmonella enterica
atggacttaatcacacaattaaaaatattcgaaggtactaaagagtatcaaaagtatatcggttattaccgaaatggacgctttcaagtttataaagatcatttgggttatccaacaattggatacggacacctaattaaaaagggtgaatcatttcccaatggactaacggacgaagaagccgaagcattgctaattaaagatattgcaattgcggaaaatgattaccgtactttaaatcttaatctaccttccgttagtcgatggcatgactttatgatcatgatgttgtttcaagtgggactaactaaaacgcgtggctttaaaaaagctttacaggcgttacgtgatgggcgttataacgacgccattgcagaatttaaaaatagtaactggtacagacagacacccaatagagtgaatgaaatgattagttacgtaactaagggctaa

SEQ ID NO: 388029 - DNA, 432 bp, Salmonella enterica
atgtgggatatgtttttcaaggatgattgggatataagcgaagtaacagacggtaactatagtgcatttgtttatgtaattcagttcccagacgatggtagtttttatttcggttttaaacagatttttcgacgtatcaaagatgcaaagaaaataaagggaagtaccgtactaaatgagtccgattggaaaacatattccagtagctctaagacagtacaacaacgtatagacaatggcgaacaccatacaaaacatattctatggtgttttgccagtaataccgaagcgacgttagtagagactgcattgattgcgttatacggtacgcgttacgattgcttgaataaagcgattatggcaaagaccaaactacgtaaagacaagggattacaactggacgttatacgccgtattatggagtgtttttaa

SEQ ID NO: 388030 - DNA, 570 bp, Salmonella enterica
atggcaaaaaataatttaattcgtgtcaaaaacacacaagcagtacagaagtacttaaacaaagaagggaagaattttaataatgatttccgcaatgaaatgatcgtaaagatgcgagacattagcaaggaactacagacgggtatcaacaatgccgccgcaggtggtgtagtgccatttacgggcaatgcaatgttatatttcttcaataaacgtgtaacgggcgttacctgtactattcaggtaaaagacatacaagcccaatacctatacggatcattagtaaaacaagaaagtttagataagtttattcctaccagtaagaccaaactaacaaagcaaggtaacattacgggactaaaatctaatcttaagagtggtaaatataaggtagtcgaatcaaagggcgttaaacgtatcgtagatacacgcaaaaagaaagatcgcgtaattgcgaccaaagacactaagacacgtaaaataatttttgatttctataaggaagcagatagccgtatattgaaagtaattaataatatgcgtggagaatatagcataaggaaaaaataa

SEQ ID NO: 388031 - DNA, 336 bp, Salmonella enterica
atgcagacagcaattaaccaaatgagccaacattacgacacacaaacaccatacattctagtagataacgttacgcctattatgaatagtctaccgtttccacgtgcattgatgggtaataagaaacttaaaaagattctcaaagcacatccatataatgacaaagtagatagcattatgaatattgctttcgaacgtccacagctaggtgaagtaggtgaaattatcgaatggtcattacgtgatacttctattcacgtggttgtactttcgaatgaaaaggcattcgtaaaaggtacttatatttggttaatggtagtaggtatcatcgaataa

SEQ ID NO: 388032 - DNA, 297 bp, Salmonella enterica
atggtaagcatactttatgacttaataaaatctggtattaattttttcactaaaactaaaaccatagaacaggaagtaaaatccgaaaacgccgaagggcaaatagaagttaataagattgagatagaaaaaactacaattcactggcgtaatgtattgggactagtcctaacacttatcgtactatatagttatatcattattccattctttgattatttcgggattgtgttaataaatttaccactggaaccgattttcaagctactttttgtactattgggtacaccaatgtaa

SEQ ID NO: 388033 - DNA, 843 bp, Salmonella enterica
atgacctttcaagttattgcccttgacctcgacggcacgttacttaccccacagaaaacaatcctgtctgaatccatactagcccttcagaatgcccgtaaatctggtgcaaagatagtgatagtaaccggacgacatcatgtagcaatccatcccttttatcaggcattggatttagatacacctactatatgttgtaacggggcattgctttacgattacgtaggaaaacgggtgttggcctctgacaccctacatccagaacaagctacgcaattagtatcacttttggatgcacacaatgttcatggcttgatgtatgcagacgatgtaatgttttacagtcaagtaactggacacattacccgtactgaaacgtgggctagatctttacctgaacatcaacgcccggtattcaaacacgttaattctttaggggcggctgtccatgacgtggataatatatggaagtttgccctaactggtagtgatattgataaattaaaaaactttgctcaaatagttaaaagtgagatcggtcttacctgcgaatggtcatggcatgatcaagtagatatagcccaaataggtaacagtaaaggtaaacgccttacacaatgggttgagtctatgggtttatcaatgaaggatgttatcgcttttggtgataacttaaatgatgtgagtatgctacaaagtgcgggcttaggtgtagctatgggtaacgccgtcgatgaagtaaaagcctgtgccgatctggtaattggttctaatacggaacctagtattgctgaaatattaaatgctcattataacaatgaaacattgaagtttattccgtaa

SEQ ID NO: 388034 - DNA, 243 bp, Salmonella enterica
atgactgcacgcgtgattgccctcgatttagacggaacattattaaccccgcataaaaccttactcccctcctcgcttgaagcgctatcacgcgccaaagaggcgggctttcaacttatcattgtcactggtcgccatcacgttgctattcatcctttttatcaggcgctggcgctggaaacacctgctatttgctgcaacggcacctatttgtataggttgcactttatacaaaaaatctag

SEQ ID NO: 388035 - DNA, 1413 bp, Salmonella enterica
atgaataaactcaggactttatacgataaacttattgactcgcatacagttagaacccttgatgataaaggtaatgtcttgttgtatatcgaccgtaccattcttaatgaatacacaagcccgcaggcctttactggtctacgtgaagcaggacgtcctgtgtggagcagcaagaaggttctttttaatattgatcatgtgaatcctaccagacctgaacgcactgctgatatgacggatgcaggtggtgcattacaggtcagctattttcgaaaaaatagccatgattttgatattgaactatttgatgtgttggattctcgacaaggaattgaacatgtcgtaagtcatgagcaagggtgggtattacctggaatggttattggtgctggtgatagccatacgacaacatatggtgcattaggtgcttttggttttggtataggtacttctgaaattgagcatttattagcgacacaaacattggtttataaaaaactgaaaactatgttagttacaatctcgggtgaactacctcgaggagttgtcgccaaagatatcgttattgcgttgattgctaaaattggtgccaatggtgctacaggatatgttattgagttttgtggatgtgcaatcgattcacttagcgttgaaggtcggatgactctttgtaatatggccgttgaagctggtgctagaggtgcatttattgctccagatgaaaaggtatttgcatacttaaaggaaacaccaagagcacctaaagggggcgactgggatgttgcggtttcggtatggcgacagctaaaatcagatgacggagcaatttttgaccgtcatgtggaattatcatgtgataatttagaaccgatgattacttggggaattagccccgatcaggccactacaattaatggtattattccactgccagagacacttcctgcgtttattaagtctgatgaatattacaaggcactaaattatatgggactggagccaggtatgtgcttgcaggatatccacataactcatgcattcatcggttcatgtactaattcccgaatagaagatcttcgtgaggcggcggcagtattgcgtggtagaaaaatcgctccgactgttcgtggtattatcgtacctggttctacacaggtcagaaaacaagcggaagaggaaggtttagcatcaattttcatggatgcaggttttgaatggcgtcaatccggttgttccatgtgcctggcgatgaatgaagatgtactttctgcgggtgatcgctgcgcatccagtaccaaccggaattttgctggtcgacagggcgcgggttctcgtactcatttaatgagtccagcaatggttgttgctgctgctattgcagggcacttagtggatgtacgtaattatttatag

SEQ ID NO: 388036 - DNA, 927 bp, Salmonella enterica
atgagcgttgtcagaataggaaaggagtggccattaattgaggatttacatgtattcctcactatcatctatgcaaaaagctttagcaaagcagcacaggaaatgggagtatccccagcctatattagtaagcgaattaagatccttgaggaaaaacttggcataaaactattccatcgagacactcgacacttaacattaaccgaagatgggaaaaacatcgccagaaaagcgactcaagtactagacgatatggattgcctgcttactgaagctaaaattccccagaaaaaaatatctggcagtattaatatatgtgctagttttggatttggtataagccatgtctcaaaagtcatttctcaactatcaagggtatatccacaacttgacattaaactgcatttaacagatgaggatgttgatttagcaaataatggatttcacctggaagttaaagtgggtaacgttataaaggggaaaaatatagcacgaaaattagctaataattaccgaatattatgtgcttcacctgcatatttacaaaaacatggaataccaacaaaactagaggatcttgaaaaccataattgtctttttatacaagagaaaaacgcatatttcggtttatggaatcttgaaagacaaggtgtcacatatccggtacgcatcaaaagccacctttcgacaaactgtggcactgtggctatgcaatggagcctggatgcgcaaggcatcatgttacgttcctggtgggatgtttattcgcatatcaaggatggctcactcattaatgtactaccagattacaaacaaagcgcgaacatttgggctgtctatcccgaaagaatttcggagtctgaaaaaatgaataaatgcattgaatttttgtcagagtattttagcaagcttcctgagcaggggtaa

SEQ ID NO: 388037 - DNA, 501 bp, Salmonella enterica
gtggattgcgatcgagcgtcagcaactccagtcctgccggcaacagcggcaggctggtcagttggttacgtgctaccaacagcatctgtagtcctgccggcaacggcggcaggctggtcagttgattacctgctaccgacagcatctgtagtcctgccggcaacggcggcaggctggtcagttggttacctgctaccaacagcatctgtagtcctgccggcaacggcggcaggctggtcagttggttacctgctaccaacagcatctgtagtcctgccggcaacggcggcaggctggtcagttggttacctgctaccaacagcatctgtagtcctgccggcaacggcggcaggctggtcagttggttacctgctaccaacagcacctgtagtcctgccggcaacggcggcaggctggtcagttggttacctgataccgtcagcaactccagtcctgccggcaatggcggcaggctggtcagttggttatcttcgacagtaa

SEQ ID NO: 388038 - DNA, 519 bp, Salmonella enterica
atggcaagaagcagaagtacgaaagcacagaacgccagaccagtagattttaaatctgcaatttatatcggtgaggacgtaatgccagcattccccgaaggatctagtattgaaattattctacccaatggaaataaagaatcatatgcatatccatatgatccagttagtaccgctacatgggtagaaggtatggcaaccgtaattatcaaagacggtaatcaatcggtagaacatttccagatcgttgaccctacgaacattgcaaataactataaccagttaatgggaattctcaaagacattgacgccgtaatagaatcacgtctaactggtggtggcattctacaaactactataaataacaaaacattgattagtgaatctctaagctcactctatgccattcgtgcggcatacgtaaaaagaatcaatgcagaattagccaagattaataagaccaatcccaataatccgattaagtctattagtcgtttcaatagaggatataaattttaa

SEQ ID NO: 388039 - DNA, 1710 bp, Salmonella enterica
atggcaaataatcccgccaatatgctacatgcatcaattacgggacaaatgctaaagaaatttaaaacaggtaatttcgaacaaggaattaaagcaagtcctacactacaggaactagtaacaaagaaaaccgataagactagtacaaacgaccagtatcaaacagaatgccgcgacgggacgatgatctactatgcgtcattgggtgcaccttcacagctacgtagtgtaacggcaaagtacttattcttagatgaaatatcaggagccacagaaaccgacgagggcgacccgattgcattggtagaacaacgtgcaactacatttgccgacagtctaataatgatgagtagtacgcccgtcacgcccgacgatcccgtaatggttgaatttaataaaagtgatcaacgtcatttctatgtaccgtgtccccattgtggcgagtaccacaccctagaatggaagaatgtaaaattcgattgggtaattgtcgataacggacgacgcaagcgagccgaccccgaaacggcaaagttacattgtccacactgcaaccacgcaataacagacgtagaacgaaaccgagccgtaacaaagggatattggaaagcagaccgaccagaaattacggacgtggtaggatttcagattagccgcctttattcaccactaactacgattaagaaaatagtacaagactttgccgacgcacattataactttgacctacgatcattctataaccttagtctaggactaccatatgaagatgaacacaataaacaaattgatctaacactattagaaaaccaacgcgactattcaatcaatattaaaaaaataccggacgattgtttagggttatttgtgggaattgaccaacaattagatagattggaatgtactacaatcggtattacggacaatgagaaaaagatatatgtactagatcatagaaccttttcggcaatcgatacgacgaaagtagaatcacctgcatataaagagttagtacaattccttaagtacccattcaagacaatgaacggcaaacccctacgccgctttgctgcatttatcgatagtggtaacggtaacgcaacttctacggtatatcgcgtatgcggtcaatatcgacagaatggcgagaagatattaacggcagttaaaggtagtggacaaccacacaccgaactattccgcaaatctaaaacagcaggtaaagaatttattctactaaacgtcaatgaaggtaaaaactatatagccaaattgatttcacaatctgttagtgccgagcatgaaaactttgccaataacatttatttcagtggcgatctaccggacgattattttattcagttaactagtgaacgtagagtattcaggggcggtaattacgtatgggaaaaaagaaccaaatcaaataatgaccgtaacgaaatgttagatacattgaactacgcattaattagcgtcaagtgggtactaagtcgattgggtgcacatccatttaaggaactacgaatatataacgccaatcaattacgtaaagtacaatctgaattcgacaacgatatagattttagtaacatcgataccgaagatacacaaccacaaccaataaatactaaagcaactacacaaccaataaataaaagaaggcgtactagttttattgctggtggacgtagttataaatttaaataa

SEQ ID NO: 388040 - DNA, 543 bp, Salmonella enterica
atgaatacattaagtcttaaaacaatccaagaccgctacggctatgaactatcgcagattagccgctggcaagacgagggattagatcttacatggcctgagaatcagatcaataactggattgtaacaaataaaattaatcccatgagaaaaggcgaccccgcattaaaggccgaaaagatgcaggaagaaatacgcctaacacgtgcaagagccgaccaacaagaaatagacacaatgaaagctagtggcgaaatggtactagtaaatgacgttgccggcgaactagcaaaatattgcttacagcttaaaacagcaattagaaatattcccctgaatgtatatttgcaacttgccgaaattgccgatgatccgttagcaatgaaaaacttattaagtacaaaaatcgatgaggtactattagaattaggaacgatgaaatatgaagaaggatttacacctacacctacagaacaaactacagaagatactacgagcaggaaacgaagcactaaagccaccaagaaaaataaagccgagtaa

SEQ ID NO: 388041 - DNA, 378 bp, Salmonella enterica
atgcaaacatatattcatttcagcaatggaactactacaattgacacggacggcaacaaatcaggatatgaatatacccgccacgatctaaataacatattagatattcatctagtattgggtagtccctattacgtacacgtacacataggtaatgactatctaatactacgacataaatacattacatttaactatcacaataattcagtacagatcggtaataaaacctacgcaatggaacgataccgaggaacggaacaaacacacatccagcaattgcaatcactcgccattgaaatgaccgacaacgggacgatatacgggcaacgtttaccctatgacatatgcataataatgcataacaattcattttaa

SEQ ID NO: 388042 - DNA, 729 bp, Salmonella enterica
atggcaagagtaactaaaaaagaatcggcaaatcataataaggtaatggatctaattcattccgaccgtgaactaacattcgatgataaagaattcatattcaaaaattatagaggcgatggcattggtgcaacgggtgcattttttacgcccgatgggttagcgtgtgattttgtattagatgctggctgtactggacaatgcatagaactatgtgcaggtatcggtattctaagctactatcagtaccgccgaaataaacccaaacatattacttgcatagaaataaatcccgaatacgttcaaatcggtaaacgtatcctaccacaagccgaatggatcacaggagacgccctagaatacactcctacgcgtttttatgatgtagcctatggaaacccaccatttggtaatataaagacgtcacagagcgttacaggccgttatagaggatctgaattcgaatacaagatcatcgacagggcaaaagactatgcatcatacggggcgtggatagtcccacagtcaagtgcaggctttaagtattcaggtcataccttctatgaccgttcgatacagtctactaagtacggacgatttgaaagggaaacggggcttgtactacacggaggtgtaggaatagacacgagcatatacaaggatcaatggaacggtacgaccattatatgtgaatccgtgatagtggattatgacggtactaatttatag

SEQ ID NO: 388043 - DNA, 330 bp, Salmonella enterica
atgaaaaaaatattactcgcactattattaatatcgtcctatagctatgccgatcgctatgataactgcaatgcacaggtgtatagagacggtaaacccgtagataaagaatttcaggtagatgtactggactataaaaaccgttttgaattaagacagggaagtacttttatcggtgcatcgccagtacttgaatctaccaatagatataacggcaatatgaaacgcatcaccaatgaggccgaatggcgtatagatgataacggtactaaaacctattccatcgaatactacgccactaaatcaacattaaaagtaacctgcaaataa

SEQ ID NO: 388044 - DNA, 363 bp, Salmonella enterica
atgaaaaagatcattgcaatgggtattgctgtactaattactggctgtagcaataatcattacgcattcatggacgatgcagtagtaggagatataaacgggcgtaccctagttatgttcccgattggtaatgatcagtaccgtccacagttcgctagtgattgtccacccgtactattgggtgaagatcgtcctagcactggtggctgtatcatcgacggataccgcctagctaatgttcactcattcaatgaacacaaagcccacggtagccacacgaacgccaccacagcaccacaacgccccaatatgattgggttagatgtgccagcgtctactatttcaattcccgataacatctaa

SEQ ID NO: 388045 - DNA, 693 bp, Salmonella enterica
atgaaaaccattactactaagtttatcgctactgtactgaatgatgactatacccccgcaatgttacaggcggacggcgaccgccgtaatgagctggcgaacatggacacgaacgaactacagacgctgatagatcgccttgcagacgtcattccaatggtcaacgagatacgcggccagaagcgacaagaagcaatgaaactcttagaaggtgtggtagggacgggatcttttgcaagcgtacaggagctactacaggccgttacaggcggtactactagtgctaccgaagaaccacggacaaaggcaaagaccaaacaaaagactacgaccaataacaaccgagtctacagggtggagatctacgataatgcagcagacgaacgccgtacatataccatcgtgaataatgtactaccgccgacactacagaaagatccggcatacatggcattggtcgcaaagaatccagaacttgccgacccgacagaattacttatggcatacagtaccgaatatcgtgatacacatccgatcaatgctaaatatgaaaaggtagaatttcatatcaatgaacgcggtcgcctgaatgcaaaggcaatgaaattttacgaacaatataaaaagaaaaacccaaacgcaactacgagcgaatttaaaaccgtagtaatggataactataagaaggtgtaa

SEQ ID NO: 388046 - DNA, 255 bp, Salmonella enterica
  misc_feature (235)..(244): n is a, c, g, or t
atgttttctgatccagctatggaaaaagtacggcaagaagtaagggaactaaacgaaatagtaattactgttatacgttccctttctaccgaagatgtactaatactatttggtgatagtattattggagatactattaatctagtcaaatccattaaagaggaaaatctatataaactaatagaaactaatcaaacactactttcattaaattatgaggtactgaaaaacatgnnnnnnnnnnttacggggtag

SEQ ID NO: 388047 - DNA, 204 bp, Salmonella enterica
atgagactcaatataattgctggtggtctaattaccgaagtgtacgacgatcacgataaaaaggtaggtagcgtttcaatgagtaaacaggaacgccaccgcaataaaccatataccgatggtaagcaattctacgcatcatttaacgaggcattacttgcactactaacacgtaagaaggttaacatccataatgttttctga

SEQ ID NO: 388048 - DNA, 579 bp, Salmonella enterica
atgaaagcaatcgatgtagtttattctgttttagcacaatcgaatatttctaccatcgttagggaagtgatcgcgtcaccgcttcccgcctaccaacgccacgcactggtacagaatattgaacaatgtatcagtacatgcgagggggcgttagacgatggctatcaagtacaagacttgccccgcgtattgggtggtaaaggtacattgttagatgttttcaaaagctatgcacgtacattagaggaacaatataaaatgactttacaagaatatatccccctgcaaaatgccgtagatgccgcgacctatggttatgccgaacgccgtaacattactatcgaagaatcgatggtagatggaatgcacgtagttgtatttggcatgaaaggttatattcagcctttatttgtactctatgcatgtcaggacggatcatttagttggaaacaaaatatcagccttgcaccgagtgttaaggaagaattacccgcatattatcaaaactgcaaaatgcttagggtaatgattgagtacgtagccaaagaacatagctacgaaattaatgctaaaaaatga

SEQ ID NO: 388049 - DNA, 402 bp, Salmonella enterica
atgaagaagtacaaaagcttcactgctaactacgtaaaggatttaaatgaatcctcaatgggtttttatgccaacgtagaagtacagacccacgacaacggtactacggcacaaattagtacctatgcaatggataatccaaactacgcattctttgcatttgaatcgggtttacaggtatccgtagactataacaacgggatcatgaaaatcggtactaccgataatcatgtagaacgtgatttacgtactcacccttgctatgcaggtaaacaacgtaatgcacttattcgcgtatacattcgtttcatattgggacgcatcgccagccacgccgaacaagaagcattatccgatttcgtaattaatgaattggcaggtgatcatgatcattacatttaa

SEQ ID NO: 388050 - DNA, 312 bp, Salmonella enterica
atgaaacttaaagaagaagacgacaggatcacgcacaagatacgcaagtacgaaagcggcgaaaccatcaccgtatacccacaggtactaatatactacggacaggacgatctaaggatcgtctaccatatgtacagcaaagtgtttagccaggagtacatagaagaaggccgaagccgccatttacctacattcgtaggtatgagtgaggccgaattgttccaacaatcggtactatatgacgtagaaaaaatcattactattcaacaagaaatgatttttatagaaaatagtagttgcaagccaatatag

SEQ ID NO: 388051 - DNA, 264 bp, Salmonella enterica
atgaaaaagaattggcacaaaggaaacataaccaataactaccgtaaatttggtgcagataagaatgggatgtactcaaagccagtacaaaccccattgaccgatacaccccccgtaggtgaggaactacaggaatgcatatgccagtacataagcacctaccgcaaagaacacgcccagacacccgcctatacgcatctaaaccgccgctatgggcttagagcaacaaaggcatactacagaggactagacaatgaaacttaa

SEQ ID NO: 388052 - DNA, 504 bp, Salmonella enterica
atgaataaccaacaactttacattatggcagtagaaggaagtaacacacttttaaaagtaggactacataatgatccagtagaacaacttttcgagtaccaaagcaatgcaaccagtacaataacattgatggtagtaagtgacagtatgacttttgataaagcatatggtttatatgaatccataatgaatactttaccaactataccgccagaattgggaactaaatttcataatcaacaaaaccaatcacttttagaactaacacaattagagaacatcatgacaatgatcggtaatgtatatgaaataatgaaacgcacaatagactattcaccaatccaacaaacttactacaataacaagattatacaaaaacaatgcaatacgccagtaagtgaaatagcaaatactatgcccgaatttaaatctacgggaaataaatctgccgatgatgtgatgatgaaaattcgtggtggtcgtactgaatcatttaaactatag

SEQ ID NO: 388053 - DNA, 462 bp, Salmonella enterica
gtgagtagaccccgtaagatttacgacaatagcgagttagtacagatcatgaaaggttattcgtacttgaaccaattgaccaacgaaggacagaagatcattagtgatgcaatagattcggtactttcaagtagtagaaacaaagtaagtaagaaagtaatattcaagatggtatgtaaaatagaaagtctctctaccagtgaagtagaatcattcttaaactttgaaaaacaatttaagggtgaaaagaagttggctaaatcatccatctacaattaccgcaatatagcccatcgtgcagccgtcgaactactggaagcatacaaccacggagtaatgattaagtacactctcaatggtgatgcacgtaacctaacgagcgacgaaacgaacaaactaaaacagatgctacatgacggtacgagcctaatgcgtatcaaggcatatattaatagcttatga

SEQ ID NO: 388054 - DNA, 255 bp, Salmonella enterica
atgggaaataaatataataaatcagacgtagttaaacacgcctcgcaaggggcggtttttttgcacgtaaaaaacataaaaatgaatgtcaaaggagtattcatgaaagacactaaagcaaaacaaataacagtacgcattaccaaaacacaagaagatactttacaaagaatggtagatagtggtgaacataaatctatcgccgccgccgtacagtaccttatcaataaagaagcagccttaaaaagcaattaa

SEQ ID NO: 388055 - DNA, 177 bp, Salmonella enterica
atggaatggctaattacaatacttgtacttttaatcggatttaccattatggtaactggattcattaagtacttgtttattttattcatgatttggcttatttgggacggttttttacggattttgataaataatcgtagaaagttgggacaaaatgcgattcatgagctattatag

SEQ ID NO: 388056 - DNA, 1875 bp, Salmonella enterica
atgataaaaaccttcatatatagccgtgtttctagccaagaacagttaagtgggggcgggttagaccgtcaagaaacggacgttcgcgagtacgtcacccgtaacggattagaccagtacgaaatagtggcaatggtagatcgcggcatatctggctatgacggtagtaatatgcgtgatggtgaattaggtaaatggtacaaagatgcgattacgggtatgtattggggtagtcatttagtattagaagcgattgaccgttttagccgccgtgatcctatgctggcaatggaagattttaccgtattagttaataagggcggtattaaagtacatatagtaaaatttaatacattcatcaatggcgataacttgcctatgttatctatgatgatgaatcttgcacatagtgaatctaaacagaaaagtgatcgtattagtaaaggttggcaacgtcgccgccggatggcattagataacggtactgctattaccgcacgtacaccatattggatcgatgtaagggataatgagtaccgtcttaataatagttctattgcagtagtagaagcgtttgcaatgtacaaacaaggtttatcatgtggattaattgcaaagaaactaaatgaattgaaacattactttccgtatatgtggactaaaaccgcagtacaacatattgtcgatggacttaatacatcgggtatcatcgatgcaccacgtgccattaaaactattaaggcattttataaatctggttttagtgtcgaagatattgcaaagaaaatgaatgcagaattccaattcatgaaggaatggaacgcacccgcagtacacaaactactacaaaataaatcggtaactggattagtagagattcagaaacgcaaacttattcaggagtttgatagcgacgggaagccactagaattacgtactaaaagcgaaggtgaaaagtactttgaatctatatatccacagatcattagtatcgatgatttcgaactaattcaaaaattattggaatcaaatcgtaaagtagataccaagaccggaaagggacaaacaacgggcggtactgttacgcaaaatgaagacggtgaattagttaagcaattcattctttcgtcattatgccgttgctataaatgtggtggtgcaatgttcaataacattgtgcggtcgaaacgtaagaacggcaaagtagatacctattcgtatttgcgttgcctcaatgaacgcgatgcacactgcgacgttaaagcattaaactaccccgtaatcgaaagggcgattatagaacacgtcaagggattgaattttgataccatgttcaagggtactaataacagtgaactagaattactcaaaacacgagaagtagaactactacgcgatatagccacgtatgaagacgctatagccgctaggaaggccgcaggaaaaaatactagtcctgtactggttacatcattagtcgatgcacaagacgatttagaggcgttacagaagaagattagagccatatcgggcgttaccgtaaacgccgaggaactaacgagcctgaatgaatccgtattcgatgtagcagagtatgaattacgtaacatggtagaactagaactacagaagatcattaaacgcattacctttaattgtactgaaaagaatatctactttattaccattcagtacaatacaggtacagttctacagcatggacttaaagtagataagaagaaaggcgtaatagaaacttatgaacttcatgaagggaataagggttatgtaagtaatggagaagtaattacacctgcattaatagaagccgcagaaagtaaaaatattggaattttcgaaggtaaggttatgtaa

SEQ ID NO: 388057 - DNA, 210 bp, Salmonella enterica
atggcgttatttaatgcatggtgtgactcttcagacttttcagttggcaaccattttttgtacaccatcacggcaagggatgctgacttcaatctggaatatcgggcgctaaaaaatgtaactgaaaaaactttaaaacctgtgataaagcgtgaacttggcagcacaatgtcagacatgcaggacattgtcgctgagcaggacgggtaa

SEQ ID NO: 388058 - DNA, 762 bp, Salmonella enterica
atgaaaattcgttcaccaatatatttatgcgcagcaatatttttattgagcgcctgtgtacgctcccccattgacgccaaaaagaaggacacatccagaacggaaatgactatcagtaaaaatgctgccagtcagttaacagataaagatatcttcggtaacgagaccacgcttgccgtttcagaagaagatattcaggctgcgcttgatggtgagaaattcagcgtaccgctgaactctgccgtcattctggtccagtctggcaatcgcgcaccagagatggccatgcaacaggaaatgagccggtattaccggatatcaacattttcaggtatcccggacaggcaaaaagctatttcctgtaataaggtaaagaatgaggaaggggaagccgccaccagcgaaaacatgaattatatgcaggcgctacgctatattgcggcaaaagggcaacaaaaggcagtcatcgtatactgggacacactacagtcaggtaaatataacaccacaacaaaaaccctggtctggtcagattatcgaaacgaaaaattatccagtacagactcgctgcgttacctggtgcgtttcgccctggtagatgtggcaacaggagaatgggcgacctggtctccggtaaactatgaatacaatattcttcagcctcttactggaaaaacatcggcgacagaacagcaaatcgctcagttaaagcagaatacattcgctgccgtggttaaggacatggtaaaccgctatcagtaa

SEQ ID NO: 388059 - DNA, 480 bp, Salmonella enterica
atggcaaatcttgtttatctgacattaaacgggcagttacaggggctgatttcagcgggatgttcatcgctggcgtctatcgggaataaggcgcagcttgcgcatctggatcagattatggtgacagaactaaaccatggtctaagccgggcgcagaacgtcaatcatcaggaactggtgattcagaagccagtggataaatcttcaccgctgctgagcaaggcaattaatgagaatgaatgtttgacctgtgattttgagttttaccgcactaaccggtttgggattaacgaattgtattatcgggtaaaactgattaatgcaaggatagcgagtatacacagcagtgttcctcacacgattaccgacagcggcgggcagccggaagaatcggtgtcgttcacatacgaaagtattaactgggagcattgtattgctggcaccagcgcatacagtttgtggagcgagcggatattctga

SEQ ID NO: 388060 - DNA, 1347 bp, Salmonella enterica
atgagtacggatattcagacgattatcaccggccaggatccgcgcggtctgccggagttcagcgccatgcgcgaggagatcaacaaggccagccacccggcgcagccggagatgaactggacgctggtggaatcgctggcgctgactatttttaagtccaacggcgtggatttgcataccgccagctactacacgctggcgcgcacgcgcacacaggggctggccgggttctgcgaaggcgtggagctactggcggcgttgattggccgcgaatgggataagttctggccgcaggggggggccgcgcgcacggaaatgctggactggtttaacgcccggaccggcaatattctgcgccagcagctggctttttccgaagcggacctatcgctgctgtatcgcgtggaacgggcgctgcaggtgatttgcgacaaactccagcaggtggatcttaagcgcatccctcgggtggaaaatctgctctattttgtgcaaaacacgcgaaaacgctgcgagcctcagccgagagagaaaacggcaaatacggcggcgaaaaccacggttcgcacgctgatgtatatgccggagagcatggaaacggcagacgttcccgtcccgccgttgccggaactgccggaggtgagggtagtcgtcccccaggagggtgccgtagtttcgtcccggccccgggggagatcgggaaacaccctcagaggttttatcgccgggatactctgtagcgcggttgtcacggcagtcgtctggtggtggcaggtttatcctctgcaacagcaggtagcggcggcacgtgatacggcgcagggtgccgcatctgtctggctggcatcgcctcagttgagtgattacccgcaacggctacagcaactggccgatgcttcgtcgctgcagccgctggaaagtggtcagcgaatggtccgaatggcagacagtcgctggccggagagtctgcaacagcagcaggccaccacaaagtggaacgacaccctgaaaggtcgcgcggcgaacagcccgcagatgctgggctggcagcagacgcgggcagatttacgttcgtttgccgaactgctggttcagcgtgagcaggcgaaagaaggcttcacgctctcttatatcaaaaccgtggtttaccaggctgagcgctcgctgaatcaggacacgccgctggaatacctgctgacacagtaccagcaggcgcagtccgccggaaaaaataccggtatgctggaaaaacagatcaacgaacgactggacggggtgctgagtcgctggctgctgttgtcgcagagccagacgccggaaacgccgaacggtaaaccaggaaaataa

SEQ ID NO: 388061 - DNA, 3540 bp, Salmonella enterica
gtgttcagaataccgactccccgtattcccccgatgtttagcgggctggcatctatgctcagacctgcgatgccccggtttaaagtgtccgtggcctggctgttggtgctggcgtgggtgatattgctggtatggatctggtggaaaggcccggcgtggcggttctacgagacatactggctgaaaccgctggccaatcgctggctggcgacggctgtctgggtgttgttggcgcttatctggctgaccgtaagcgtggtgaaacgcctgcagcgggtggaaaaacagcagaagcagcagcgtcaggaagagctggatccgcttactgtggccgtcaacattcagcagcgttatctcgaccgctggttgctgcggctgcagcgccatctggacagtcgtcgctatctgtggcaactgccgtggtacctggtgaccggtccggcgggcagcggcaaaacaacatttttgcgcgaagggtttccggctgatgtgatttatacgccggatgccagcaggggagccgaccaaccggtctttatcacaccctatgtgggcaggcaggcggttatttttgataccgatggtgtactggcgaatccggatgatggcaacctattacaccgtcgcctgcgagagcactggctgggctggttgctgcaaaagcgcacgcgccagccgcttaatggcctgatcctgacgctggatctgcctgatttactgaccgccgacaaacgccgccatgagcatctggtacagtcgttgcgcggccagttacaggcgatccgccagacgctgcattccagtctgccggtctatatcgtactgaccaaactggatctgttggccggatttgccgcctggttccgtgccctggagcgcaacgagcgcgacagtattttgggagtgacgttcacccgcaatgcccatgaacgcgatgactggcgtcgcgagctggataccttctggcagtcctggggacagcagatgaacctggcgctggcagaccagatgctcagccagtccaccccggcggcacgtagcgcagcgttcagtttctcccgccagatgccgggcgcaggggaaagcatcgcccgcctgctggaggctttactggacggtgagcaccaggatatctgcctgcgtggcgtctatctgacctcttccctgcagcgaggtcagatggatgacatctttacccagtccgctgcccgccagtacggactggatcagagcgccatgatggcctggccgctggtcgataccacgccgtactttacccgcgagctgttcccgcaggtgctgctggccgagccgaacctggccggggaaaatcgcctgtggctggcccgctctcgtcaccggatgagtctctttgctggatgcggcgcggtggctgggctgctgctgatctggggctggcatcacgggtataacgaaaactaccgtgccgggcagaccgtgctggcgcaggccaagtcctttatggcggtgccgccgccgcagggcatggatgacagcggttatctgcaactgccgctgctgaacccggtgcgtgatgccacactggcctacggcgactggggcgacagaagctggctggcggatatggggctctatcaggggacgcgggtggggccttacgtggagcagacgtatcttaaattgctggagcagcgttacctcccggccctgctgaacgggctggtgaaacagatgaacagtgcgccgccggagtcggaagagaaactcgctgcattgcgtgtcatccgtatgctggaggacaagagcgggcgtaatgacgcggtggtgaagcagtttatggcaaaacgctggagcgaacagtttcacgggaagcgtgatgttcaggcgcaactgatgtctcatcttgattatgcgctggcgcacaccgactggcacgcacagcgtcagcagggggacgccgacgccatcagcctgtgggtgccttacgagaaaaccgttgtcgccgcgcagaaagagctaagcaggctaccggtttaccagcgggtataccagagcctgaaaacacgggcactgggtgtgttgcccgccgatctcagcctgcgcgatcagaccgggccgacgtttgagagaacatttatcgccaccgacgagaataagctgatcgttccacagtttctgacccgttacggcctgcagagctattttgtgaaacagcgtgaggaactggtgaagctgaccgccatggattcctgggtgctggccctgacgcataatgtgacctacagcgaggctgaccggacggaaattcagcgccagcttattgagcagtatatcagcgattacaccgcaacctggcgggcggggatggataacctgaatgtccggggctatgaaaatctggcggcgctgaccggtgcgctggagcagattatcagcggcgatcagccttttcagcgggtactgacggcgctgcgtgacaatacccgtccgccgctcctgtctgaaaagctgagcgacaaggaacgcgcccaggcgcaggctgagcctgactggcaactgctgaaccgtctggggcatgagtttgcgcccgaaaacagtaccctggaagagcagaaggacaaagccagcatcctgcaggcggtctatcagcaactgaccgaactgcaccgctatctgctggcaatacagaacgcgccggtgccgggaaaatcggccctgaaggcggtgcagctccggctggatcagaacagtagcgatccgattttcgccacccgccagatggcgaaaaccctgcccgcaccgcttaaccgctgggtgggtaagctggcggaacaggcgtggcacgtggtgatggtagaggcggtccattacatggaggtggactggcgcgacaatgtggtgaaaaccttcaacgatcagctggcggataaatatccgtttaacgcccggtcgaaagaagacgcctcgctggatgcgtttgaacgcttttttaaaccgggcggcgtgctggatacgttctaccagcagaacctgcagctgtttgtggaaaacagccaggggctgaacggggaagacagtgtggtgatccgtgaagatgtcctgaaccagctcgataccgcacagaagatccgcgacatcttcttcagcccgcagaacggactggggacacagtttgcggtggaaaccgtggcgctgtcgggcaacaagcggcgcagtgtgctgaacctcgacggacaactggtggattacgcccaggggcgtaactacacggcgcatctggtgtggccgaacaatatgcgcgaaggcaacgagagcaagctgacgctggtgggcgcggggggcaacacctcgccgcgtagtattgcctttagtggcccgtgggcgcagttccgcctgtttggcgcagggcagctcaccagcgtgcaggacggtacttttactgcccgcttcagcgtggatggcggcaccatgacttaccgtgtccataccgatacgcaggacaacccgtttgctggcgggctgttcaaccagttccggctgccggatacgttgtactga

SEQ ID NO: 388062 - DNA, 1413 bp, Salmonella enterica
atggatatacataacctggacgtctggctgtcacatctgctggaggcgctaccggaagaaaaactggccagtaaactcagcgatgaaaacccgcagtgggaatatatcgacggtgaaattgtcaagctgggttcgctgaaccacgcgcagcttgatgtcccggaactccagcggcaggggttacagcttctggtctcggagagtaaggactttcgcctggtgtcacacctgctgcgcaccctgcaacatgcaggcaacccgctacttgcgctcagcgtgctgacgcaatacgtcgcccattactgggccatcgcctggccgcagaatgccgccaataaaaagcgctttgccgaccagatcctgaaacgctttgaaccggggattgcggcttttgctgctgcgtcaatgccggagcagcgtgatgctctgctgggggaactggcaaagctggcccagtgctggcaggcgtgcgaaatgtcggaactggcgtcagccaccgatgacctgtttgctcagtaccagcgggcgtttcgtgacagttcacccgcagtgacttcgtccacgccccctacgggggacgtcacccgcgccagcgtcccgacagccgtgccggttcctgttgcaacagtacctgcacctgtggtgactatcgacagtcatgatgataaagcctggcgcgatacgctgctgaaagtcgcggccatcctgtgcgaacgtcagccttcatcgccgcagggataccgcctgcgccgtcacgccctgtggcagaatattacctctgccccgcaagcggagagcgacggtcgcacgccgctggcggcggtctctgccgatatggtcgctgactaccaggcacgtcttacccgtgcggatatgacgctctggcaacaggtggagcagagcctgctgctggcaccctactggcttgacggccatcacctttcggcgcaaatagcgcagcagctcggccacgacgatgtagcgcaggcggtgcttgatgagattcgtcgttttgtggcgcgtctgcctgcgcttgcttccctgctgtttaacgaccgttcgccgtttatcagcgatgccacccggcagtggctggccgatgaaccgcagaaacttgccgttgcgattgccacggatgatatgacgcagcaggtctggctgtgctggcaggagcaggggctggaggcggcgctggtgctggctgaacggttacccggtgatacgccgcgcgcgcagttttaccgccagtatctgacggcgcaactgcaggaagccgctggcatgacgcagcttgcacaatatcattaccggatgctgtttaagaccggactgcacacgatgttgtccgactgggaaccggcgttgctggaacagttggaaacgaaactcgcgacggaaacggcgagcgaataa

SEQ ID NO: 388063 - DNA, 666 bp, Salmonella enterica
atgaaccagttcctccgctggctgctgcccctgctattgataacgtccccggtctttgccggggatggacaggtgacgctggaggcgatgtcggcctgccgaaaagagcctgccgccctggagcggctggactgctatgaccgtattctggcaccgcaggctgactccggttttgccggggcactggtcaaggcgcgctatgacggcgaggcgcgcaaaagggcctttgaacaggaggcgcaacgcgcggataactccacggcgctactgcttacccgtaccgaaggcgagcacccgacggtggttatcaccacgcccgccatcggcagcctgccgccgcgcccggtgctgatgttcagttgtgtggacaatattacccggatgcaggtggcgctgagcgcttcccgacaggagcacgatatcccggtcacgctgaagacggagagcggggcgttccgctcgcgctggtttgtgcgcgagaacggttttctgctggaagccagccgggggttatccggcatagatgaaattaaacagctgttcggtgccagaacgttaaccctggagaccgggaacggtggcgccggacaactgatctttaacattgacggactggcgcagactctcgcgccgctgcgtgaagcctgccactgggcgggggaataa

SEQ ID NO: 388064 - DNA, 2643 bp, Salmonella enterica
atgattcagattgatatctccacgctggttaaacggctgaacccgttctcccgtcaggcgctggaaatggccgccacggcctgtatgagccagcaggccaccgaaatcaccgtcagccatgtgctgacccagatgctggccattccgcgctgcgacctgcgggtgattatggaaagagcagagatgagcgtggacgagctgggacaggcgctgacggtggagaattacgctaccatgcgccataccgacagctatccggtattctcgccgctgctggttgaatggctgcgcgacggctggttgttggcctcggcggaaatgcagtccagcgagctgcgcggcggtatcctgctgctggcactgctacattctgcgtcgcgctatgtgccgcccgccgccgcccggttgctgaccgggattaaccgcgaccggttacgccaggattttgccgactggacgcgggagtcggcggagtcggtcatgctgaatgcggataaatcggcctccacggcagtgcgttcagaagagagtctgcttgcccgctatgcaaaaaatatgaccgaagatgcccgtcagggaaggctcgatccggtgctgtgccgggacagtgaaatcgacctgatgatcgatattctctgtcgccgtcgcaagaacaacccggtggtggtgggagaggcgggggtgggcaaaagcgcgctgatcgaagggttggcgttgcgtattgtcgccggtcaggtgccggacaagctgaaaaataccgatatcatgacgctggatctgggggcgttgcaggcgggtgcttccgttaagggcgagtttgaaaagcgttttaaggggctgatggcggaagtggttcagtcgccggtccccgtcattctgtttatcgacgaagctcacacgctgattggcgcgggcaaccaacagggcgggctggatatctccaacctgctgaaaccggcgctggcgcgcggcgagctgaaaaccattgccgccaccacctggagcgaatacaaaaaatactttgaaaaagatgccgcgctgtcgcgccgcttccaactggtaaaagtacgcgaacccagtgctgccgaagccaccattattctgcgcgggctggcggcagtgtatgagcaggcgcacggcgtgctgattgatgatgacgcgctgcaggcggctgccacgttaagcgagcgctatctctccgggcgtcagctgccggataaagctatcgacgtactggataccgcctgcgcccgcgtggcaatcaatctgtcctcgccgccaaaacaaatctcagcgctgaccaccctgtgccagcagtgtgaggcggagctccgccagcttgaacgggaaatccgcatcggtctgcgcccggacggtggccggtgcgatgaggttcacgcacagtatgaaacggcgcaggcagagcttcaggcgctggatgccgcgtggcaccagcagcagacgctggtacaggagattattgccctgcgccagacattgctgacggaagcagaggcgcaggctgataccgtaccggaagagacaaccgcggttgcggaacgtctggcgtccctgagcgctgagctggataagctgcaccatacgcagttgctggtatcgccacatgtggacaaaaaacaaatagcggcggttattgccgaatggaccggcgtcccgctcaatcgcctgtcgcaaaatgaaatgtcggtcattaccgatctgccacagtggctgggcgagaccattaaaggccagggcctggcgattcagcatctgcataaacacctgctgacggcgcgcgctgatctgcgtcgtccagggcgtccgctcggcgcgtttctgctggccggtcccagtggtgtgggtaaaacagaaaccgtgctgcagctggcagagttgctctacggcggacgtcagtaccttaccaccatcaatatgtcagagttccaggagaaacacaccgtctcgcgcctgattggctcaccgccgggctatgtcggctatggcgagggcggcgtgctgaccgaagcgattcgccagaaaccctattccgtggtgctgcttgatgaggtggagaaagcgcaccctgatgtgctcaacctgttctatcaggccttcgacaaaggcgagatggctgacggcgaagggcgactgatcgactgtaaaaacatcgttttcttcctgacctccaacctcggttatcaggtgattgtcgaacatgcagataatccggaagtcatgcaggaggccctgtatccggtgctggcggacttctttaaaccggcgctgctggcgcgaatggaagtggtgccgtatctgccactgtcacgcgaaacgctgaccaccattattgccggaaaactcgaccgtctggataacgtgctgcgcaaccgcttcggcgcggaggtggtgattacaccggatgtgaccgatgaaattatgcagcgcgttacccgtgccgaaaacggggcgcgcatgctggagtcggttattgacggcgagatgctgccgccgctctcgttgctgctgttgcagaagatggcggcgaatacggctgtcgcccgtatcacgctggatgtgctggacggcgcatttaccgctgatgttgaggacgcggtgtccggagtggaagaggttgtatga

SEQ ID NO: 388065 - DNA, 747 bp, Salmonella enterica
atgagcgaattcgtgctgccgtctgaaccggactccggtcgccagtatcgcctggcgctgcgcggcaacagcctgaatccgatgatcgatgccgccacgccgctactggggatggtgatgcgcctgtcggggatgaacagcctgaatatgccagaacacctgtttgcgcaggtggtgaccgacgtgcaggcggtggagcaactgctgcaggagcagggctatgagccgggcgtgattgtgtcttttcgttacatcctctgcacctttattgatgaggcggcgctcggcaacggctggtcaaacaaaaacgagtggatcaggcagtcgctgctggtccatttccacaacgaggcttggggcggggaaaaggtgtttatcctgctggaacgcctgatgcgtgaaccaaaacgctaccaggatctgctggagtttttatacctctgcttttcactcggttttcgcgggcgctacaaagtggcgcagcagagtcaggacgagtttgaacagatataccgccgcctgcaccacgtgctgcgtccattgcgtggcgatgcgccgtttccgctactgcaccagaatcaggtcgcgcagggggggcgctatcggctgataaaacgcctgactgtcagacaccttctgctgggcggcattgtggtgctcgccctggtgtatctgttttatctgttgcgccttgacggccagacgcaggacattcttcatcagttaaaccggctgcttgccaggtaa

SEQ ID NO: 388066 - DNA, 1344 bp, Salmonella enterica
atggccacaatgaaaaaccgggtgctctggcaggaagggatgtttgcgctgccccagcactttcagcagcagcagcgccataacgacgcgatgctgcgcgagcggctggatgcgttgggtgattttgcctggggattcaccgagctgtcgctgaatactgaattgctggcgcagggcaaggtgatgatcgaccgggcggcgggctgtctgccggacggcaccgtgttccgcattcctgagcaggatctgctgccgctgccgtatcagccacgggaactcaccacaccggaaagccacgatatttatctggcgctgccggtcgccacccataacatcagcgaagtacagggcattcgcagcgcggggcagagttcggagcgctacagcgtggtgcacaccgatgtccgcgacgtacacagcaatgacggcgatatgcagtcgctgacgctgggccagctggggccgaaaatcgtcagtggcgcagaggatctcagcgcgatggtggtgctgccgctgtgccgtatccgcagttttcaggccggtggcgcgctggtgctggatgacgatttcatcccgacctgccagacgctgcgtgtcagcccggttctgaatcgctttgtgggtgatgttcaggggctgatcgccacccgagccgccgatctggcgaagcgtattggctcgccggagcagagcgggatcgcggacgtcgccgagtttatgatgctgcagatgctcaaccgctggcagatgcatttctcgcaccgggcgcgtctacataccctgcatccggaaaccttttatctggatctggtcagcctgctgggcgagctgatgacgttcaccgaaaacagccgtcttccctgcaccgttgagtcttatgaccatcgcgatttaacgcagtcctttaaaacggtgatcccggagctgcgtcgggcactcaatattgtcctgcaaccccgtgcgcagaacctgccgctgatctttaccgagggcatttacctggccacggtcaacgatccgggcctgttgcagtccggtgtctttgtgctggcggttcgcgcccgaatgccgcatgcccagctaatcctccagtttacccagcagtcgaaaatcgccgccaccgacaaaatccgcaatatggtcagcgtgcaggtgccgggcattcccctgcgcgcgttgcctgcagccccccgtcagttgccgtaccacgacggctatgtctactttgagctggagaaaggcagttccgcctggcaggatgtggtgaaggcaggcgcgctggcgatgcatatttccggaaccttcccggagctggatatgcagctgtgggcgataagaggataa

SEQ ID NO: 388067 - DNA, 519 bp, Salmonella enterica
atgagacgcgtttttgtcatgctgatgctggcgctcagcgtcagcggctgcacgatgaccaaaaagattggccaggtgattgccgatcccggtattcaggttggcgatctgaaacagcagtcttctgcggtgaccctcacgctgctgaccgagccggacagcaacctgaacagcgaaggcgagcctgccccggttgatgtgcaactggtgtacctgaccgatgactcaaaatttcaggcggcagattatgacctgctggcctccacgccactgccggaagcgctggggaaaaactatctcgatcaccaggatttcaccctgctgccggacacactcaaaacgctgcctgacgtgagtctggatgcaaaaacgcagttcattggcatcgtcgcctatttctccgacgaccaggccagcgaatggaagcaaatcgtgccggtggaaggaaccgggcatcactaccgcctgctggtgcacgtacgccagaacagtattgaaatgaagaccgaggacaaataa

SEQ ID NO: 388068 - DNA, 1278 bp, Salmonella enterica
atgactgaggaaaaaccacagtcctccacactgtcgctgacgcttcaggtaatgaacggcaatgaactggaaagcggccgcgccgcaaaatgcctgttttccggtgacggcggcgagataggccatgctgaagggtgccactggccggtacaggaccgggctggctcgattgccggacgtgcctgtgccgtggtgttgcatgatggtgctttttgcctgcgcagcctgatgccggggctgatgatcaacctggcgccagtggcgaccgacgccgggctggtgcgcctgcgtcagggggatgaaatcagtctgggcgcgctggcattaaaagtctttctgcacgaaggcaaacgcatcagctatgacgagcagatggcgacgccggaaagcattgtgatgcagcgtgacggtctggtggaggcgctgatttccaccgaaggccagccggaatatccggggctgcagcagcgtcaccagttgacgtccacggtggtcaacagtttttcctccgaccctttacaggtgttagagagtgaaagcctgaccgccgcaccggcggcttatgggcagcggaccgtgccgttgtcggatctgcaggccaacggcgggctggacacctcttttatggatctgcccccggtgtatgcggacccgcgtgatgaagatgagttttcctcggcgcaaacagcgcagaaacatctggcggtaacgccgctgctgcgcgggttgggcagttcgctcagcgtgcacaattcgcaggacgccgacgccttcctggaagagagcggacgcgccctgcaggccgcgattcagggactgctcgatttacagcacagccagaacagtctgtcggacaaacacctgcgcccgctggaagataacccgctgcgcctgaatctcgactacgccacggcgctggaagtgatgttcgccgaaggcaaaagtccggtgcatctggcggcacctgccgccattcgtgagagcctgcgcaatgtccgccaccacgaagaggccaaccgggcggcgattgccgaagcgctgcgggtgatgctggaggccttctcgccgcagagcctgctgcgccgctttgtacagtatcgtcgcagccacgagttgcgccgggagctggacgatgccggggcatgggaaatgtaccgccattattacgccgaactggcttcggacagacagcagggattcgccatgttgtttaacgaagtctatgcccaggtgtatgaccgggtattgcgtgagaagcagcgggaaccggaagcatga

SEQ ID NO: 388069 - DNA, 1035 bp, Salmonella enterica
atggcagaacaatggccagcacgctctgatgtagatatcccggcggatgtgcgggatatcagtttttatgtcctgctggaatcgctctatcgccgctatggcgaaccggggtgcgaaccgtctctgcgtactgagccggaagatgaggtgatactgtttaaatctgatgccagtatcgcttttccggggagcgatctgacgtcgctcacgcgtagagataacgggcagttcacactgatctcaacatttctcggtttttccggcagccagtcgccgcttccgggttattaccttgatcggatggcgcgggaatctgcgcagaatgaagaagggctgaaagattttcttgatgtgttcagccaccgctggacgcagtttgtctaccacgcctggcgtaagtaccgctactacatctgttttcgcaatggcgggacggatgtgttttcgcagcgtatgtattcccttgtcgggctgggcaaccgcggcgcacgcgacaggctcgccatcaaccacagcaaaatgctggcctatgccggaatactggcgacgccggggcgttcgccggatgtggtatgcaatctggtttcccactgctttgatttgccggatgtcacgattgagagctggcaactgcgcaaagtggtgatcgcgccgtcagagcagaaccgggtggggatacgtaatccgaagatacgcactgatggatatgtcgccggacgttctgtgctgggtgtcaattttacacttggcgcgcgggtgccggatcgcagcggtaaattcctgctgcggattaacggcctggatatggcgcgttacctgtcgtttttacctgatggggatgatcatcaggcgctgaaaatgtttatttcgtttctgttgcgtgaccagcttgcctgggatctgcaattgggtctggcaccggagcaggccagaaggatgcggctgggggataaatcctgttcccgtctgggacggacctgttttattggccagccggtggcttcgccttccgtcaccctccacatcagggattaa

SEQ ID NO: 388070 - DNA, 1836 bp, Salmonella enterica
atggcttttgaagaacgttactaccaggaagagctggattacgtgcgtcagctcgggaaactgctggcgaaggataaaccgtatctggctcgtttcctggccgaaaaggaaggcgatccggatgtggagcgtctgctggaagctttcgcttttctgtcaggggggctgcggcaaaaactggaagatgagtttccggagtttacgcacggcatcatccgcatgttgtggcccaactatctgcgcccggtcccgtccatgacggtcattaaatacaaacctgaagataatataaaagcgccggtacaggttttacgtgaggagcaggtcagctcaggcgtggtccgggtgtccacatcggggcgaaaaatcctgagtaacgatgacattttatcctcctctgcctgccgttttacgctggcccgcgatacgtggctgcagcctttgcagatccaggatgtacgtaatgtcagtagccttgaagaaggcatcattgatattgcgtttgtgactaaaaacggtgtctcctccgacgcgctggatttaaacaaaatcagcttctggctgggtaacgacgatgattacacccgctaccagctttatttgtggttcagcgaacgtctgatggatgctgaactgattgtgggcgatcgtcgcattgcgttaccggatttatggctggatgctgccgggtttgagcgtgaggatgctctgctgccgtggcctaaaaatgttcacaacggctatcgtgtacttcaggagtatttctgttaccaggaaagcttttttttctttcatctgcgtgatgccatatcgctgccggatgactttcacggcggtgcgtttacgctgcgtctgcgtttcaatcagccattaccggtgaatgtaaaattacgccaggattccctgcatctcttctgtattccggcggtcaatctgttcctgcatcaggcggagcctgtcagcccggatggtcgttccccccagtatccgttacgggccagccatcagcatccggatgcttacgatatttttcaggtgcagtctgtcgccagtaaagttgttgcctccggtgatgtccccggacaaacaaacgctgatccactgcgcctctggcccgagttcgagagctttaatcatcagattgagtacagccgccagcgtgaagtggtttactggcatcaccggacaaaaacctcgctattccatcgtggccttgaacacgacattgcctttgttcatgccgatggcaatctgcctgatccttcgcggctgagtggtgaagcgctcagcgtggcgctggtttgtaccaaccggatgttgcctgcggaactgcatacaggcgatatctgtgtcgccgtggggaaaaacccggccgtagccagcttcagcaacgtcacgcgtccgacgcggccattgtatccggtcacggacggcgatatgcactggtcgctgatttccagtatgaacctgaattatctctccctgctggaccgtgatgcgctggtgcagatcctgcggactttcgatttgcccggcatccatcatccacaacaggcccgtttgtcgagacaaaagctggacgccattgagaagatggaaactcggcccattgactggctgtttaaaggcgtacctgtcagagggctgtccaccacgctgtggatcaaccctgagccgtttgtctgtgagggggagatttacctgttgggaaacgtgcttacgcactttttcgcactctatgccagcatcaattcatttcaccatctgaaaattgttaacacggaaagccgggagacatgggtatggcagaacaatggccagcacgctctgatgtag

SEQ ID NO: 388071 - DNA, 426 bp, Salmonella enterica
atgacggaacgggataccggaatgcagggcagtttgtttgagcgggtggggaatgcggccgggtcgtcacaccgcttatcgtcgccagggcagttgttacagtccatcagacgcaacctggaaaacgttctgaatacccgttccggcagttgttatggttcgccagagctgggcattcccgatctgaatgatgatgcgctggtctcgagtgattttcgtcaggaaattggccaggggatccgtgactgcattctgcgttacgaaccccggcttgttgatgtgacggtgggcgccgatatgccggatactgctgccccgcaggaattacgttttcatatcgtcgcgcaggtgagctttcacgatgccagaaaactgctggagtttgagatcctgctggacaaccgtcagcgctaccgggtggagtaa

SEQ ID NO: 388072 - DNA, 1476 bp, Salmonella enterica
atgtctttacaggaagaagttgctcccgttagtgctgcgccagaagcaggaacgtcattactggacaatattatggcgcagagccgttttcagcctgagtctgaaagctatggtattgcccgccagggcgtgaccgcatttatctcggccctgctgcagaatgaagcggagtcagtcgacattctggcggttaacgccatgattgcggatattgacgatcgtataagtcgtcagatggatttgatccttcacgacccggtgattcaggagcttgaatcgctcctgcgctccctgaaactgctggttgagcgtactgatccgcgcgaaaacattaaaatttatctgctgcatgccaccaaagatgagttgctggataactttgagttcgccccggaaatcacccagtctggtttctataagcacgtttactccagcggctacggccagtttggtggtgagccggttgcagccgttattggtaattacgcgtttaaaaataatgcggcagatttgaaattactgaaatacgtcagtgcggtcagcgcaatggcgcatgcgccattcctgtcatccgttgcgccggagtttctcggtctggattcctggactgagctgccgggcatcaaagatgttagcgctatttttgaggggccggcctataccaaatggcgtgcattgcgcgaatctgaagattcccgctatctcggccttacctcaccacgtttcctgctacgtcagccgtatgcgccgggcgacaatccggtgaaaagcttttactaccgggaaaatgtcagccgcagtcacgatgactacctctggggtaacactgcattcctgctggcggcgaatatggcggagagcttcaggcaataccgctggtgcccgaacattatcggcccgcagaacggtggagcggttaaagacttgccggtccatctgtatgaagcgatggggcagttgcaggccaaaattccgaccgaagtgctgatcactgaccgccgcgagtttgaacttgcagaagagggcttcattactctgaccatgcgtaagggcagtgataacgcagccttcttctcggcaaactcggtacagaagcccaaggtgtttcccaacacgccggaaggcaaggaggcggagaccaattacaagctgggcacccagttaccttacctcttcatcatcagccgtctggcgcactatatcaaagttctgcaacgtgaacagattgggtcatggaaagagcgtggcgatctggagcgcgaactgaacacctggatccgccagtatgtagccgatcaggaaaatccgccagctgaagtgcgcagccgtaagccgctacgtcaggccagaattgaagtgctggatgtggaaggtgagccgggctggtatcaggtgtcgctctccgtgcgtccgcattttaaatatatgggggccagctttgagctgtctctcgttggccgtctggacagggattaa

SEQ ID NO: 388073 - DNA, 498 bp, Salmonella enterica
atgagtaataataaagacggaagtatagctcccaaggagcgcattaatattcgctacgttccgaaaatggacggccagacggctgaagttgaactcccgctgagcctgctggtcaccggggatttactgggaaggccggatgacaccccactggatgagcgtcagcctgttgcggttgaccgaaacaccttaaacgcagtactcgcccagtctggtattgaacggaacgtttccgtgccgtcggtgcttagtgaaaaggctgacgcgcgtatggatatcagcctgaaagtcaattcgatggcggacctgtcaccggataacatcgccagccaggtgcctgagctgaaaaaaatgctggagctgcgtgaggcgctggttgccctcaaagggccgatgggtaatatcccggcatttcgcgctcagctgcaggcacttctggataacgaggaaacccgcgaacagctgattcaggaactgggtctggccagccagaaataa

SEQ ID NO: 388074 - DNA, 1293 bp, Salmonella enterica
atgctcgatcccaatctgctgcgtaatgagccagacgcagtcgctgaaaaactggcacgccggggctttaagctggatgtagataagctgcgcgctcttgaagagcgtcgtaaagttttgcaggtcaacacggaaaacctgcaggcggagcgtaattctcgatcgaaatccatcggccaggcgaaagcgcgcggggaagatatcgagcctttacgcctggaagtgaataaactgggcgaagagctggatgcggcgaaagccgagctggataccttgctggcggagatccgcgatatcgcgctgaccatcccaaacctgcctgcggatgaagtgccggtaggtaaagatgaaaacgacaacgttgaagtcagccgctggggtaccccgcgtgagtttgattttgaaatccgcgatcacgtcaccttaggggaaatgcactccggcctcgactttgccgccgcggttaagctgaccggctcccgttttgtggtgatgaaaggacagattgcgcgtatgcatcgcgcattgtcgcagttcatgttggatctgcatacggaacagcacggctatagcgaaaactacgtgccgtatctggttaaccacgacacgctgtatggcaccggtcaactgccgaaattcgcaggcgacttgttccatacccgtccgctggaagaagaagcagacagcagcaactatgctttgatcccgacggcggaggttccgctgaccaatctggtacgcgatgaaatcatcgacgaagatcagctgccgattaaaatgacggcgcatacgccttgtttccgttctgaagcaggttcttatggtcgtgatacccgtggcctgattcgtatgcatcagtttgacaaagtggaaatggtgcagatcgttcgcccggaagattctatggctgcgttggaagagatgaccggccacgcggaaaaagtgctccagctactgggactgccgtaccgtaaaatcattctgtgcactggcgatatgggcttcggcgcctgcaaaacctatgacctcgaagtctgggttccggcgcagaatacctaccgcgagatctcttcctgctctaacgtctgggacttccaggcgcgtcgtatgcaggcacgctgtcgcagcaagtccgacaaaaagacccgtctggtccataccctgaatggttctggtctggcggtaggtcgtaccctggtggccgtgatggaaaactatcagcaggctgatggccgcattgaagtgccggaagtattacgtccgtacatgaacggactggaatatatcggctaa

SEQ ID NO: 388075 - DNA, 306 bp, Salmonella enterica
gtgccggattttacccactgtgagttttattcatgcgttgaaggacgctcggttcgtttatgcggcgactggatggcgcaggccagatttattaacgggatgcctgtgaaaattcgggtgatgaaagactgcatcgtgatcacgccgcataatacccgtgaactgtggggctgtattgaaggtatgagcgtgacatatattaatcactggaaagttaagacatggttaaaagattttcccggcttactgaataataccggggatattccgttgataaaccggagcagactcgaaggcgggatttga

SEQ ID NO: 388076 - DNA, 372 bp, Salmonella enterica
atgagaaatacaatagataataggatgttagattcaattccattagtggaaagaaccattgaatcgtctggaaatgaactgcttattacatacaatataattggtgatttagacttcgatattacactcaggaaaacttatcaatcttatgaacaattagaaaattcaattttggtttttttatctgatgaaaaaaaacataatgaagatatattaaattgggatgatgatttttccattaagcagaaaaaatcaaaaaaagaactatttttaagatttgctactggtcagttattcttgcccgataatggagaaggatttgtttttgatggtgatataaatcacatgagatcgtggatggataaattataa

SEQ ID NO: 388077 - DNA, 765 bp, Salmonella enterica
gtggtgccggagacgtttattgaccgggaatatgcgtacagcggccaggggagccacgagccgctggcgcgggtggacagggcggcgccgggcgaagcggatgaggtgctgtattaccatacggacgtaaacggcgcgccggaggagatgacggacggcgggggcaatattgtctgggaagcgggctatcaggtatgggggaacctgacgcatgaaaaagaaacccggcccgtacagcagaacctgcgtttccaggggcaatatctggacagggaaacggggctgcattacaatttgtacagattttatgatccggatatcgggaagtttatatcgggcgaccctatttcgatccggggcgggataaatctttatcagtatgcgcctaatccgctgtcatggatagatccgttaggccttgctggatgtaatgcccaacaacggcgcaatatatctgatttacgaaatggtaaagatgtcacggttagaagtattgacgaagcaagagcattattagataaaatgccggatcttagacctcatgttgacaattttcctgcaaggtctggagagctttatattggcactaaattcagcgatgtatggaaacaaccagcgggaacatatcggggtgatttatataatgtgaaaaatccattatctaatgttgttcataattctaaaaatccattacacgataataatccgcactataatattatctttggtgatggtactaaagctgggataattatcgttccttag

SEQ ID NO: 388078 - DNA, 294 bp, Salmonella enterica
atgaaagataatgatttatattttaatgaaacaattattgatgtagttgaaatgatcagattagcggatgatttagatacaaatctaattgataagttatatatgtcacttgataaagtaatcattgattaccaaagtacatcacttatcccaaaattacttgcttatgatcttctggttcttcatgataatttagaaggtgctttaaaattttactctggtaaagataataaatatatttcagaagttaactccaaggttaatgaatatattgagaaaatatttttaagttaa

SEQ ID NO: 388079 - DNA, 333 bp, Salmonella enterica
atgaagatgattactttatctattgatttaaaagagataaatggtgttattgaatttcataataaatttaagcaactgtttggctttcctgatttttatggtaataattttcatgcgtttgttgattgccttactagtttgagaatcccggaagatgggatgacatctgtaaatataaaacaggatgaatatatattacttgaggttagtaatatcaatcatttatctgacgatcttagacacgattttctcttgtcaatacaagaagtaaataatagaagtattttgtttggtgagaaagcttctatattattattgctttgtaaatcttaa

SEQ ID NO: 388080 - DNA, 2826 bp, Salmonella enterica
atgacgatgcaccgggagccgggcggcgaacggtattactacacctgggcgtggtttgaaggcccggacgatgcggcgtggagggtgacgggccatcatacggacagcggcgagcagtaccgtctggactggaatctggcagaacgttcgctgtgcgtgacggatagtctggggcgtacgcgctgccactggtgggatgcgcagggcctggtgacggcgtaccgggacgaggccgggcagatgaccactttccgctggagcgatgaagagcggttactgctggggatgacggacgcgcagggcggcaaatggcgttatgtctatgaccgtctcggccacctgacggagacgcatgacccgctgggccgggttgagcagacgcagtggcatccggtgtggcaccagccggaaacggaggtggatgccgcgggggcggcgtggcgttatgagtatgatgagcggggcaacctgcaggcggtcagcgacccgctgcaccagcgcacggtatacgggtacgaccggcacggtcaggtggtgcggataaccgacgcgcggggcggagataaatacctgcagtggaacgaagacgggcagcttatgcgccacacggactgttctggctcgcagacggcatggttttatgatgaacgcacgcggctggaaagggtgacggacgcggagagtaacagtacgcgttacagctatgacggcaacggacatctgacggaggtcatgttcgcggacgggcgtacggagcgttaccagccggatgcggcgggacggctggtgaaatacaccagcccggcggggcagataacacgctggcagcgggacggccaagggcgggtgcgcaggcagacggatgcgacgggtcgcaggacggcgtatgagtacgacgcttacgggcggctgaccacgctcacgaacgagaacggggaaagctaccggttccggtacgatgttctggaccgggtgacggaacagacggaccccggcggcagccgccgggcatacgggtataacgcgctgaatgcggtgacggcggtgatatacggcggggagcgcgggggagaaatccgtcacggtctggagcgtgatgcggcggggaggctgacggcgaaaatcacgccggagacgcgcacggaataccggtacgacgcggcggaccgtctgctggaaatccgccgcaggcggcatgatgcggcggaaggcggagagccggaagttatccggttcagctacgacagtgcgggtaacctgctgagcgaggagacggcgcagggcgtgctgcagaaccggtacgatgttcagggcaaccgcacagaaacgcagatgccggacgggcggacgctgcggtacctgtactacgggagcggccatctccagcaaatcaacctggggcgtgatgtcatcagcgagttcacgcgcgaccacctgcaccgtgaggtgcagcggagccaggggcggctggacacgcggcggatgtacgaccggacgggccggttaacgcggaaactgacctgtaaaggaatgcgcggtgtggtgccggagacgtttattgaccgggaatatgcgtacagcggccaggatgagctgctgaaaaagcggcacagccggcagggggtgacggattatttttacgacacgacggggcgtatcacggcgtgccggaatgaggcatacctggacagctggcagtacgacgcggcggcgaacctgctggacaggcggcagggagagaccgcgcaggcgggtgcaggcagcgtggtgccgttcaaccggataacgtcataccgtgggctgcattaccgttacgatgaatatggccgggtggttgaaaagcggggccgcaacggcacgcagcactaccgctgggacgcggagcaccggctgacggaagtggcggtcatccgggggagcaccgtacggcgttacgggtacgtgtacgacgcgccgggcaggcgggtggagaagcacgaactggacgcggaaggaaagccgtataaccggacgacgtttttatgggacggaatgcggctggcacaggagtgcaggctgggaagaagcagcagcctgtatatctacagcgaccaggggagccacgagccgctggcgcgggtggacagggcggcgccgggcgaagcggatgaggtgctgtattaccacacggacgtaaacggcgcgccggaggagatgacggacggcaggggcaatattgtctgggaagcgggctatcaggtatgggggaacctgacgcatgaaaaagaaacccggcccgtacagcagaacctgcgtttccaggggcaatatctggacagggaaacggggctgcattacaatttgtacagattttatgatccggatatcgggaagtttatatcgggcgatccgatcgggctgaggggcggaataaacttatatgcgtatgcaccgaatccgttaagttggatcgatccgttaggtcttaaatgttctcactctgctaagaatccgaaagaattccattcggctataagtgataagtgggggcataaaatgactcccgcagaaatgagagaagtacaaaaaacaatagataatattaaattaaatagacctgcttatcctcgtgatggaataccttttgaaaataatttcaaaatatcacctgatagccaacgccttaatacgggaagtggcccttatagagaatggactgtaaaaactcctggtgttggaaatcgaggtgctagacgtattgttgttgatacgaaaacaggtcaggcatactatagtcatgatcattacgactctttcatagagatagatcttggaggatggaagtaa

SEQ ID NO: 388081 - DNA, 324 bp, Salmonella enterica
atgcctaatttcagccactgtgagttttactcacgagttgaaggacgctcggttcgtttatgcggcgactggatggcgcaggccggatttattaacgggatgcctgtgaaaattcgggtgatgaaagactgcgtcgtgatcacgccgcaaaatacccgtaaactgtggggctgtattgaaggtatgagcgtgacctatatcaaccagcgaaacgttaaagcatggttgaaaaattttcccggtgcgctgaatgacaccggggatattccggtgatgagtcgggatcttcagtgtattactaccaattgccggtttgctcactaa

SEQ ID NO: 388082 - DNA, 1239 bp, Salmonella enterica
atgaaccaaaaatcacaaaataataatacccttaacctttttaaaataaaatcccctgcagagctcaaaaaactattaaagacagggatagatataaatacgctcaattcctcgaaccagaatgctttgttcggctgcagatacccggaacttatgaaagcaatgattagctccggaataaatatcaaccagactgacatactgaataaaaacgcacttttctatacgccctctcctgaaaccctgagcgtgctggctgaacacgagattgatatcaaccatacggatagcttgggcagaaatgcgcttttctacaccagtgacgctgaatcagttcagttactggtaaaaaatggtatcagcataaaccactctgaacttgaagataaaaatgcgcttttctttgcaaccaacgaaagctcagccagagaactcatcgacagtggtattgatattaaccacactgacagctatggaagaaatgcccttttctacgtctgtgaggctgacgttaagcgtttgctgattaagaaaggtatcaatgttaaccaaagggatatatatggtcataattccattaacattatcggcatagatgctgacttactggatgtttatttcgctgcgggccttgatcctgacatacaggatcgaaatgggaacagcttaatttttcacccttataaaaaaacaattacagacattttaataaaaaatggctgtgatataaatcaagttaataacaatggggaaaccgtctttgaatacatacagaccatgatattcagcaactctcaacttgatcagtgtctcagcgtgcttacgcctttcattaaccttattaaatccagaccattaacttttaatcgccttacttttggctgccttgagcttattaaaatattgcaaagtcagaatattgattacaaaattaatgagcggtgcgtagtaaaataccccaacaaagacattaaaaaattcattactgaagcacagaaagtcattgatttccgccatgtcaatctgtgttcatggtatgacaccccgcttgtcagtttaaaaaacaaggaaattattaaatggtttataagaaacaatgttaaggtaaacattaatgatattgaagaacaggacatacgtactgaaatccttgcctatattgcactgagggaaaataaagaactcaaaaccgttattaacccgaatataaaaaatgccgccagtaaaaaaagactataa

SEQ ID NO: 388083 - DNA, 408 bp, Salmonella enterica
atgaacagtgacatgagtaatgatgatgatataaccagagtatcaaaacgcggtaaattccatactgacaaacttcctgagaatgaaatacgacatcactgcatcagtgtcagattaaatgaagaagagttaattattctcgacagtaagagcggccagtataaaaagggagaatggctcaggatggcttccctgaataaactcccgccggttctgcctgaaatcaatcgtgaagcatggattaaacttggcagcctttcacaggatttaaaccacctgctgagtcatctcgacagcaaaagccctgacagcgaactgacccgtacagagctctttgccctgcgcagacaaatcaaaactcttcgcgatcacctaattcctacaacctttctggagccagaccgatga

SEQ ID NO: 388084 - DNA, 1236 bp, Salmonella enterica
atgaaaggcatgcagaaaataaaaaggggtaaacagtttgcaggcgtggtgctatacagcctcaaatccggcccacaccacaacgttatgccttatgtcatcggtggtaatatgaccggaagttcggtggcagagcttatcagtgagtttgaaagttctaaacaattgcgtcccgatgtcaccaaacccgtctggcataattcacttcgccttccaaagggagaaacactgtcagccagacagtgggcggcattcgctgacgattatatgacccggatggggttcactgaaacgcaccttcgctgttatatccttcacgacgatgccgacgggcagcatatccatatcattgcaagtcgcattaacatggtcggtggaaagctgtatctggggaaaaatgaaaatctcatcagcacccgcactatcagcgaactggagcgaatacacggactcactgaaacaacacctgcaaccagtagtcgccctcaggctaaaagaaaaccctcacgcaatgagctgatgatggcagaacgaacagcagctccctgccctaagtctcagttgcagaccatgattgataatgtcttaacgcatcatcccgatttactgacttttatcgacatgctggaacggaaaggtgtgacctgtaaacccaatatcgcgtcgaccggaaaaatgaatggattttcatttcagtaccagggcattgcctttaaagcatctcagcttggaaaaaagtatggctggtcttctctgcaaacgcagattgattttacaccagagcgcctggcgttactgaaaaaagagcaacagcaaactgcgccagtgccagtgccagtgccagtgccagtgccagtgccagtgccagtgccagtgccatcatgcgagcctgaagaacaggttgcaaaccgggaaacgattctggagaaaatccttcagcttgaagaaaaaattcgcctggaaagacaacaggaaacagtgaaagtcattcaactcaggagcaaactgcacaatacagctcgtcagatcccccgccagcgtcggctgtattcgtggcttgcattgcttggccatattgtggcacttctcaggcgcaggggtatgtctctgttacatgctactgcacatcctttccaccaaatcctgcacctgcatcttctgacaccctgtcattccatgacaacaaatcccattaaagaacaattagttaaaaataacttccatcctgcaccataa

SEQ ID NO: 388085 - DNA, 273 bp, Salmonella enterica
atggaaaataaaacgattagctgccccttctgctttacacaaagcccgcacggcgtgcggatttgcaaaggctgccatgcaaaagtcgcctacggtgagagtccggttagtgtggcattcctgtttcaattcgtggcattagctctcgcctggttagtattttcattgactggcagcactcctgtctcagtcattacgttttttgccagcgtcattattcttatctgcattattaaaaagaaatatgcagacagagttgtttttatacggtga

SEQ ID NO: 388086 - DNA, 387 bp, Salmonella enterica
atgaacagattcatgatttctgtgttttttatttcttctttacttatttctggctgttcaacatcaggcaaccagcatctaaaaaaagaaacatcacaaagtctgcagtcgaaaatcatcaaaaataaaacaacgaaatcagaaatcattaccgcattcggtcagcccgaaaccaaaactacacttgatagtggcaatgaagaatggacttactcgatggacaacaatcagtttgatgccaccacattcattcccgtgattggactgctgacagggggttcacagacgcaggccaaaacgctggaaatcgaatttaaaggcgaaacggtcagcaagtggacgttctctgaaaacagcatcaagatgaaaaccggtcttattcaataa

SEQ ID NO: 388087 - DNA, 321 bp, Salmonella enterica
atgaaaacatatgcatttaccacactcatcgcgtccatttttttgctgagcggttgtaccggtgaaccgtctgagcaggatatttacactgcgatgaaaaaggtcgtggagcagacgaatgccatcgttaaatccatagcgagaaacgatatcacgcctgacatgctgcggacgttaaaatcagtcaaaaaacacgactgcgaaaaactatcggataaaagctataaatgcaatgtaacagctgttgtcgataacgaaaaacgcacagcggctgtcacgctggtcaaaacggatgatggctggcaggtcgttgataagtaa

SEQ ID NO: 388088 - DNA, 426 bp, Salmonella enterica
atgagtaatatttgtgtttcttctcaggaagaaaagtttatatttgttgttgataaatatataacacaccaccgcgacagtgttaatgacaataatttttacagaaaactttatgtgcttttcgctggataccatctgaagtatttttattcacgggcgcaatatcgcaattcgtgttatcacgttgataatatcatgcagatgtttatgggagtcgtttctaccctgaaggcccctctgctcaggcaactcgcaaacagtgacacattgctgcattgcctgaattcgctcgtgaattatatttcaggcaatctggatgaagcagagcacatctatgctgatttactggcacagtatgaaaagaaacgcattgcacgttctctggcttatacaccaccaggatccgtggtcaggaaaaggctgtga

SEQ ID NO: 388089 - DNA, 618 bp, Salmonella enterica
gtgggtaaggagaatgccggaggacacgaccagtccatcacggtggcgcatgaccggagcatcacggtacgcaacgaccagacgctgaaagtgaagaacgaccggatggtgagcatcagccatgatgacgggctgtacgtggcgaatgaccgtaaggtgacggtggaagggaaacaggagcacaccaccaccggagaccatatcagcctggtgaaaggcagccacagtctggaagtgaaaggcgaccttgcgcggaaggtgtcgggcgcgctggggataaaagtggaagacgatattgtcctggagagcagcagccggataagcctgaaagtgggcggttcgtttgtggttatccatccgggtggcgtggacattatggggccgaagataaacctcaacagcgggggaagtccgggggccccagttgggacaatgcaaccaagcttattgaagtcgctgtcagatgaggacagtggttccgaggattctggtggggcaaacgaatcggatcagacaacaactgaacctgaattaaatcatatgtttgggtccataaaaggtattgatggtattcaaagtaaagagcttgtattcagacggtttactgaagaggaataa

SEQ ID NO: 388090 - DNA, 1650 bp, Salmonella enterica
gtgactggcaaacccaccccattttttgatgaaccacaggataaaccaacaaaatatgatggcctatttggctggtctgcagactggaaatgttatcttgatcaggaggataagcctgtcccattagatggtatctggtcattgtcaccggataagcgtagcgtggttgttcttaaaggagatacgcttggacaaattgcaagtgaatataactgttccgttgaggaacttactgaatataataacataaaaaacccggagttgatctaccccggacaggtaataaatattcctcaacgtcattacactctaactggcgccgaaaaaaagaaagatgataaccaatgttcgttatcgttatcttttgaagatctgatagaaaagcctctttcaggattgaaggttaaagtaacatcagcactgggtgaggttttcgagtttataactgacggtctgggaaggattgatgaatttacagtgcaagccgagtctgaaattaaaatcactgtgtccagtggtatggggaagataaaggaagttgccagattcatatctcaggaaggtaaattaaatgctattatttcaagccccaaggtaagagtaaaaggaaaaagtgcagcaataaccggcccggcaggcaatgctgacagtaaaagtgatgaaattaataaaatcaacgttggacgagactctgagggcacccccagagttcatataaaccatacctgccctaacagttatgatcttatgctaggtaagaatgttatttactggaatgagattattcgcgcatctgagcggagtggcattataccccagagcatagcggcagttattcattctgaagcggctaaatatcgtggtggagtctggaaaccgacttcagtgtgtaaggattcaaaaaaatcgacaaaagaaaatacggtatataaaagttcagcggcggggatgacacaatttttaaatgggacatggatgacggagacgttaagggatggaacatatctttatgaaaaagccactgaacaaggactggtagcagataaacccttgctgaataaaaaaggagaggtagtaaaaaacaaaaaaggcgaggtggtgaatgaaaaaaaatttcaggtttctacagataaatggaaaaatctcaaggaattaacaaatggcagatatatcacaggaataacgccgtacccggttcacgcaacggcagagatacagcaatggttaaatctgcgatttaaaccggaatatgccattatggccgcagttgattatggcgtcgcaaatttagcatctctgaaaatggcaggatataatatcgacggacttaatgatgctgaaaaagccaaacttatatatttaacacatcatcttggtctgagtgatgcaatacattttattaagaataacatcactgaaggtaaagcaaaagaattattaatagcacaagtaggcgatgaatcagccatttcaaaagcaaaaaaaaatggagggtatatgaaagcacacagaaagtggttaatagattatatagatgacaacattaagatagttaaatatctctgccatgagcaaatcatctcagataaccctaaagatattgacttaacacaaataattgaaaaattaatgagcaaatacaatgagtaa

SEQ ID NO: 388091 - DNA, 504 bp, Salmonella enterica
atgagtaagagtttcaatatcttcttcgccttactaattaccccaactgtaagtatggctgattgcaataccgattcgtcgttttgttatcatactaaacttgggattctcgaccaaataacgagatccaagtctggtgatgattactcttaccttacccttaatggagtgaatatatacaaggcaaaaactgattacatgtccttcatagatgatgatatgggcttttttaagaataacaaatactttaccactaagacagttattacatatactttaaacgagcgttgccttgataaaatagaataccagggtttttgcagtatcagtgtagttctcgacttttcaggcgataaacccattatttccaatggtttcatcccgaactcaggaaattcagttatcgattgggtctcatggggaaaagcaaatgcaatcatcgtatttgaggatggttcaaaatttaaatatatgaatggacatgttgagcgcgtcattaaatag

SEQ ID NO: 388092 - DNA, 285 bp, Salmonella enterica
atgcctacagcagtccgacttaatgacaaaggcacccagcacgatggttatcacgaaaccgtcattactgcgggttctccaacggtttctgtcgatggactacccgccgcccgtatgggcgacccgctgacaccgcattccaaaccggaacacccgccccatccgcgtaaaatcgcgggcggttccgccacggtatttattgacggcctgcctgccgccagaaccggtgacgccattgactgcggcggcgtggttatcggcagcggtaccgtcagtatcggttga
